United States Patent Application Publication US 2024/0327476 A1 - sequence listing, part 13

SEQ ID NO: 14121 - DNA, 6798 bp, Homo sapiens
  source 1..6798: mol_type = unassigned DNA
gtgagcggcgctcggggcgcgctaggcggggagccgagccgggctggcggcaggcggacggggcgggcgcgtgcggcgcgagccgggcgctgaggacaagggccgctggtagggccggccggccggcgggcggagcgccgccgccgacgcacacgaggtgaccaggcattgatgcacccccaggaaggccacgcgctcaggagccccccccgccgctggctgctgctcacatggtgtctgggcccttggcactccggtggtgcgcgtgggcagggcgcggggacatggggcccgacatggagctgcccagccactcgaagcagctcctgctgcagctgaaccagcagaggaccaagggcttcctgtgtgacgtcatcatcatggtggagaactccatcttccgggcccacaagaacgtcctagccgccagcagcatctatttcaagtccctggtcctgcacgacaacctcatcaacctggacacagacatggtcagctccacagtgttccagcagatcttggacttcatctacacaggcaagctgctgcccagcgaccagccagccgagcccaacttcagcaccctcctcactgccgccagctacctccagctgcccgagttggcagccctctgccgccgcaaactcaagcgagccggcaagccctttggctctgggagggcggggtccactggcatggggcggcccccccgcagccagcggctgtccacggcctctgtcatccaagctcggtatcaggggctcgtggatgggcgcaagggggcccacgccccccaggagctcccccaagccaaaggctcagacgatgaactctttcttggtggctctaaccaggatagcgtgcaaggtctgggccgggctgtctgcccagctggcggggaggcgggtctggggggctgcagcagcagcaccaacgggagcagcgggggctgcgagcaggagctgggcttggacctgtccaagaaaagcccacccttgccccctgccaccccaggtccccacctcactcccgatgacgcagcccagctgagcgacagccaacatggctcgccccctgcggcctctgctcctcccgttgccaacagtgcctcttattctgagctggggggcacccctgatgagcccatggatctggagggggccgaggacaaccacctgagcctgctggaggcgcctggtgggcagcctcggaagagcctccggcactccactcggaagaaggagtggggcaagaaggagcctgtggctggctccccctttgagcggagagaagcagggcccaagggtccctgcccgggagaggagggtgagggggtcggggacagggttcccaatggcatcctggctagtggggctggccctagcgggccctatggggagcccccctacccctgcaaggaggaggaggagaacggcaaggatgcaagtgaagacagtgcgcagagcgggagcgaggggggcagcggccatgccagcgcccactacatgtaccggcaggagggctacgagacggtgtcctacggggacaacttgtatgtgtgcattccctgcgccaagggcttccccagctctgagcagctcaatgcgcacgtggagactcacacggaggaagagctgttcatcaaggaagagggggcctacgagacaggcagtgggggtgccgaggaggaggccgaggacctgtcagcacccagtgcggcctacacggctgagccccggcccttcaagtgttcggtctgcgagaagacctacaaggacccagccacgctgcggcagcacgagaagacgcactggctgacacggcccttcccctgcaacatctgtggcaaaatgttcacgcagcgcggcaccatgacgcgtcacatgcggagccacctgggcctgaagcccttcgcctgcgatgagtgtggcatgcgcttcacccgtcagtaccgcctcacggagcacatgcgtgtgcactcgggcgagaaaccttacgagtgccagctgtgcgggggcaagttcacccagcagcgcaacctcatcagccacctgcgcatgcacacctccccctcctagaagccaaagacccgcgggcgccctctgccaccttgctccccgggaacccatggaaggagaagcgaggtgatgcagcagcaggggcaagaccctgggtccagtggaggctccgggtggcccctctggcccccactgcccacacccagagctttaatggacagtccgtaccaagcagagccgagaggagggaagccaggggtcccagcccgtctacctccccatcccacccaggcccccagctccccgcgggggccaccgcagggcctgtgggctgggtcacgtgggtctcgctgggacctggtccctttgttgcaggcggcttggagaaagggcagtgggacgctggccacggccagggtggtgtcgggagcaggcctcaccccgctggccgtgtctgtgtgtgtgcacgtgtgcttgtgtctgtgcgggcgcgtgcagccctggttctgcagggaacaggtgctgggggtgcagatccctccctccttgagccagggtggcactgttcactggcgctgggacagtcagggtgaccccaccgcctacctctctacatctaaagagccctctgggcctgtgttgctgttattcctactgatctgttcctctgtttttctttttgatttttgttttttaaaccaaaacagacaatagcttattttctttccgccccctccggggctgagcctgggtctgaagactgaatgtaacaggggccgctggcactcctgcgcgtcccccggctctggcgctgcaggggtgtcggcgcgccacctctccaggccccagaagcccttcttgcccaaaggcttccctggtccctgagccctgcctcggctgcctcaggggagagtgcttttcctgtagtttccaaggaatattctttgtttagaggtacttgttttttattaagagaaaaaccagtgtaacgtttatgtgactgtttgaactggaaggtctggggttccggggggtggggggaggctagactcaatgccggggccgtcggtactcttgttttcatttgtgtgtgcgtgcgtgtgtgtgtgtgtatgtgcgtatgtgtgtgtctatgtgtggtgtgtgccgtatgcatgggcagatgtttcgctttccctccttcctcgctgaacaaggtggagacttctgaccttttgctacctcttgaattcatgacaacgatatgttggtgactggcagtggaagcccttgacactcttgttttccttcgcttagcacctaggaagtcgtgtgcaggagccagcagggcgccaagtggcccagtgcctgcagctcacctgtgggttttccctttgagcctttggccacatccacctcgaggggaccctggcaccccgggcacacaaacctctgtggtataggtgaggggtgtgaggccccagcctggagccaggcactgggtgctgacaggggaaccatgaggagggtggcaggtctttgcagctcccggccagggtgaggcggaagtgagccctcatcctgccactcctatcctccattcctgcaagagttttaagcttgagagagctgaccacagggccccccggggaacagggatggcacttccctgagcagtcctggcccccggccactgtctcggggcccacctctcgcccctcatcttggtaattagccagcctcagatacttctgtgggccctgaagtgggctctcaaggtcagaccaaggttgctgatctcagtcccactgtcttcagccagctgaagctgtggggctgggctggcagcctttattgtcatcttgcttcaccatttttttttctctctcttttcattctattttaagtttagaccaaaaaaatacagagtcatcccctacccccacccctctagagaccctccagctaaaaacagagcctgagttcagggacccaagtggtgagcggcgtcttttgggggtgagggagcttgggtagatgaggctcctggctgagccctccctgtggtgatcccagcctaagatggcccctcttccctcctggtgggagacagaggactggaccctgggtctcaggttccagcaagtcaggctagggacctggggggaggagacccatggacttcacccatactcagtgagggggctcctgccgtcctgacgccaccccgccccatcagcacttaagccacatgacacaaagtctgtaccgcacgggaaatgttcacgcgcctggccgtgtgcatggcctcccgggctgtgggcagccgcatctgtgaggtgactcgtgaaagtaggtgattcctttgcagaacttcagggactgggagcagaggcccctcactcaacgacgtttgtgcgacatagtattgtatccaccttagtattgtatcgagccttttctgtgttttaatgagaaagcagaacactagtttcctatttaagactttaagggtttgtggggcggggcgggattaacacaacatttggctttgttttctttttcctttgatttccacatcaggtgtgtgcgagtgtgtgtgtgtggagatgttaagagcctcacaaggaaactgggttattggaggccaaggcggcttacagttctctgcgttcgtcacttaattcctgaatgtttcagagaaacaggaatcagaaaatagcagatatcatgtaggaaagagaggataaacaaagaaaaaagaaaaaaaaataagctcatacccaaattcacaaagcctattttttaaaccaaagcacattttgaatgagtatggaacctccatgggctcagaaaaaagatgctaatatatttatctcattgtttacataagcttttacagtttcagacctcagcagctgtaaggccagtccagggaaccctcccctgctgctggaaacccttctgagttggccctggagtggctcacgggcagagaagggtagccctggggctgggggagggattggaagcctccctggagtcacctgagccctcgtccccattcccagggcccctccaagcccagctggcaccaaagagcttgggcccgtgctgaccagcccccaaggccctctggccggaccatgctggtcctgaccagctagcctacgcggggatggccgtcagttctggccacaggacccgagtctgggcttgggtccccctgctgctctgcccgtgacccttggggatgggttgatgcgagggtcccactcaagccaaaaagccgggacctttgcgcagctctgtcgactctggtgggtccccactcctggggccccctaaccccaccccaggcagcggaaggggctgactgggtctggtccttaccaacatagacggtgcaaacactcttaacagtgttgtttttgtatcaatatgtttgtgcagtgatgaatgtatttatttctcagacttggggcgagtgagcgggtggcaggccgggctccgccactgcatgctcccgccggaccgagccccagcaagggctcctccaggattgcaaaaaaaaaaggaagagaaaagatgaacctttaagcaaataagaatctcagagactcgcagcatagccatacacctcagcctgtgaaatgaacgatccggaccctcaccaactttccccacctcaggcagccctgtgtgtttaccgttcatcaccactcgggggcaccgggccgcccacccactcccaaaatccgtcagtattcactggacctcaggccctgtgcaggagtgcgatccgggctgggccgctgggcaggctgaccccctgccctcctgcggccatcctgagttggggtgaggcctgggcagccggagggcagggctcagggagcaggaggctgcatccgtccacccccaggcgtgggggacaaaagccaaaggtgccaggccttagagcagacaagggctctcagccctggcatgccccctaaagggaccaaggtcctcctatttcccagaaccccgttggggcagatgttactgaacctgtgaatcagacgccaggagtgagggctggggagggacctaactggagcctcagtctgacattccacgccggggtgggggtgggcatgagcggtgggaactgaggctgcccaggacccccttcctaggatgccccggcttcagtcaccccactttaactttctaccaggaccccctccccctacctcaccttgctatttattgctgtaatttattgacctcaaaaatgctgcataacagacctcactggggcagggaggatccccagggctcccaccctccacttggcgggccccgtggggccaggtgctgaggggagcctctctaccccacccatcactagcttccctctgccctctcccaccccgggggggacccaggttgggcactggctcatttctcgcaaatacctcgaaggggaggggggagggatggggttatagctgttttgtttaattggaactggaagagggatcatgttttgttttatgcccttcccagaaggggggagggacaccgggatcgcactcctgtactggccaccgccgctgtcacttgtcacattgagttcatgtcccttgagagtttgtataaattcaggtcagagctgcagctacacagctgcccagtgtcatagaaaagcaattcaccaacgactgatctctccattcagaagtgtgcagtcttaaatgtacagcgataagaaactgttattttatgatcttttcattaaaagcttgattgaaaa

SEQ ID NO: 14122 - DNA, 4734 bp, Homo sapiens
  source 1..4734: mol_type = unassigned DNA
ttttaaaaggcagtggtagggtagagggtggcagtggagacagctggagagcactgaggacgcggacccacgggtactgtgtgagctgtgaagcccgcttgggagaccccactgccagccaggtgaccaggcattgatgcacccccaggaaggccacgcgctcaggagccccccccgccgctggctgctgctcacatggtgtctgggcccttggcactccggtggtgcgcgtgggcagggcgcggggacatggggcccgacatggagctgcccagccactcgaagcagctcctgctgcagctgaaccagcagaggaccaagggcttcctgtgtgacgtcatcatcatggtggagaactccatcttccgggcccacaagaacgtcctagccgccagcagcatctatttcaagtccctggtcctgcacgacaacctcatcaacctggacacagacatggtcagctccacagtgttccagcagatcttggacttcatctacacaggcaagctgctgcccagcgaccagccagccgagcccaacttcagcaccctcctcactgccgccagctacctccagctgcccgagttggcagccctctgccgccgcaaactcaagcgagccggcaagccctttggctctgggagggcggggtccactggcatggggcggcccccccgcagccagcggctgtccacggcctctgtcatccaagctcggtatcaggggctcgtggatgggcgcaagggggcccacgccccccaggagctcccccaagccaaaggctcagacgatgaactctttcttggtggctctaaccaggatagcgtgcaaggtctgggccgggctgtctgcccagctggcggggaggcgggtctggggggctgcagcagcagcaccaacgggagcagcgggggctgcgagcaggagctgggcttggacctgtccaagaaaagcccacccttgccccctgccaccccaggtccccacctcactcccgatgacgcagcccagctgagcgacagccaacatggctcgccccctgcggcctctgctcctcccgttgccaacagtgcctcttattctgagctggggggcacccctgatgagcccatggatctggagggggccgaggacaaccacctgagcctgctggaggcgcctggtgggcagcctcggaagagcctccggcactccactcggaagaaggagtggggcaagaaggagcctgtggctggctccccctttgagcggagagaagcagggcccaagggtccctgcccgggagaggagggtgagggggtcggggacagggttcccaatggcatcctggctagtggggctggccctagcgggccctatggggagcccccctacccctgcaaggaggaggaggagaacggcaaggatgcaagtgaagacagtgcgcagagcgggagcgaggggggcagcggccatgccagcgcccactacatgtaccggcaggagggctacgagacggtgtcctacggggacaacttgtatgtgtgcattccctgcgccaagggcttccccagctctgagcagctcaatgcgcacgtggagactcacacggaggaagagctgttcatcaaggaagagggggcctacgagacaggcagtgggggtgccgaggaggaggccgaggacctgtcagcacccagtgcggcctacacggctgagccccggcccttcaagtgttcggtctgcgagaagacctacaaggacccagccacgctgcggcagcacgagaagacgcactggctgacacggcccttcccctgcaacatctgtggcaaaatgttcacgcagcgcggcaccatgacgcgtcacatgcggagccacctgggcctgaagcccttcgcctgcgatgagtgtggcatgcgcttcacccgtcagtaccgcctcacggagcacatgcgtgtgcactcgggcgagaaaccttacgagtgccagctgtgcgggggcaagttcacccagcagcgcaacctcatcagccacctgcgcatgcacacctccccctcctagaagccaaagacccgcgggcgccctctgccaccttgctccccgggaacccatggaaggagaagcgaggtgatgcagcagcaggggcaagaccctgggtccagtggaggctccgggtggcccctctggcccccactgcccacacccagagctttaatggacagtccgtaccaagcagagccgagaggagggaagccaggggtcccagcccgtctacctccccatcccacccaggcccccagctccccgcgggggccaccgcagggcctgtgggctgggtcacgtgggtctcgctgggacctggtccctttgttgcaggcggcttggagaaagggcagtgggacgctggccacggccagggtggtgtcgggagcaggcctcaccccgctggccgtgtctgtgtgtgtgcacgtgtgcttgtgtctgtgcgggcgcgtgcagccctggttctgcagggaacaggtgctgggggtgcagatccctccctccttgagccagggtggcactgttcactggcgctgggacagtcagggtgaccccaccgcctacctctctacatctaaagagccctctgggcctgtgttgctgttattcctactgatctgttcctctgtttttctttttgatttttgttttttaaaccaaaacagacaatagcttattttctttccgccccctccggggctgagcctgggtctgaagactgaatgtaacaggggccgctggcactcctgcgcgtcccccggctctggcgctgcaggggtgtcggcgcgccacctctccaggccccagaagcccttcttgcccaaaggcttccctggtccctgagccctgcctcggctgcctcaggggagagtgcttttcctgtagtttccaaggaatattctttgtttagaggtacttgttttttattaagagaaaaaccagtgtaacgtttatgtgactgtttgaactggaaggtctggggttccggggggtggggggaggctagactcaatgccggggccgtcggtactcttgttttcatttgtgtgtgcgtgcgtgtgtgtgtgtgtatgtgcgtatgtgtgtgtctatgtgtggtgtgtgccgtatgcatgggcagatgtttcgctttccctccttcctcgctgaacaaggtggagacttctgaccttttgctacctcttgaattcatgacaacgatatgttggtgactggcagtggaagcccttgacactcttgttttccttcgcttagcacctaggaagtcgtgtgcaggagccagcagggcgccaagtggcccagtgcctgcagctcacctgtgggttttccctttgagcctttggccacatccacctcgaggggaccctggcaccccgggcacacaaacctctgtggtataggtgaggggtgtgaggccccagcctggagccaggcactgggtgctgacaggggaaccatgaggagggtggcaggtctttgcagctcccggccagggtgaggcggaagtgagccctcatcctgccactcctatcctccattcctgcaagagttttaagcttgagagagctgaccacagggccccccggggaacagggatggcacttccctgagcagtcctggcccccggccactgtctcggggcccacctctcgcccctcatcttggtaattagccagcctcagatacttctgtgggccctgaagtgggctctcaaggtcagaccaaggttgctgatctcagtcccactgtcttcagccagctgaagctgtggggctgggctggcagcctttattgtcatcttgcttcaccatttttttttctctctcttttcattctattttaagtttagaccaaaaaaatacagagtcatcccctacccccacccctctagagaccctccagctaaaaacagagcctgagttcagggacccaagtggtgagcggcgtcttttgggggtgagggagcttgggtagatgaggctcctggctgagccctccctgtggtgatcccagcctaagatggcccctcttccctcctggtgggagacagaggactggaccctgggtctcaggttccagcaagtcaggctagggacctggggggaggagacccatggacttcacccatactcagtgagggggctcctgccgtcctgacgccaccccgccccatcagcacttaagccacatgacacaaagtctgtaccgcacgggaaatgttcacgcgcctggccgtgtgcatggcctcccgggctgtgggcagccgcatctgtgaggtgactcgtgaaagtaggtgattcctttgcagaacttcagggactgggagcagaggcccctcactcaacgacgtttgtgcgacatagtattgtatccaccttagtattgtatcgagccttttctgtgttttaatgagaaagcagaacactagtttcctatttaagactttaagggtttgtggggcggggcgggattaacacaacatttggctttgttttctttttcctttgatttccacatcaggtgtgtgcgagtgtgtgtgtgtggagatgttaagagcctcacaaggaaactgggttattggaggccaaggcggcttacagttctctgcgttcgtcacttaattcctgaatgtttcagagaaacaggaatcagaaaatagcagatatcatgtaggaaagagaggataaacaaagaaaaaagaaaaaaaaa

SEQ ID NO: 14123 - DNA, 6940 bp, Homo sapiens
  source 1..6940: mol_type = unassigned DNA
ggccaagaattgtgtgtctgccaccagcgccccctggcctaggtggcccctgggtgtccttaatctcctgtgtgtgttagaggggcaggcattgcacccaccgaactccctagacctgttcgctggtccttactcttcctggctgtcagatccaactaccaggctctgtggccacagtctcctgctgggctgcccctggtgccccagccagagacccccaggtgcgtcccttcatcgcccttccctcccttcttcgctgatggctgtctgggtgactgtgttcgtcttctcttccccaggtgaccaggcattgatgcacccccaggaaggccacgcgctcaggagccccccccgccgctggctgctgctcacatggtgtctgggcccttggcactccggtggtgcgcgtgggcagggcgcggggacatggggcccgacatggagctgcccagccactcgaagcagctcctgctgcagctgaaccagcagaggaccaagggcttcctgtgtgacgtcatcatcatggtggagaactccatcttccgggcccacaagaacgtcctagccgccagcagcatctatttcaagtccctggtcctgcacgacaacctcatcaacctggacacagacatggtcagctccacagtgttccagcagatcttggacttcatctacacaggcaagctgctgcccagcgaccagccagccgagcccaacttcagcaccctcctcactgccgccagctacctccagctgcccgagttggcagccctctgccgccgcaaactcaagcgagccggcaagccctttggctctgggagggcggggtccactggcatggggcggcccccccgcagccagcggctgtccacggcctctgtcatccaagctcggtatcaggggctcgtggatgggcgcaagggggcccacgccccccaggagctcccccaagccaaaggctcagacgatgaactctttcttggtggctctaaccaggatagcgtgcaaggtctgggccgggctgtctgcccagctggcggggaggcgggtctggggggctgcagcagcagcaccaacgggagcagcgggggctgcgagcaggagctgggcttggacctgtccaagaaaagcccacccttgccccctgccaccccaggtccccacctcactcccgatgacgcagcccagctgagcgacagccaacatggctcgccccctgcggcctctgctcctcccgttgccaacagtgcctcttattctgagctggggggcacccctgatgagcccatggatctggagggggccgaggacaaccacctgagcctgctggaggcgcctggtgggcagcctcggaagagcctccggcactccactcggaagaaggagtggggcaagaaggagcctgtggctggctccccctttgagcggagagaagcagggcccaagggtccctgcccgggagaggagggtgagggggtcggggacagggttcccaatggcatcctggctagtggggctggccctagcgggccctatggggagcccccctacccctgcaaggaggaggaggagaacggcaaggatgcaagtgaagacagtgcgcagagcgggagcgaggggggcagcggccatgccagcgcccactacatgtaccggcaggagggctacgagacggtgtcctacggggacaacttgtatgtgtgcattccctgcgccaagggcttccccagctctgagcagctcaatgcgcacgtggagactcacacggaggaagagctgttcatcaaggaagagggggcctacgagacaggcagtgggggtgccgaggaggaggccgaggacctgtcagcacccagtgcggcctacacggctgagccccggcccttcaagtgttcggtctgcgagaagacctacaaggacccagccacgctgcggcagcacgagaagacgcactggctgacacggcccttcccctgcaacatctgtggcaaaatgttcacgcagcgcggcaccatgacgcgtcacatgcggagccacctgggcctgaagcccttcgcctgcgatgagtgtggcatgcgcttcacccgtcagtaccgcctcacggagcacatgcgtgtgcactcgggcgagaaaccttacgagtgccagctgtgcgggggcaagttcacccagcagcgcaacctcatcagccacctgcgcatgcacacctccccctcctagaagccaaagacccgcgggcgccctctgccaccttgctccccgggaacccatggaaggagaagcgaggtgatgcagcagcaggggcaagaccctgggtccagtggaggctccgggtggcccctctggcccccactgcccacacccagagctttaatggacagtccgtaccaagcagagccgagaggagggaagccaggggtcccagcccgtctacctccccatcccacccaggcccccagctccccgcgggggccaccgcagggcctgtgggctgggtcacgtgggtctcgctgggacctggtccctttgttgcaggcggcttggagaaagggcagtgggacgctggccacggccagggtggtgtcgggagcaggcctcaccccgctggccgtgtctgtgtgtgtgcacgtgtgcttgtgtctgtgcgggcgcgtgcagccctggttctgcagggaacaggtgctgggggtgcagatccctccctccttgagccagggtggcactgttcactggcgctgggacagtcagggtgaccccaccgcctacctctctacatctaaagagccctctgggcctgtgttgctgttattcctactgatctgttcctctgtttttctttttgatttttgttttttaaaccaaaacagacaatagcttattttctttccgccccctccggggctgagcctgggtctgaagactgaatgtaacaggggccgctggcactcctgcgcgtcccccggctctggcgctgcaggggtgtcggcgcgccacctctccaggccccagaagcccttcttgcccaaaggcttccctggtccctgagccctgcctcggctgcctcaggggagagtgcttttcctgtagtttccaaggaatattctttgtttagaggtacttgttttttattaagagaaaaaccagtgtaacgtttatgtgactgtttgaactggaaggtctggggttccggggggtggggggaggctagactcaatgccggggccgtcggtactcttgttttcatttgtgtgtgcgtgcgtgtgtgtgtgtgtatgtgcgtatgtgtgtgtctatgtgtggtgtgtgccgtatgcatgggcagatgtttcgctttccctccttcctcgctgaacaaggtggagacttctgaccttttgctacctcttgaattcatgacaacgatatgttggtgactggcagtggaagcccttgacactcttgttttccttcgcttagcacctaggaagtcgtgtgcaggagccagcagggcgccaagtggcccagtgcctgcagctcacctgtgggttttccctttgagcctttggccacatccacctcgaggggaccctggcaccccgggcacacaaacctctgtggtataggtgaggggtgtgaggccccagcctggagccaggcactgggtgctgacaggggaaccatgaggagggtggcaggtctttgcagctcccggccagggtgaggcggaagtgagccctcatcctgccactcctatcctccattcctgcaagagttttaagcttgagagagctgaccacagggccccccggggaacagggatggcacttccctgagcagtcctggcccccggccactgtctcggggcccacctctcgcccctcatcttggtaattagccagcctcagatacttctgtgggccctgaagtgggctctcaaggtcagaccaaggttgctgatctcagtcccactgtcttcagccagctgaagctgtggggctgggctggcagcctttattgtcatcttgcttcaccatttttttttctctctcttttcattctattttaagtttagaccaaaaaaatacagagtcatcccctacccccacccctctagagaccctccagctaaaaacagagcctgagttcagggacccaagtggtgagcggcgtcttttgggggtgagggagcttgggtagatgaggctcctggctgagccctccctgtggtgatcccagcctaagatggcccctcttccctcctggtgggagacagaggactggaccctgggtctcaggttccagcaagtcaggctagggacctggggggaggagacccatggacttcacccatactcagtgagggggctcctgccgtcctgacgccaccccgccccatcagcacttaagccacatgacacaaagtctgtaccgcacgggaaatgttcacgcgcctggccgtgtgcatggcctcccgggctgtgggcagccgcatctgtgaggtgactcgtgaaagtaggtgattcctttgcagaacttcagggactgggagcagaggcccctcactcaacgacgtttgtgcgacatagtattgtatccaccttagtattgtatcgagccttttctgtgttttaatgagaaagcagaacactagtttcctatttaagactttaagggtttgtggggcggggcgggattaacacaacatttggctttgttttctttttcctttgatttccacatcaggtgtgtgcgagtgtgtgtgtgtggagatgttaagagcctcacaaggaaactgggttattggaggccaaggcggcttacagttctctgcgttcgtcacttaattcctgaatgtttcagagaaacaggaatcagaaaatagcagatatcatgtaggaaagagaggataaacaaagaaaaaagaaaaaaaaataagctcatacccaaattcacaaagcctattttttaaaccaaagcacattttgaatgagtatggaacctccatgggctcagaaaaaagatgctaatatatttatctcattgtttacataagcttttacagtttcagacctcagcagctgtaaggccagtccagggaaccctcccctgctgctggaaacccttctgagttggccctggagtggctcacgggcagagaagggtagccctggggctgggggagggattggaagcctccctggagtcacctgagccctcgtccccattcccagggcccctccaagcccagctggcaccaaagagcttgggcccgtgctgaccagcccccaaggccctctggccggaccatgctggtcctgaccagctagcctacgcggggatggccgtcagttctggccacaggacccgagtctgggcttgggtccccctgctgctctgcccgtgacccttggggatgggttgatgcgagggtcccactcaagccaaaaagccgggacctttgcgcagctctgtcgactctggtgggtccccactcctggggccccctaaccccaccccaggcagcggaaggggctgactgggtctggtccttaccaacatagacggtgcaaacactcttaacagtgttgtttttgtatcaatatgtttgtgcagtgatgaatgtatttatttctcagacttggggcgagtgagcgggtggcaggccgggctccgccactgcatgctcccgccggaccgagccccagcaagggctcctccaggattgcaaaaaaaaaaggaagagaaaagatgaacctttaagcaaataagaatctcagagactcgcagcatagccatacacctcagcctgtgaaatgaacgatccggaccctcaccaactttccccacctcaggcagccctgtgtgtttaccgttcatcaccactcgggggcaccgggccgcccacccactcccaaaatccgtcagtattcactggacctcaggccctgtgcaggagtgcgatccgggctgggccgctgggcaggctgaccccctgccctcctgcggccatcctgagttggggtgaggcctgggcagccggagggcagggctcagggagcaggaggctgcatccgtccacccccaggcgtgggggacaaaagccaaaggtgccaggccttagagcagacaagggctctcagccctggcatgccccctaaagggaccaaggtcctcctatttcccagaaccccgttggggcagatgttactgaacctgtgaatcagacgccaggagtgagggctggggagggacctaactggagcctcagtctgacattccacgccggggtgggggtgggcatgagcggtgggaactgaggctgcccaggacccccttcctaggatgccccggcttcagtcaccccactttaactttctaccaggaccccctccccctacctcaccttgctatttattgctgtaatttattgacctcaaaaatgctgcataacagacctcactggggcagggaggatccccagggctcccaccctccacttggcgggccccgtggggccaggtgctgaggggagcctctctaccccacccatcactagcttccctctgccctctcccaccccgggggggacccaggttgggcactggctcatttctcgcaaatacctcgaaggggaggggggagggatggggttatagctgttttgtttaattggaactggaagagggatcatgttttgttttatgcccttcccagaaggggggagggacaccgggatcgcactcctgtactggccaccgccgctgtcacttgtcacattgagttcatgtcccttgagagtttgtataaattcaggtcagagctgcagctacacagctgcccagtgtcatagaaaagcaattcaccaacgactgatctctccattcagaagtgtgcagtcttaaatgtacagcgataagaaactgttattttatgatcttttcattaaaagcttgattgaaaa

SEQ ID NO: 14124 - DNA, 3406 bp, Homo sapiens
  source 1..3406: mol_type = unassigned DNA
ggccggcggcggcggcggcggctccgctccgcactgcccggcgccgcctcgccatggacgcgcgcgggggcggcgggcggcccggggagagcccgggcgcgacccccgcgccggggccgccgccgccgccgccgcccgcgcccccccaacagcagccgccgccgccgccgccgcccgcgccccccccgggccccgggcccgcgcccccccagcacccgccccgggccgaggcgttgcccccggaggcggcggatgagggcggcccgcggggccggctccgcagccgcgacagctcgtgcggccgccccggcaccccgggcgcggcgagcacggccaagggcagcccgaacggcgagtgcgggcgcggcgagccgcagtgcagccccgcggggcccgagggcccggcgcgggggcccaaggtgtcgttctcgtgccgcggggcggcctcggggcccgcgccggggccggggccggcggaggaggcgggcagcgaggaggcgggcccggcgggggagccgcgcggcagccaggccagcttcatgcagcgccagttcggcgcgctcctgcagccgggcgtcaacaagttctcgctgcggatgttcggcagccagaaggccgtggagcgcgagcaggagcgcgtcaagtcggcgggggcctggatcatccacccgtacagcgacttcaggttctactgggacttcaccatgctgctgttcatggtgggaaacctcatcatcatcccagtgggcatcaccttcttcaaggatgagaccactgccccgtggatcgtgttcaacgtggtctcggacaccttcttcctcatggacctggtgttgaacttccgcaccggcattgtgatcgaggacaacacggagatcatcctggaccccgagaagatcaagaagaagtatctgcgcacgtggttcgtggtggacttcgtgtcctccatccccgtggactacatcttccttatcgtggagaagggcattgactccgaggtctacaagacggcacgcgccctgcgcatcgtgcgcttcaccaagatcctcagcctcctgcggctgctgcgcctctcacgcctgatccgctacatccatcagtgggaggagatcttccacatgacctatgacctggccagcgcggtgatgaggatctgcaatctcatcagcatgatgctgctgctctgccactgggacggctgcctgcagttcctggtgcctatgctgcaggacttcccgcgcaactgctgggtgtccatcaatggcatggtgaaccactcgtggagtgaactgtactccttcgcactcttcaaggccatgagccacatgctgtgcatcgggtacggccggcaggcgcccgagagcatgacggacatctggctgaccatgctcagcatgattgtgggtgccacctgctacgccatgttcatcggccacgccactgccctcatccagtcgctggactcctcgcggcgccagtaccaggagaagtacaagcaggtggagcagtacatgtccttccacaagctgccagctgacttccgccagaagatccacgactactatgagcaccgttaccagggcaagatgtttgacgaggacagcatcctgggcgagctcaacgggcccctgcgggaggagatcgtcaacttcaactgccggaagctggtggcctccatgccgctgttcgccaacgccgaccccaacttcgtcacggccatgctgaccaagctcaagttcgaggtcttccagccgggtgactacatcatccgcgaaggcaccatcgggaagaagatgtacttcatccagcacggcgtggtcagcgtgctcactaagggcaacaaggagatgaagctgtccgatggctcctacttcggggagatctgcctgctcacccggggccgccgcacggcgagcgtgcgggctgacacctactgccgcctctattcgctgagcgtggacaacttcaacgaggtgctggaggagtaccccatgatgcggcgcgccttcgagacggtggccatcgaccgcctggaccgcatcggcaagaagaattccatcctcctgcacaaggtgcagcatgacctcaactcgggcgtattcaacaaccaggagaacgccatcatccaggagatcgtcaagtacgaccgcgagatggtgcagcaggccgagctgggtcagcgcgtgggcctcttcccgccgccgccgccgccgccgcaggtcacctcggccatcgccacgctgcagcaggcggcggccatgagcttctgcccgcaggtggcgcggccgctcgtggggccgctggcgctcggctcgccgcgcctcgtgcgccgcccgcccccggggcccgcacctgccgccgcctcacccgggcccccgccccccgccagccccccgggcgcgcccgccagcccccgggcaccgcggacctcgccctacggcggcctgcccgccgccccccttgctgggcccgccctgcccgcgcgccgcctgagccgcgcgtcgcgcccactgtccgcctcgcagccctcgctgcctcacggcgcccccggccccgcggcctccacacgcccggccagcagctccacaccgcgcttggggcccacgcccgctgcccgggccgccgcgcccagcccggaccgcagggactcggcctcacccggcgccgccggcggcctggacccccaggactccgcgcgctcgcgcctctcgtccaacttgtgaccctcgccgaccgccccgcgggcccaggcgggccgggggcggggccgtcatccagaccaaagccatgccattgcgctgccccggccgccagtccgcccagaagccatagacgagacgtaggtagccgtagttggacggacgggcagggccggcggggcagccccctccgcgcccccggccgtcccccctcatcgccccgcgcccacccccatcgcccctgcccccggcggcggcctcgcgtgcgagggggctcccttcacctcggtgcctcagttcccccagctgtaagacagggacggggcggcccagtggctgagaggagccggctgtggagccccgcccgccccccaccctctaggtggcccccgtccgaggaggatcgttttctaagtgcaatacttggcccgccggcttcccgctgcccccatcgcgctcacgcaataaccggcccggcccccgtccgcgcgcgtcccccggtgacctcggggagcagcaccccgcctccctccagcactggcaccgagaggcaggcctggctgcgcagggcgcgggggggaggctggggtcccgccgccgtgatgaatgtactgacgagccgaggcagcagtgcccccaccgtggccccccacgccccattaacccccacacccccattccgcgcaataaacgacagcattggcgcc

SEQ ID NO: 14125 - DNA, 3718 bp, Homo sapiens
  source 1..3718: mol_type = unassigned DNA
tgggcgccatggaggcagagcagcggccggcggcgggggccagcgaaggggcgacccctggactggaggcggtgcctcccgttgctcccccgcctgcgaccgcggcctcaggtccgatccccaaatctgggcctgagcctaagaggaggcaccttgggacgctgctccagcctacggtcaacaagttctcccttcgggtgttcggcagccacaaagcagtggaaatcgagcaggagcgggtgaagtcagcgggggcctggatcatccacccctacagcgacttccggttttactgggacctgatcatgctgctgctgatggtggggaacctcatcgtcctgcctgtgggcatcaccttcttcaaggaggagaactccccgccttggatcgtcttcaacgtattgtctgatactttcttcctactggatctggtgctcaacttccgaacgggcatcgtggtggaggagggtgctgagatcctgctggcaccgcgggccatccgcacgcgctacctgcgcacctggttcctggttgacctcatctcttctatccctgtggattacatcttcctagtggtggagctggagccacggttggacgctgaggtctacaaaacggcacgggccctacgcatcgttcgcttcaccaagatcctaagcctgctgaggctgctccgcctctcccgcctcatccgctacatacaccagtgggaggagatctttcacatgacctatgacctggccagtgctgtggttcgcatcttcaacctcattgggatgatgctgctgctatgtcactgggatggctgtctgcagttcctggtgcccatgctgcaggacttccctcccgactgctgggtctccatcaaccacatggtgaaccactcgtggggccgccagtattcccatgccctgttcaaggccatgagccacatgctgtgcattggctatgggcagcaggcacctgtaggcatgcccgacgtctggctcaccatgctcagcatgatcgtaggtgccacatgctacgccatgttcatcggccatgccacggcactcatccagtccctggactcttcccggcgtcagtaccaggagaagtacaagcaggtggagcagtacatgtccttccacaagctgccagcagacacgcggcagcgcatccacgagtactatgagcaccgctaccagggcaagatgttcgatgaggaaagcatcctgggcgagctgagcgagccgcttcgcgaggagatcattaacttcacctgtcggggcctggtggcccacatgccgctgtttgcccatgccgaccccagcttcgtcactgcagttctcaccaagctgcgctttgaggtcttccagccgggggatctcgtggtgcgtgagggctccgtggggaggaagatgtacttcatccagcatgggctgctcagtgtgctggcccgcggcgcccgggacacacgcctcaccgatggatcctactttggggagatctgcctgctaactaggggccggcgcacagccagtgttcgggctgacacctactgccgcctttactcactcagcgtggaccatttcaatgctgtgcttgaggagttccccatgatgcgccgggcctttgagactgtggccatggatcggctgctccgcatcggcaagaagaattccatactgcagcggaagcgctccgagccaagtccaggcagcagtggtggcatcatggagcagcacttggtgcaacatgacagagacatggctcggggtgttcggggtcgggccccgagcacaggagctcagcttagtggaaagccagtactgtgggagccactggtacatgcgccccttcaggcagctgctgtgacctccaatgtggccattgccctgactcatcagcggggccctctgcccctctcccctgactctccagccaccctccttgctcgctctgcttggcgctcagcaggctctccagcttccccgctggtgcccgtccgagctggcccatgggcatccacctcccgcctgcccgccccacctgcccgaaccctgcacgccagcctatcccgggcagggcgctcccaggtctccctgctgggtccccctccaggaggaggtggacggcggctaggacctcggggccgcccactctcagcctcccaaccctctctgcctcagcgggcaacaggcgatggctctcctgggcgtaagggatcaggaagtgagcggctgcctccctcagggctcctggccaaacctccaaggacagcccagccccccaggccaccagtgcctgagccagccacaccccggggtctccagctttctgccaacatgtaaaacctttgagtacatccagccttagttcttggggtgcagtagtatgtacccaagggcagatgcctcttggggaaggccatggggacctgaaacattgccccatggaaatgtcgaccctgtgcggacattccgcatactgccatgaagacggtctctgtgtcctcagctcaagaatcctgtagcttgtcccatcataatccattcacccgttcatcatgtgtactgagcagctaccatgttcaaggtaatatgccaggcgctgtatgtctccactgccaagtagaagtgactcaaaaccctctgacaaggatattcccttggctatggtcctgccaggtgcaggcccaggcccatgaccccacctttactaagcacaagtacttgccactgccatcactgccaagtaactagatgtctctgtttccctgccaatgatcctgcaggttctgcccggtctggttatcttcctgttcctgtagcatagccaggcactgccagtcacctgtgcccccattgctgtcagcagatgtcttgggtcctgagtgtgggtatccacttttacccgctcactgccacctgtggacactctgtgtctaccctctgagtgggaacatacttctaagttccctgcagtctctgtcctgtggtagaccatctttttgtaaactgcgagcttcctcttccctgtaccctctgccccagtcgtgaccccctaaaagttaaggggtagttggcacctccttattaatatgccagcctagatcccccccggtggaggggcaaatggctgaatccttgtgtgatatttttttcttcgcttgtttatttattcatttatttaattgtatttattcatttactaactttatgtgttaccaattaattttgtttacccattcctttatccatccctcccctccttttcaggtaaggagacaggaggagtaggaggaggcagggcctctccatgccagcctctgtggtccttgcccaaacccatcagcgcaatacttgaaccttctcccaggtaggggcaggaggagccacatgagagagggagaaggaccgcgtttacctttagagttttgttttgttttttccttctgagtttgctgttggtgcaggaataagggaaaggcccaaggtatccaagcctggggaagggcaggccagccagcacctctgccttctcagggacaagagtagtcctttaccaccctcactctgcctgtcccctctcctactctacagcattaaagactgtgggaccaggaccctaagtctcctttccttctgggtggggagttctggggttcttggtgtgtgggagaagttttataattgcttccaaacagctgggtttaaatataaaatagacacactca

SEQ ID NO: 14126 - DNA, 7228 bp, Homo sapiens
  source 1..7228: mol_type = unassigned DNA
caaaaatgccagggaaaggcgagcccagagcttggtgatggagaaattgggaagccaccccccacccttcaatcttaggatggggaattcgcaactgaagccggagcttcagacttggggcgcactcccagcttagcccaggaaagagatttaagggcgcagcagtgtggatacctctcaccccggccccgaaggtctagcgagggtctaacctgggccccttgccaggcccgccccccgcccctttccagcccccggcccgtgcgccgctgcccctttaagaagcccaggtaggcaggcccggctgctggagccgctcctatggcaacccgcgagctgcggcggcttcatgaatattccggggcgcgggagcccgagcgctgccggagggcgcttcgggggaggcggccgctgatgtaagcccggcgggtcgctgggctccgctcggttgcggcgggagccccgggacgggccggacgggccggggcagaggaggcgaggcgagctcgcgggtggccagccacaaagcccgggcggcgagacagacggacagccagccctcccgcgggacgcacgcccgggacccgcgcgggccgtgcgctctgcactccggagcggttccctgagcgccgcggccgcagagcctctccggccggcgcccattgttccccgcgggggcggggcgcctggagccgggcggcgcgccgcgcccctgaacgccagagggagggagggaggcaagaagggagcgcggggtccccgcgcccagccgggcccgggaggaggtgtagcgcggcgagcccggggactcggagcgggactaggatcctccccgcggcgcgcagcctgcccaagcatgggcgcctgaggctgcccccacgccggcggcaaaggacgcgtccccacgggcggactgaccggcgggcggacctggagcccgtccgcggcgccgcgctcctgcccccggcccggtccgaccccggcccctggcgccatggacaagctgccgccgtccatgcgcaagcggctctacagcctcccgcagcaggtgggggccaaggcgtggatcatggacgaggaagaggacgccgaggaggagggggccgggggccgccaagaccccagccgcaggagcatccggctgcggccactgccctcgccctccccctcggcggccgcgggtggcacggagtcccggagctcggccctcggggcagcggacagcgaagggccggcccgcggcgcgggcaagtccagcacgaacggcgactgcaggcgcttccgcgggagcctggcctcgctgggcagccggggcggcggcagcggcggcacggggagcggcagcagtcacggacacctgcatgactccgcggaggagcggcggctcatcgccgagggcgacgcgtcccccggcgaggacaggacgcccccaggcctggcggccgagcccgagcgccccggcgcctcggcgcagcccgcagcctcgccgccgccgccccagcagccaccgcagccggcctccgcctcctgcgagcagccctcggtggacaccgctatcaaagtggagggaggcgcggctgccggcgaccagatcctcccggaggccgaggtgcgcctgggccaggccggcttcatgcagcgccagttcggggccatgctccaacccggggtcaacaaattctccctaaggatgttcggcagccagaaagccgtggagcgcgaacaggagagggtcaagtcggccggattttggattatccacccctacagtgacttcagattttactgggacctgaccatgctgctgctgatggtgggaaacctgattatcattcctgtgggcatcaccttcttcaaggatgagaacaccacaccctggattgtcttcaatgtggtgtcagacacattcttcctcatcgacttggtcctcaacttccgcacagggatcgtggtggaggacaacacagagatcatcctggacccgcagcggattaaaatgaagtacctgaaaagctggttcatggtagatttcatttcctccatccccgtggactacatcttcctcattgtggagacacgcatcgactcggaggtctacaagactgcccgggccctgcgcattgtccgcttcacgaagatcctcagcctcttacgcctgttacgcctctcccgcctcattcgatatattcaccagtgggaagagatcttccacatgacctacgacctggccagcgccgtggtgcgcatcgtgaacctcatcggcatgatgctcctgctctgccactgggacggctgcctgcagttcctggtacccatgctacaggacttccctgacgactgctgggtgtccatcaacaacatggtgaacaactcctgggggaagcagtactcctacgcgctcttcaaggccatgagccacatgctgtgcatcggctacgggcggcaggcgcccgtgggcatgtccgacgtctggctcaccatgctcagcatgatcgtgggtgccacctgctacgccatgttcattggccacgccactgccctcatccagtccctggactcctcccggcgccagtaccaggaaaagtacaagcaggtggagcagtacatgtcctttcacaagctcccgcccgacacccggcagcgcatccacgactactacgagcaccgctaccagggcaagatgttcgacgaggagagcatcctgggcgagctaagcgagcccctgcgggaggagatcatcaactttaactgtcggaagctggtggcctccatgccactgtttgccaatgcggaccccaacttcgtgacgtccatgctgaccaagctgcgtttcgaggtcttccagcctggggactacatcatccgggaaggcaccattggcaagaagatgtacttcatccagcatggcgtggtcagcgtgctcaccaagggcaacaaggagaccaagctggccgacggctcctactttggagagatctgcctgctgacccggggccggcgcacagccagcgtgagggccgacacctactgccgcctctactcgctgagcgtggacaacttcaatgaggtgctggaggagtaccccatgatgcgaagggccttcgagaccgtggcgctggaccgcctggaccgcattggcaagaagaactccatcctcctccacaaagtccagcacgacctcaactccggcgtcttcaactaccaggagaatgagatcatccagcagattgtgcagcatgaccgggagatggcccactgcgcgcaccgcgtccaggctgctgcctctgccaccccaacccccacgcccgtcatctggaccccgctgatccaggcaccactgcaggctgccgctgccaccacttctgtggccatagccctcacccaccaccctcgcctgcctgctgccatcttccgccctcccccaggatctgggctgggcaacctcggtgccgggcagacgccaaggcacctgaaacggctgcagtccctgatcccttctgcgctgggctccgcctcgcccgccagcagcccgtcccaggtggacacaccgtcttcatcctccttccacatccaacagctggctggattctctgcccccgctggactgagcccactcctgccctcatccagctcctccccaccccccggggcctgtggctccccctcggctcccacaccatcagctggcgtagccgccaccaccatagccgggtttggccacttccacaaggcgctgggtggctccctgtcctcctccgactctcccctgctcaccccgctgcagccaggcgcccgctccccgcaggctgcccagccatctcccgcgccacccggggcccggggaggcctgggactcccggagcacttcctgccacccccaccctcatccagatccccgtcatctagccccgggcagctgggccagcctcccggggagttgtccctaggtctggccactggcccactgagcacgccagagacacccccacggcagcctgagccgccgtcccttgtggcaggggcctctgggggggcttcccctgtaggctttactccccgaggaggtctcagcccccctggccacagcccaggccccccaagaaccttcccgagtgccccgccccgggcctctggctcccacggatccttgctcctgccacctgcatccagccccccaccaccccaggtcccccagcgccggggcacacccccgctcacccccggccgcctcacccaggacctcaagctcatctccgcgtctcagccagccctgcctcaggacggggcgcagactctccgcagagcctccccgcactcctcaggggagtccatggctgccttcccgctcttccccagggctgggggtggcagcgggggcagtgggagcagcgggggcctcggtccccctgggaggccctatggtgccatccccggccagcacgtcactctgcctcggaagacatcctcaggttctttgccaccccctctgtctttgtttggggcaagagccacctcttctggggggccccctctgactgctggaccccagagggaacctggggccaggcctgagccagtgcgctccaaactgccatccaatctatgagctgggcccttccttccctcttctttcttcttttctctcccttccttcttccttcaggtttaactgtgattaggagatataccaataacagtaataattatttaaaaaaccacacacaccagaaaaacaaaagacagcagaaaataaccaggtattcttagagctatagatttttggtcacttgcttttatagactattttaatactcagcactagagggagggagggggagggaggagggagcaggcaggtcccaaatgcaaaagccagagaaaggcagatggggtctccggggctgggcaggggtgggagtggccagtgttggcggttcttagagcagatgtgtcattgtgttcatttagagaaacagctgccatcagcccgttagctgtaacttggagctccactctgcccccagaaaggggctgccctggggtgtgccctggggagcctcagaagcctgcgaccttgggagaaaagggccagggccctgagggcctagcattttttctactgtaaacgtagcaagatctgtatatgaatatgtatatgtatatgtatgtaagatgtgtatatgtatagctatgtagcgctctgtagagccatgtagatagccactcacatgtgcgcacacgtgtgcggtctagtttaatcccatgttgacaggatgcccaggtcaccttacacccagcaacccgccttggcccacaggctgtgcactgcatggtctagggacgttctctctccagtcctcagggaagaggaccccaggacttcgcagcaggccccctctctccccatctctggtctcaaagccagtcccagcctgacctctcaccacacggaagtggaagactcccctttcctagggcctcaagcacacaccgccacctctggggccgtcagtttgcccatctgtacagtgggaggtgagcggaacttctgtttattgagtctgctctgtgccaagcactggtttcgcactttacacacattaactccttcagtttcacaaagaccatggggtgggtactttgattctccccatttagcagaggaagaaacagttttgggtaatttttccagaatcatgtaactaggagtggcagagtggggactgatttgaggttcgagtccacgcctccttgaggcccaagtctgtgttccttccatcagaaaactgtgttgaggggggctgaggtagatggtccccaagcatggtacagaaggaagacaccagattttggcagcagtcaggcctgggtttgaatcccagccctgccacttcttagctgtatgatcttgggcaagttatctgacctttctgtcacctcatttgtaaaatgggaataattatggtactgcctcacaaggacctatgaggaccagatgagaaaaatctatatgtgaaatgcccagcccagcgcctggcacataccatggtaggtgctcaataaaaaatcacatttcttctgcccctcatatgcccagcctattgctccagcaaactatgtgagagcccagggagctttggctgagggctccaagacttaaaatctcaggactcaggaggtggctgggcctccctaagggcccaaggaaggtgtgtggccagaggtgggtgggagccaggccttgagaagtgggaagacttcaacagggagagagggagggaatggtgggtgggatggagtgtatggtggggagattcctgaggtggatgtggagtggtggatcagggctttgggaggggatccccaggctgaggggtcagagggacggccttgggtgatagggtaagggattgtctgggcttagtcctggcaactaggagccataagcaggttccagattgcgggaacgagaaagcagctcagatgcctttggaggcaccatcctccctcctcccagatgggatcttgccagagccaaggtcaggggtctgcccctgcctatagggccagagcaggtatggctgcaatccccaagtaatgagaagggctggtcccacattatccatccagaaccttccatgctccaagccagaatgttggcaagatcgggttttgccttgagctatcctgggatgtgagacaaaccgatttctccatagatgggctgcagggagtgggaggcagtactccaggagagaagtgggtgaaggttcctgggatcttaggtaaagactagacgccgcctagtactggtctctactgtgctggctcaggagttctgagaactggaaggacttagcctcaacctgagttctgcacacaccccttccccttaaggaaggcagctctgagaggcagcaggacttgatccaaacccacagtcttgtcctggaggcagcaggggtgaaggtggagggtccagggccatgaggagcccccttgccatcagagcctggcctaaccaccctcttctctacttacacacacatgcattttataatagctctgacccaacctggccactctgcagagactgggacagacaggtgcaggcaatgggccctcccacacccagtcacctacaaggaattttcaaatccacttttaaaacagaaaccggtaaatgcgccgtattgtatattttatttaaataaaaaaaattccagca

SEQ ID NO: 14127 - DNA, 577 bp, Homo sapiens
  source 1..577: mol_type = unassigned DNA
cacaattgacagcctcaaggttcctggctttttgaaccaccacagacatctcctttcccggctaccccaccctgagcgccagacaccatgaaccttccttccacaaaggtctcctgggccgccgtgacgctactgctgctgctgctgctgctgccgcccgcgctgttgtcgtccggggcggctgcacagcccctgcccgactgctgtcgtcaaaagacttgctcttgccgcctctacgagctgctgcacggcgcgggcaatcacgcggccggcatcctcacgctgggcaagcggaggtccgggcccccgggcctccagggtcggctgcagcgcctcctgcaggccagcggcaaccacgccgcgggcatcctgaccatgggccgccgcgcaggcgcagagccagcgccgcgcccctgcctcgggcgccgctgttccgccccggccgccgcctccgtcgcgcccggaggacagtccgggatctgagtcgttcttcgggccctgtcctggcccaggcctctgccctctgcccacccagcgtcagcccccagaaaaaaggcaataaagacgagtctccatt

SEQ ID NO: 14128 - DNA, 3019 bp, Homo sapiens
  source 1..3019: mol_type = unassigned DNA
atggtttccgttgggtgtgtggtttttttgtttttttttttttggggtccggaataggcggagcttccggttccggtgggggccgtccctggcggcggagatggcggcgacagcggcggaggctgtggcctctggctctggagagccccgggaggaggctggagccctcggccccgcctgggatgaatcccagttgcgcagttatagcttcccgactaggcccattccgcgtctgagtcagagcgacccccgggcagaggagcttattgagaatgaggagcctgtggtgctgaccgacacaaatcttgtgtatcctgccctgaaatgggaccttgaatacctgcaagagaatattggcaatggagacttctctgtgtacagtgccagcacccacaagttcttgtactatgatgagaagaagatggccaatttccagaactttaagccgaggtccaacagggaagaaatgaaatttcatgagttcgttgagaaactgcaggatatacagcagcgaggaggggaagagaggttgtatctgcagcaaacgctcaatgacactgtgggcaggaagattgtcatggacttcttaggttttaactggaactggattaataagcaacagggaaagcgtggctgggggcagcttacctctaacctgctgctcattggcatggaaggaaatgtgacacctgctcactatgatgagcagcagaacttttttgctcagataaaaggttacaaacgatgcatcttattccctccggatcagttcgagtgcctctacccataccctgttcatcacccatgtgacagacagagccaggtggactttgacaatcccgactacgagaggttccctaatttccaaaatgtggttggttacgaaacagtggttggccctggtgatgttctttacatcccaatgtactggtggcatcacatagagtcattactaaatggggggattaccatcactgtgaacttctggtataagggggctcccacccctaagagaattgaatatcctctcaaagctcatcagaaagtggccataatgagaaacattgagaagatgcttggagaggccttggggaacccacaagaggtggggcccttgttgaacacaatgatcaagggccgatacaactagcctgccaggggtcaaggcctcctgccaggtgactgctatcccgtccacaccgcttcattgatgaggacaggagactccaagcgctagtattgcacgctgcacttaatggactggactcttgccatggcccaggagtcaggtgtttggagcgaggcagggcagttggcactccactcctatttggagggacttcatacccttgcctcttgtgccccagcaccttctctctctgccccccgcctaaagtcctgcattcagtgtgtggagtcccagcttttggttgtcatcatgtctgtgtgtatgttagtctgtcaacttcggaatgtgtgcgtgtgtgtgcatgcacacgcatgtatgtatctgttccctgttccttctgggtcaggctgtcacttccggctctcagccctatctcctgcaacctcagtgcctcagcctgagagagagatgagatgctcttggactccccactgcatctgggctgcagggccagagctagtctgaccattaggtcagtctgcctcctgacagtttttgcgtagtcaagctctaggcggtatgggaatggctaccgggactctaatggggtgaaagagaggggaggcttgcctttgagagcctatatagccttcctgtgagagaggattagatagggttccaactgggcctacaagctcaagccatacataaaaggaccttgggacataagaaccaatgattgtgcataagttctaaattagagacacatatagtttctctctttcagcaccagctcttgcccctatgctgggtaccaagggagttctcctagctgtggcttctctaggttctaggggtgcaagcctctgtgtgtttgtttgtgtgtgtctgtgtgtgcgtatccacactaggggtgcaagcctctgggtgtgtgtgtgtgtgtgcgtgcgtgtgtgtgtgtgtgtccgtgtgtgtgtgtgtgtgtgtccacactggccagcctccctacttaccaaggttctccactgcttaccttttccagtgggacagtacagtgtgagcccccgggaagtactgcctgacctatcctaagcttttacacttggattttagccatcatatgttggccaggtctcactgcagcctgcccgaggctaactggctagagcctccaggccctatgatgctccctgcccaggccatatcctttattcctgctgagcttcctggctgaatagatgaaatggggtcaagcccaggcagctcattcactacctgtgatccacctcagggcacgggcaaacacataggcttgcgtcttaaagccagctcctctgccagaccccgttgtaatgtgccacaacaccctcaatagtcagggcaactggtggagcatggaagtcgaatttccttttctgttaggagctactcctgggaacccctctcagggctgcagcttacaggtgggcagctgtgattgcacaacttgaagggccatcattcacatctattcagtgggagtggggtccctgggattgggcagtgtggtggccctgtgtctcctcacctctgctcctgtcttcatcaccttctctctggaagggaagaggagttggaaggtctctggttttcttttctttttttttttttttgccaaaggtttacttccagcatctgagctctggctctcacccctgaagctcagttatagtgcactgatgaactgagaggatgcgtgtggatgtgtgtgcatgcctgagtgcgttttttggggaggggtgtttatttttagtaccccattctggggttctctgatgcagtgtggatgtgaagatatggtaccttctcaagtgtagctctttcaaatatagtcaatgctgggaaatgtga

SEQ ID NO: 14129 - DNA, 1462 bp, Homo sapiens
  source 1..1462: mol_type = unassigned DNA
atggtttccgttgggtgtgtggtttttttgttttttttttttggggtccggaataggcggagcttccggttccggtgggggccgtccctggcggcggagatggcggcgacagcggcggaggctgtggcctctggctctggagagccccgggaggaggctggagccctcggccccgcctgggatgaatcccagttgcgcagttatagcttcccgactaggcccattccgcgtctgagtcagagcgacccccgggcagaggagcttattgagaatgaggagcctgtggtgctgaccgacacaaatcttgtgtatcctgccctgaaatgggaccttgaatacctgcaagagaatattggcaatggagacttctctgtgtacagtgccagcacccacaagttcttgtactatgatgagaagaagatggccaatttccagaactttaagccgaggtccaacagggaagaaatgaaatttcatgagttcgttgagaaactgcaggatatacagcagcgaggaggggaagagaggttgtatctgcagcaaacgctcaatgacactgtgggcaggaagattgtcatggacttcttaggttttaactggaactggattaataagcaacagggaaagcgtggctgggggcagcttacctctaacctgctgctcattggcatggaaggaaatgtgacacctgctcactatgatgagcagcagaacttttttgctcagataaaaggttacaaacgatgcatcttattccctccggatcagttcgagtgcctctacccataccctgttcatcacccatgtgacagacagagccaggtggactttgacaatcccgactacgagaggttccctaatttccaaaatgtggttggttacgaaacagtggttggccctggtgatgttctttacatcccaatgtactggtggcatcacatagagtcattactaaatggggggattaccatcactgtgaacttctggtataagggggctcccacccctaagagaattgaatatcctctcaaagctcatcagaaagtggccataatgagaaacattgagaagatgcttggagaggccttggggaacccacaagaggtggggcccttgttgaacacaatgatcaagggccgatacaactagcctgccaggggtcaaggcctcctgccaggtgactgctatcccgtccacaccgcttcattgatgaggacaggagactccaagcgctagtattgcacgctgcacttaatggactggactcttgccatggcccaggagtcaggtgtttggagcgaggcagggcagttggcactccactcctatttggagggacttcatacccttgcctcttgtgccccagcaccttctctctctgccccccgcctaaagtcctgcattcagtgtgtggagtcccagcttttggttgtcatcatgtctgtgtgtatgttagtctgtc

SEQ ID NO: 14130 - DNA, 1044 bp, Homo sapiens
  source 1..1044: mol_type = unassigned DNA
aaatgaaactcgacgctctggatagagccaaggaaggctcctgctattcgggggtcctcgagggagccattaaaacctcggcttcctcatttgaggaaacagcctgagccaaggagaaaattgaagtcctctcagctgcagctgctcacccacccccctcccacctccctccacagagaaaagcacccactccattgactctgaggggtcacgagaaggttcgggaaaaagggtcacagtcaagccacccaacccagccggccttctcccatcactacttgggtgcgagcataccctctctgtctcaccccatgccatcatccgggagcctgtggtgctgaccgacacaaatcttgtgtatcctgccctgaaatgggaccttgaatacctgcaagagaatattggcaatggagacttctctgtgtacagtgccagcacccacaagttcttgtactatgatgagaagaagatggccaatttccagaactttaagccgaggtccaacagggaagaaatgaaatttcatgagttcgttgagaaactgcaggatatacagcagcgaggaggggaagagaggttgtatctgcagcaaacgctcaatgacactgtgggcaggaagattgtcatggacttcttaggttttaactggaactggattaataagcaacagggaaagcgtggctgggggcagcttacctctaacctgctgctcattggcatggaaggaaatgtgacacctgctcactatgatgagcagcagaacttttttgctcagataaaaggttacaaacgatgcatcttattccctccggatcagttcgagtgcctctacccataccctgttcatcacccatgtgacagacagagccaggtggactttgacaatcccgactacgagaggttccctaatttccaaaatgtggttggttacgaaacagtggttggccctggtgatgttctttacatcccaatgtactggtggcatcacatagagtcattactaaatggggggattaccatcactgtgaacttctggtataaggg

SEQ ID NO: 14131 - DNA, 2250 bp, Homo sapiens
  source 1..2250: mol_type = unassigned DNA
ctttcctgtggagtcatctcaccgccgtgcgcacccactcgtaactcgcacccgggtcctggctgcaccgcatcccctcctgcaccccctggatggcccttcagccaacgggggcctgggcgatggtcgaccacggagctgcgcaaggaaaagtcccgggatgcggcccgcagccggcgcagccaggagaccgaggtgctgtaccagctggctcacacgctgcccttcgcccgcggcgtcagcgcccacctggacaaggcctctatcatgcgcctcaccatcagctacctgcgcatgcaccgcctctgcgccgcagctggagctcattggacacagcatctttgatttcatccacccctgtgaccaagaggagcttcaggacgccctgaccccccagcagaccctgtccaggaggaaggtggaggcccccacggagcggtgcttctccttgcgcatgaagagtacactcaccagccgcgggcgcaccctcaacctcaaggcggccacctggaaggtgctgaactgctctggacatatgagggcctacaagccacctgcgcagacttctccagctgggagccctgactcagagcccccgctgcagtgcctggtgctcatctgcgaagccatcccccacccaggcagcctggagcccccactgggccgaggggccttcctcagccgccacagcctggacatgaagttcacctactgtgacgacaggattgcagaagtggctggctatagtcccgatgacctgatcggctgttccgcctacgagtacatccacgcgctggactccgatgcggtcagcaagagcatccacaccttgctgagcaagggccaggcagtaacagggcagtatcgcttcctggcccggagtggtggctacctgtggacccagacccaggccacagtggtgtcagggggacggggcccccagtcggagagtatcgtctgtgtccattttttaatcagccaggtggaagagaccggagtggtgctgtccctggagcaaacggagcaacactctcgcagacccattcagcggggcgccccctctcagaaggacacccctaaccctggggacagccttgacacccctggcccccggatccttgccttcctgcacccgccttccctgagcgaggctgccctggccgctgacccccgccgtttctgcagccctgacctccgtcgcctcctgggacccatcctggatggggcttcagtagcagccactcccagcaccccgctggccacacggcacccccaaagtcctctttcggctgatctcccagatgaactacctgtgggcaccgagaatgtgcacagactcttcacctccgggaaagacactgaggcagtggagacagatttagatatagctcaggatgctgatgctctggatttggagatgctggccccctacatctccatggatgatgacttccagctcaacgccagcgagcagctacccagggcctaccacagacctctgggggctgtcccccggccccgtgctcggagcttccatggcctgtcacctccagcccttgagccctccctgctaccccgctgggggagtgacccccggctgagctgctccagcccttccagaggggacccctcagcatcctctcccatggctggggctcggaagaggaccctggcccagagctcagaggacgaggacgagggagtggagctgctgggagtgagacctcccaaaaggtcccccagcccagaacacgaaaactttctgctctttcctctcagcctgagtttccttctgacaggaggaccagccccagggagcctgcaggaccccagcaccccactcctgaacctgaatgagcccctgggcctgggcccctcactgctctctccgtactcagacgaggacactacccagcccgggggccccttccagccaagggcaggctcagcccaggctgactgagccggctcctctccccatctgccttctcctcccccagaaaggacctcaaccacactccacgccggcagccaacgcacaggatgggggcgccaggagaggggcccctctctcctctatgtaccccctgcccacctcgggcctacctcagccctcacccctctgcctgctcccaatctgggggctctctggggtggtctcagctcagtgacctctgggaggtggtccctggccccctcctccttctctcaggatttctcttggggttctcaatacttggttacctcatt

SEQ ID NO: 14132 - DNA, 1709 bp, Homo sapiens
  source 1..1709: mol_type = unassigned DNA
actcgtaactcgcacccgggtcctggctgcaccgcatcccctcctgcaccccctggatggcccttcagccaacgggggcctgggcgatggtcgaccacggagctgcgcaaggaaaagtcccgggatgcggcccgcagccggcgcagccaggagaccgaggtgctgtaccagctggctcacacgctgcccttcgcccgcggcgtcagcgcccacctggacaaggcctctatcatgcgcctcaccatcagctacctgcgcatgcaccgcctctgcgccgcagctggagctcattggacacagcatctttgatttcatccacccctgtgaccaagaggagcttcaggacgccctgaccccccagcagaccctgtccaggaggaaggtggaggcccccacggagcggtgcttctccttgcgcatgaagagtacactcaccagccgcgggcgcaccctcaacctcaaggcggccacctggaaggtgctgaactgctctggacatatgagggcctacaagccacctgcgcagacttctccagctgggagccctgactcagagcccccgctgcagtgcctggtgctcatctgcgaagccatcccccacccaggcagcctggagcccccactgggccgaggggccttcctcagccgccacagcctggacatgaagttcacctactgtgacgacaggattgcagaagtggctggctatagtcccgatgacctgatcggctgttccgcctacgagtacatccacgcgctggactccgatgcggtcagcaagagcatccacaccttgctgagcaagggccaggcagtaacagggcagtatcgcttcctggcccggagtggtggctacctgtggacccagacccaggccacagtggtgtcagggggacggggcccccagtcggagagtatcgtctgtgtccattttttaatcagccaggtggaagagaccggagtggtgctgtccctggagcaaacggagcaacactctcgcagacccattcagcggggcgccccctctcagaaggacacccctaaccctggggacagccttgacacccctggcccccggatccttgccttcctgcacccgccttccctgagcgaggctgccctggccgctgacccccgccgtttctgcagccctgacctccgtcgcctcctgggacccatcctggatggggcttcagtagcagccactcccagcaccccgctggccacacggcacccccaaagtcctctttcggctgatctcccagatgaactacctgtgggcaccgagaatgtgcacagactcttcacctccgggaaagacactgaggcagtggagacagatttagatatagctcaggaccccagcaccccactcctgaacctgaatgagcccctgggttttcactttgtcacccagtctggagtgcagtggcacaaacacagctcaccgcagcctcgacctcctgggctcaagtgatcctcctacttcagctcccacaagtagctgggactgcagctatgtgccatcatgcctggctgatgtttatatgttttgtagagacgaggtttcaccatgttgcccaggctggtcttgaactcctgagttcaagcgatccacctgccttggcctcccaaagtgctgggattactggtatgaaccaccacgcccgacagtaaatatgttttgaatgaataaactctcataaatg

SEQ ID NO: 14133 - DNA, 2101 bp, Homo sapiens
  source 1..2101: mol_type = unassigned DNA
ccgagggctccggagcggcgactggcgagccatggcgctggggctgcagcgcgcaaggtcgaccacggagctgcgcaaggaaaagtcccgggatgcggcccgcagccggcgcagccaggagaccgaggtgctgtaccagctggctcacacgctgcccttcgcccgcggcgtcagcgcccacctggacaaggcctctatcatgcgcctcaccatcagctacctgcgcatgcaccgcctctgcgccgcaggggagtggaaccaggtgggagcagggggagaaccactggatgcctgctacctgaaggccctggagggcttcgtcatggtgctcaccgccgagggagacatggcttacctgtcggagaatgtcagcaaacacctgggcctcagtcagctggagctcattggacacagcatctttgatttcatccacccctgtgaccaagaggagcttcaggacgccctgaccccccagcagaccctgtccaggaggaaggtggaggcccccacggagcggtgcttctccttgcgcatgaagagtacactcaccagccgcgggcgcaccctcaacctcaaggcggccacctggaaggtgctgaactgctctggacatatgagggcctacaagccacctgcgcagacttctccagctgggagccctgactcagagcccccgctgcagtgcctggtgctcatctgcgaagccatcccccacccaggcagcctggagcccccactgggccgaggggccttcctcagccgccacagcctggacatgaagttcacctactgtgacgacaggattgcagaagtggctggctatagtcccgatgacctgatcggctgttccgcctacgagtacatccacgcgctggactccgatgcggtcagcaagagcatccacaccttgctgagcaagggccaggcagtaacagggcagtatcgcttcctggcccggagtggtggctacctgtggacccagacccaggccacagtggtgtcagggggacggggcccccagtcggagagtatcgtctgtgtccattttttaatcagccaggtggaagagaccggagtggtgctgtccctggagcaaacggagcaacactctcgcagacccattcagcggggcgccccctctcagaaggacacccctaaccctggggacagccttgacacccctggcccccggatccttgccttcctgcacccgccttccctgagcgaggctgccctggccgctgacccccgccgtttctgcagccctgacctccgtcgcctcctgggacccatcctggatggggcttcagtagcagccactcccagcaccccgctggccacacggcacccccaaagtcctctttcggctgatctcccagatgaactacctgtgggcaccgagaatgtgcacagactcttcacctccgggaaagacactgaggcagtggagacagatttagatatagctcaggatgctgatgctctggatttggagatgctggccccctacatctccatggatgatgacttccagctcaacgccagcgagcagctacccagggcctaccacagacctctgggggctgtcccccggccccgtgctcggagcttccatggcctgtcacctccagcccttgagccctccctgctaccccgctgggggagtgacccccggctgagctgctccagcccttccagaggggacccctcagcatcctctcccatggctggggctcggaagaggaccctggcccagagctcagaggacgaggacgagggagtggagctgctgggagtgagacctcccaaaaggtcccccagcccagaacacgaaaactttctgctctttcctctcagcctggtgtgttgggggattaatgggattctctggccctcattacctagctggcttaaacctactgttttatagataggaaaccagagaggggcaggggctggttgagggtcatacagaaagtcagtgggccagctgagactaaagcctgatcttctagtttcactaatgggtattaaaaacctctgcagtgaactgagattgcgccactgcaccccagcatgagcgacagaatgggaccttgtc

SEQ ID NO: 14134 - DNA, 2101 bp, Homo sapiens
  source 1..2101: mol_type = unassigned DNA
cgcatcccctcctgcaccccctggatggcccttcagccaacgggggcctgggcgatggtcgaccacggagctgcgcaaggaaaagtcccgggatgcggcccgcagccggcgcagccaggagaccgaggtgctgtaccagctggctcacacgctgcccttcgcccgcggcgtcagcgcccacctggacaaggcctctatcatgcgcctcaccatcagctacctgcgcatgcaccgcctctgcgccgcaggggagtggaaccaggtgggagcagggggagaaccactggatgcctgctacctgaaggccctggagggcttcgtcatggtgctcaccgccgagggagacatggcttacctgtcggagaatgtcagcaaacacctgggcctcagtcagctggagctcattggacacagcatctttgatttcatccacccctgtgaccaagaggagcttcaggacgccctgaccccccagcagaccctgtccaggaggaaggtggaggcccccacggagcggtgcttctccttgcgcatgaagagtacactcaccagccgcgggcgcaccctcaacctcaaggcggccacctggaaggtgctgaactgctctggacatatgagggcctacaagccacctgcgcagacttctccagctgggagccctgactcagagcccccgctgcagtgcctggtgctcatctgcgaagccatcccccacccaggcagcctggagcccccactgggccgaggggccttcctcagccgccacagcctggacatgaagttcacctactgtgacgacaggattgcagaagtggctggctatagtcccgatgacctgatcggctgttccgcctacgagtacatccacgcgctggactccgatgcggtcagcaagagcatccacaccttgctgagcaagggccaggcagtaacagggcagtatcgcttcctggcccggagtggtggctacctgtggacccagacccaggccacagtggtgtcagggggacggggcccccagtcggagagtatcgtctgtgtccattttttaatcagccaggtggaagagaccggagtggtgctgtccctggagcaaacggagcaacactctcgcagacccattcagcggggcgccccctctcagaaggacacccctaaccctggggacagccttgacacccctggcccccggatccttgccttcctgcacccgccttccctgagcgaggctgccctggccgctgacccccgccgtttctgcagccctgacctccgtcgcctcctgggacccatcctggatggggcttcagtagcagccactcccagcaccccgctggccacacggcacccccaaagtcctctttcggctgatctcccagatgaactacctgtgggcaccgagaatgtgcacagactcttcacctccgggaaagacactgaggcagtggagacagatttagatatagctcaggatgctgatgctctggatttggagatgctggccccctacatctccatggatgatgacttccagctcaacgccagcgagcagctacccagggcctaccacagacctctgggggctgtcccccggccccgtgctcggagcttccatggcctgtcacctccagcccttgagccctccctgctaccccgctgggggagtgacccccggctgagctgctccagcccttccagaggggacccctcagcatcctctcccatggctggggctcggaagaggaccctggcccagagctcagaggacgaggacgagggagtggagctgctgggagtgagacctcccaaaaggtcccccagcccagaacacgaaaactttctgctctttcctctcagcctggtgtgttgggggattaatgggattctctggccctcattacctagctggcttaaacctactgttttatagataggaaaccagagaggggcaggggctggttgagggtcatacagaaagtcagtgggccagctgagactaaagcctgatcttctagtttcactaatgggtattaaaaacctctgcagtgaactgagattgcgccactgcaccccagcatgagcgacagaatgggaccttgtc

SEQ ID NO: 14135 - DNA, 2551 bp, Homo sapiens
  source 1..2551: mol_type = unassigned DNA
agataagtcagggaggggacagagcggccctaggcgcgccacagagaggagcgaggcgccagaggcaccatggactggcaagaccacaggtcgaccacggagctgcgcaaggaaaagtcccgggatgcggcccgcagccggcgcagccaggagaccgaggtgctgtaccagctggctcacacgctgcccttcgcccgcggcgtcagcgcccacctggacaaggcctctatcatgcgcctcaccatcagctacctgcgcatgcaccgcctctgcgccgcaggggagtggaaccaggtgggagcagggggagaaccactggatgcctgctacctgaaggccctggagggcttcgtcatggtgctcaccgccgagggagacatggcttacctgtcggagaatgtcagcaaacacctgggcctcagtcagctggagctcattggacacagcatctttgatttcatccacccctgtgaccaagaggagcttcaggacgccctgaccccccagcagaccctgtccaggaggaaggtggaggcccccacggagcggtgcttctccttgcgcatgaagagtacactcaccagccgcgggcgcaccctcaacctcaaggcggccacctggaaggtgctgaactgctctggacatatgagggcctacaagccacctgcgcagacttctccagctgggagccctgactcagagcccccgctgcagtgcctggtgctcatctgcgaagccatcccccacccaggcagcctggagcccccactgggccgaggggccttcctcagccgccacagcctggacatgaagttcacctactgtgacgacaggattgcagaagtggctggctatagtcccgatgacctgatcggctgttccgcctacgagtacatccacgcgctggactccgatgcggtcagcaagagcatccacaccttgctgagcaagggccaggcagtaacagggcagtatcgcttcctggcccggagtggtggctacctgtggacccagacccaggccacagtggtgtcagggggacggggcccccagtcggagagtatcgtctgtgtccattttttaatcagccaggtggaagagaccggagtggtgctgtccctggagcaaacggagcaacactctcgcagacccattcagcggggcgccccctctcagaaggacacccctaaccctggggacagccttgacacccctggcccccggatccttgccttcctgcacccgccttccctgagcgaggctgccctggccgctgacccccgccgtttctgcagccctgacctccgtcgcctcctgggacccatcctggatggggcttcagtagcagccactcccagcaccccgctggccacacggcacccccaaagtcctctttcggctgatctcccagatgaactacctgtgggcaccgagaatgtgcacagactcttcacctccgggaaagacactgaggcagtggagacagatttagatatagctcaggatgctgatgctctggatttggagatgctggccccctacatctccatggatgatgacttccagctcaacgccagcgagcagctacccagggcctaccacagacctctgggggctgtcccccggccccgtgctcggagcttccatggcctgtcacctccagcccttgagccctccctgctaccccgctgggggagtgacccccggctgagctgctccagcccttccagaggggacccctcagcatcctctcccatggctggggctcggaagaggaccctggcccagagctcagaggacgaggacgagggagtggagctgctgggagtgagacctcccaaaaggtcccccagcccagaacacgaaaactttctgctctttcctctcagcctgagtttccttctgacaggaggaccagccccagggagcctgcaggaccccagcaccccactcctgaacctgaatgagcccctgggcctgggcccctcactgctctctccgtactcagacgaggacactacccagcccgggggccccttccagccaagggcaggctcagcccaggctgactgagccggctcctctccccatctgccttctcctcccccagaaaggacctcaaccacactccacgccggcagccaacgcacaggatgggggcgccaggagaggggcccctctctcctctatgtaccccctgcccacctcgggcctacctcagccctcacccctctgcctgctcccaatctgggggctctctggggtggtctcagctcagtgacctctgggaggtggtccctggccccctcctccttctctcaggatttctcttggggttctcaatacttggttacctcattatccctttctctgcctctcttggctttattttggggaatcaggggtgaggagggttgggggggtcatatctgtgtttccaggttctggggagaacaatgatccacgggtcaacgtgatcacatttccttctatccttcttgtattattatttttatttttgtcaatttcatgatatggtttttaatcatga

SEQ ID NO: 14136 - DNA, 5908 bp, Homo sapiens
  source 1..5908: mol_type = unassigned DNA
gtcatctcaccgccgtgcgcacccactcgtaactcgcacccgggtcctggctgcaccgcatcccctcctgcaccccctggatggcccttcagccaacgggggcctgggcgatggtcgaccacggagctgcgcaaggaaaagtcccgggatgcggcccgcagccggcgcagccaggagaccgaggtgctgtaccagctggctcacacgctgcccttcgcccgcggcgtcagcgcccacctggacaaggcctctatcatgcgcctcaccatcagctacctgcgcatgcaccgcctctgcgccgcaggggagtggaaccaggtgggagcagggggagaaccactggatgcctgctacctgaaggccctggagggcttcgtcatggtgctcaccgccgagggagacatggcttacctgtcggagaatgtcagcaaacacctgggcctcagtcagctggagctcattggacacagcatctttgatttcatccacccctgtgaccaagaggagcttcaggacgccctgaccccccagcagaccctgtccaggaggaaggtggaggcccccacggagcggtgcttctccttgcgcatgaagagtacactcaccagccgcgggcgcaccctcaacctcaaggcggccacctggaaggtgctgaactgctctggacatatgagggcctacaagccacctgcgcagacttctccagctgggagccctgactcagagcccccgctgcagtgcctggtgctcatctgcgaagccatcccccacccaggcagcctggagcccccactgggccgaggggccttcctcagccgccacagcctggacatgaagttcacctactgtgacgacaggattgcagaagtggctggctatagtcccgatgacctgatcggctgttccgcctacgagtacatccacgcgctggactccgatgcggtcagcaagagcatccacaccttgctgagcaagggccaggcagtaacagggcagtatcgcttcctggcccggagtggtggctacctgtggacccagacccaggccacagtggtgtcagggggacggggcccccagtcggagagtatcgtctgtgtccattttttaatcagccaggtggaagagaccggagtggtgctgtccctggagcaaacggagcaacactctcgcagacccattcagcggggcgccccctctcagaaggacacccctaaccctggggacagccttgacacccctggcccccggatccttgccttcctgcacccgccttccctgagcgaggctgccctggccgctgacccccgccgtttctgcagccctgacctccgtcgcctcctgggacccatcctggatggggcttcagtagcagccactcccagcaccccgctggccacacggcacccccaaagtcctctttcggctgatctcccagatgaactacctgtgggcaccgagaatgtgcacagactcttcacctccgggaaagacactgaggcagtggagacagatttagatatagctcaggatgctgatgctctggatttggagatgctggccccctacatctccatggatgatgacttccagctcaacgccagcgagcagctacccagggcctaccacagacctctgggggctgtcccccggccccgtgctcggagcttccatggcctgtcacctccagcccttgagccctccctgctaccccgctgggggagtgacccccggctgagctgctccagcccttccagaggggacccctcagcatcctctcccatggctggggctcggaagaggaccctggcccagagctcagaggacgaggacgagggagtggagctgctgggagtgagacctcccaaaaggtcccccagcccagaacacgaaaactttctgctctttcctctcagcctgagtttccttctgacaggaggaccagccccagggagcctgcaggaccccagcaccccactcctgaacctgaatgagcccctgggcctgggcccctcactgctctctccgtactcagacgaggacactacccagcccgggggccccttccagccaagggcaggctcagcccaggctgactgagccggctcctctccccatctgccttctcctcccccagaaaggacctcaaccacactccacgccggcagccaacgcacaggatgggggcgccaggagaggggcccctctctcctctatgtaccccctgcccacctcgggcctacctcagccctcacccctctgcctgctcccaatctgggggctctctggggtggtctcagctcagtgacctctgggaggtggtccctggccccctcctccttctctcaggatttctcttggggttctcaatacttggttacctcattatccctttctctgcctctcttggctttattttggggaatcaggggtgaggagggttgggggggtcatatctgtgtttccaggttctggggagaacaatgatccacgggtcaacgtgatcacatttccttctatccttcttgtattattatttttatttttgtcaatttcatgatatggtttttaatcatgatgaattgcctggggtctgtaagaatgtgggactctgatcttccccctcttcaggtgtcagtgcggagaggctctgggccagacctcacccccagtgacttccgattgaggccaaagaccccaagctgcccgccagctctgactgccccttgcgctctgggcttcctgccgcccccagctttgcctggacactgacttcattcatggtcctcctacttcaggggcagcctcccagttcctctgcttccaaactatgcaacctccaacctgctccagttccagactgtataacctctgacctgcactggttctagaccacacaacctccaatgtggtctgctttagatcaccttcttcttcttccttcttcctcttcctcttcctcctgctcctcttcctcttcttcttcttttttttttttgacagagtcttgctctgtcacccaggctggagtgcagtggcgcgatttcagcttactgcagcctccgcgccctgggttcaagtgattctcctgcctcaacttcccaaatagccgggactacgggcatgtgccacattgcccggctaatttttgtatttttagtagagatggggtttcaccacgttgtccagtctggtctcgaactcctgacctcaagtgctccacctgcctcagccttccaaagtgctgggattacaggcgtgagccactgcacccggctagaactcactttctccaaatccctctgcttcgaatttcaccgtcttcagctctttctagttctgggcctcaccagcctctcattctgcctgttttcaaaccttacgatccccaaaaattgtctggttctgggcctctaactccctctggctctatagtctatgactaccagattcttttggttctagaattcactaacttcctctggttctagacctcttcctataaattaatccctcttgttttagatctcacaccctccaacgccctccggttccagatcttatattcagtgatttcctctggttctggaccccacaactccaagcttcctattggttccagttctcctgatcggtaatacatttggttccaaatccagacctcttaatctctctctttttttttttttttttttgagacagagtcccactctgtcacccaggctggagtacagtggctcaatctcggctcactgcagcctccacctcctgggttcaagcaattcttgggcctcagcctcccaaatagctgggattacaggcatgtgccaccacgcccagctaagttttatatttttagtagagacagtgtttcaccatgttggccaggctggtcttgaactcccgacctcaactgatccacccgcctcagcctcccaaagtgctgaaattacaggagtgagcctggccagacttcttaatttctaaatcacttttgttttagaccttatgaggctcagcttattcttctgcagttctctataaccaagactcattttctctcatcaaaaacaagtacagagagtttgatgtgtttatctcttttttcttcctcttcttttttttttttttcttttttgagatggagtctctctctgttgcccaggctggagtataatggtgccatctaggctcactgcaacctccgcctcctgattcaagtgattctcctgcctcagcctcctaaattggtgggattacaggagcccaccaccacatccggctacctttgtgtattttttagtagagacggggttttgccaagttggaggggctggtcttgaactcttgacctcagatgatccacccgcctcagcctcccaaagtgctgggattacaggcataagccaccgtgcccgaccctgtccttatcttataataaccagttcttctagaaccagacgatgctctagttctcctagattctgaacctcatgacctgtaccactcactagttccagactacacaacttctagaaggtgccacctccagggtcctgattcaagatctggtgatctgctgtttctctggttctagaactgacttacaagtgccttctgattctagacctcattccgtaagttcccttggctctagacttcatcatttccagctcctcctcactcaagatctgactccaaattaccctgggtctagaattcagccttcaaatatcttctgattttagactttgccttatacatttctctggttttagatcttaccaccctcaactccttctgattctagatcttatggttcccaaatctctctggttctagaactcagattttaggcttttgtttttccttttttttgttaaaaaaaaaaaaatagagacggggtttcaccatgttgcccaggctggtcgcgaactactgagctcaagcaattctccctccttggcctcaccaaagtgctgggactacaggcatgagccactgagcccagccaggctttttctaattctatgctttattctataaattcctctgcttctaagcctcacagcttccaactgcctttgatttcagatccaaattcctctgattctataattcagcctccaaatgcttctgattctggaatctagacttttccctaaagattcctctggttctgaatcttataacctcaactccctaattccagaccccagcctcctaaatctattctgggcttcccaccccactgaacttacccaattccttctttcagtcttaagttttcccattctaaacccctaccctctaggctgtgctgctcctggacttcatgcctctccattctcattgcctacaatctctgtgccccagaaccccctccacttcccaccccagccctccagacatgcacttaccttgactttaccccacatgtttggggcacctggggctccctcaccccttgggtggtttgcaatctgaagacttctccagccacacaggcacatgcacaggcacggtgctgtctgcatattgccaggtggggagagaagccaggacccctcagctgtctgccaccatctatgtgcctcccttaccccccagctttctttctacagatggtgctactcttggtctcccacaggaaaaggcctccccccttcttagccccatttaccccgtttgtggaaggcactgctcgctctgttttgtcagagagtggcctatccagattggtgctatgggggggtctgacccctccctcctccctctggaggtgatgtgggccctcaatggagggaattgtgctgggctagggaaaggggagggactagactggccacactggctctgaaactcaccaatctctatacaccataaagacctcaccttggtaggcaccaga

SEQ ID NO: 14137 - DNA, 2519 bp, Homo sapiens
  source 1..2519: mol_type = unassigned DNA
ccgagggctccggagcggcgactggcgagccatggcgctggggctgcagcgcgcaaggtcgaccacggagctgcgcaaggaaaagtcccgggatgcggcccgcagccggcgcagccaggagaccgaggtgctgtaccagctggctcacacgctgcccttcgcccgcggcgtcagcgcccacctggacaaggcctctatcatgcgcctcaccatcagctacctgcgcatgcaccgcctctgcgccgcaggggagtggaaccaggtgggagcagggggagaaccactggatgcctgctacctgaaggccctggagggcttcgtcatggtgctcaccgccgagggagacatggcttacctgtcggagaatgtcagcaaacacctgggcctcagtcagctggagctcattggacacagcatctttgatttcatccacccctgtgaccaagaggagcttcaggacgccctgaccccccagcagaccctgtccaggaggaaggtggaggcccccacggagcggtgcttctccttgcgcatgaagagtacactcaccagccgcgggcgcaccctcaacctcaaggcggccacctggaaggtgctgaactgctctggacatatgagggcctacaagccacctgcgcagacttctccagctgggagccctgactcagagcccccgctgcagtgcctggtgctcatctgcgaagccatcccccacccaggcagcctggagcccccactgggccgaggggccttcctcagccgccacagcctggacatgaagttcacctactgtgacgacaggattgcagaagtggctggctatagtcccgatgacctgatcggctgttccgcctacgagtacatccacgcgctggactccgatgcggtcagcaagagcatccacaccttgctgagcaagggccaggcagtaacagggcagtatcgcttcctggcccggagtggtggctacctgtggacccagacccaggccacagtggtgtcagggggacggggcccccagtcggagagtatcgtctgtgtccattttttaatcagccaggtggaagagaccggagtggtgctgtccctggagcaaacggagcaacactctcgcagacccattcagcggggcgccccctctcagaaggacacccctaaccctggggacagccttgacacccctggcccccggatccttgccttcctgcacccgccttccctgagcgaggctgccctggccgctgacccccgccgtttctgcagccctgacctccgtcgcctcctgggacccatcctggatggggcttcagtagcagccactcccagcaccccgctggccacacggcacccccaaagtcctctttcggctgatctcccagatgaactacctgtgggcaccgagaatgtgcacagactcttcacctccgggaaagacactgaggcagtggagacagatttagatatagctcaggatgctgatgctctggatttggagatgctggccccctacatctccatggatgatgacttccagctcaacgccagcgagcagctacccagggcctaccacagacctctgggggctgtcccccggccccgtgctcggagcttccatggcctgtcacctccagcccttgagccctccctgctaccccgctgggggagtgacccccggctgagctgctccagcccttccagaggggacccctcagcatcctctcccatggctggggctcggaagaggaccctggcccagagctcagaggacgaggacgagggagtggagctgctgggagtgagacctcccaaaaggtcccccagcccagaacacgaaaactttctgctctttcctctcagcctgagtttccttctgacaggaggaccagccccagggagcctgcaggaccccagcaccccactcctgaacctgaatgagcccctgggcctgggcccctcactgctctctccgtactcagacgaggacactacccagcccgggggccccttccagccaagggcaggctcagcccaggctgactgagccggctcctctccccatctgccttctcctcccccagaaaggacctcaaccacactccacgccggcagccaacgcacaggatgggggcgccaggagaggggcccctctctcctctatgtaccccctgcccacctcgggcctacctcagccctcacccctctgcctgctcccaatctgggggctctctggggtggtctcagctcagtgacctctgggaggtggtccctggccccctcctccttctctcaggatttctcttggggttctcaatacttggttacctcattatccctttctctgcctctcttggctttattttggggaatcaggggtgaggagggttgggggggtcatatctgtgtttccaggttctggggagaacaatgatccacgggtcaacgtgatcacatttccttctatccttcttgtattattatttttatttttgtcaatttcatgatatggtttttaatcatga

SEQ ID NO: 14138 - DNA, 2462 bp, Homo sapiens
  source 1..2462: mol_type = unassigned DNA
ggagcggcgactggcgagccatggcgctggggctgcagcgcgcaaggtcgaccacggagctgcgcaaggaaaagtcccgggatgcggcccgcagccggcgcagccaggagaccgaggtgctgtaccagctggctcacacgctgcccttcgcccgcggcgtcagcgcccacctggacaaggcctctatcatgcgcctcaccatcagctacctgcgcatgcaccgcctctgcgccgcaggggagtggaaccaggtgggagcagggggagaaccactggatgcctgctacctgaaggccctggagggcttcgtcatggtgctcaccgccgagggagacatggcttacctgtcggagaatgtcagcaaacacctgggcctcagtcagctggagctcattggacacagcatctttgatttcatccacccctgtgaccaagaggagcttcaggacgccctgaccccccagcagaccctgtccaggaggaaggtggaggcccccacggagcggtgcttctccttgcgcatgaagagtacactcaccagccgcgggcgcaccctcaacctcaaggcggccacctggaaggtgctgaactgctctggacatatgagggcctacaagccacctgcgcagacttctccagctgggagccctgactcagagcccccgctgcagtgcctggtgctcatctgcgaagccatcccccacccaggcagcctggagcccccactgggccgaggggccttcctcagccgccacagcctggacatgaagttcacctactgtgacgacaggattgcagaagtggctggctatagtcccgatgacctgatcggctgttccgcctacgagtacatccacgcgctggactccgatgcggtcagcaagagcatccacacctgtatgtatcccatttccccaggtgcgaagccagctgccacatggcccccagctgacaccaggaccccccagctccccataccccaggatgcactgcctccccacctcaacaccagctccctgctccccaagccccaaggaactgtctccttccttgccccctcatacccagtccccagatatttctctccccatttgcccccttggtggccctgatccctcccgatccccctcctcagtgctgagcaagggccaggcagtaacagggcagtatcgcttcctggcccggagtggtggctacctgtggacccagacccaggccacagtggtgtcagggggacggggcccccagtcggagagtatcgtctgtgtccattttttaatcaggtaagcaggaggaggggctggggtggctgtgtgtgggcctgatctgcatgtgtggacaggtgtgtgtgtgtgtgtgtgtgtgtgcgtatgagcatgcatgtgtatcatgcataagtgtatgtgagggagtgtgcacgtgtacacatatgaggaatgtgtgtcaccatgtaaatgccggtgtgtgtgtctgcatggacacaggtatgtgtatgggtgtgtagactgttaatttttttttttttttttttttttttttttgcgtgaacctctgcttaagtggattgttaattcaaattagaaaggggtctttatttggcctggcatggtggctcatgcctgtaatcctagcactttgggaggctgaggtgggcggattgcctgagctcaggagttcgaaaccagcctgggcaacatgacgaaatgctgtttctactaataataccaaaaattagccgggtgtggtgacacatgcctgtaatcccaactactcgggaggctgaggcacgagaatcattagaacccaggtggtggaggctgcagtgagccgagattgcgtcagtgcactctggcctcggcaacagagcgagactctgtctcaaacaaacaaacaaacaaacaaacaaaaggactctatattcaagttaaaataagaagtgtaacagaatcatggggtcttttttgctttttaaattttgatgtggctcacacctgtaaatcccaaagtgttgggattacaggcatgagccactgcacccggcccatgttgtggtttatatcagtagttcctttgtaaatagtgaacagtattccatggtatgaatagagcacaggttttttttttatccattcaccagttagaagacattgggctgtttccaagtttgggtgattacaaaaaaacagctactgtaaacattctcatacaagattttatgagatcacatgttttcatttctcttgggtaaacagctaggattggaatggatgggttatatagtaagtgtatatttaatctaagaaactgccatggctgggcacagtggctcacgcctgtaatcccagcactttgggaagccaaggaaggaggatgactagagcctctgaggtgaagaccagcctgggcaaagtggttaagactcaaccgcaaaaaaagaaaaacagaaaacctgaaaacaaacc

SEQ ID NO: 14139 - DNA, 2101 bp, Homo sapiens
  source 1..2101: mol_type = unassigned DNA
cttttctctttcccgagtcaccaccagtgaatgctgcccatgccctcaggtcgaccacggagctgcgcaaggaaaagtcccgggatgcggcccgcagccggcgcagccaggagaccgaggtgctgtaccagctggctcacacgctgcccttcgcccgcggcgtcagcgcccacctggacaaggcctctatcatgcgcctcaccatcagctacctgcgcatgcaccgcctctgcgccgcagctggagctcattggacacagcatctttgatttcatccacccctgtgaccaagaggagcttcaggacgccctgaccccccagcagaccctgtccaggaggaaggtggaggcccccacggagcggtgcttctccttgcgcatgaagagtacactcaccagccgcgggcgcaccctcaacctcaaggcggccacctggaaggtgctgaactgctctggacatatgagggcctacaagccacctgcgcagacttctccagctgggagccctgactcagagcccccgctgcagtgcctggtgctcatctgcgaagccatcccccacccaggcagcctggagcccccactgggccgaggggccttcctcagccgccacagcctggacatgaagttcacctactgtgacgacaggattgcagaagtggctggctatagtcccgatgacctgatcggctgttccgcctacgagtacatccacgcgctggactccgatgcggtcagcaagagcatccacaccttgctgagcaagggccaggcagtaacagggcagtatcgcttcctggcccggagtggtggctacctgtggacccagacccaggccacagtggtgtcagggggacggggcccccagtcggagagtatcgtctgtgtccattttttaatcagccaggtggaagagaccggagtggtgctgtccctggagcaaacggagcaacactctcgcagacccattcagcggggcgccccctctcagaaggacacccctaaccctggggacagccttgacacccctggcccccggatccttgccttcctgcacccgccttccctgagcgaggctgccctggccgctgacccccgccgtttctgcagccctgacctccgtcgcctcctgggacccatcctggatggggcttcagtagcagccactcccagcaccccgctggccacacggcacccccaaagtcctctttcggctgatctcccagatgaactacctgtgggcaccgagaatgtgcacagactcttcacctccgggaaagacactgaggcagtggagacagatttagatatagctcaggatgctgatgctctggatttggagatgctggccccctacatctccatggatgatgacttccagctcaacgccagcgagcagctacccagggcctaccacagacctctgggggctgtcccccggccccgtgctcggagcttccatggcctgtcacctccagcccttgagccctccctgctaccccgctgggggagtgacccccggctgagctgctccagcccttccagaggggacccctcagcatcctctcccatggctggggctcggaagaggaccctggcccagagctcagaggacgaggacgagggagtggagctgctgggagtgagacctcccaaaaggtcccccagcccagaacacgaaaactttctgctctttcctctcagcctgagtttccttctgacaggaggaccagccccagggagcctgcaggaccccagcaccccactcctgaacctgaatgagcccctgggttttcactttgtcacccagtctggagtgcagtggcacaaacacagctcaccgcagcctcgacctcctgggctcaagtgatcctcctacttcagctcccacaagtagctgggactgcagctatgtgccatcatgcctggctgatgtttatatgttttgtagagacgaggtttcaccatgttgcccaggctggtcttgaactcctgagttcaagcgatccacctgccttggcctcccaaagtgctgggattactggtatgaaccaccacgcccgacagtaaatatgttttgaatgaataaactctcataaatg

SEQ ID NO: 14140 - DNA, 1708 bp, Homo sapiens
  source 1..1708: mol_type = unassigned DNA
actcgtaactcgcacccgggtcctggctgcaccgcatcccctcctgcaccccctggatggcccttcagccaacgggggcctgggcgatggtcgaccacggagctgcgcaaggaaaagtcccgggatgcggcccgcagccggcgcagccaggagaccgaggtgctgtaccagctggctcacacgctgcccttcgcccgcggcgtcagcgcccacctggacaaggcctctatcatgcgcctcaccatcagctacctgcgcatgcaccgcctctgcgccgcagctggagctcattggacacagcatctttgatttcatccacccctgtgaccaagaggagcttcaggacgccctgaccccccagcagaccctgtccaggaggaaggtggaggcccccacggagcggtgcttctccttgcgcatgaagagtacactcaccagccgcgggcgcaccctcaacctcaaggcggccacctggaaggtgctgaactgctctggacatatgagggcctacaagccacctgcgcagacttctccagctgggagccctgactcagagcccccgctgcagtgcctggtgctcatctgcgaagccatcccccacccaggcagcctggagcccccactgggccgaggggccttcctcagccgccacagcctggacatgaagttcacctactgtgacgacaggattgcagaagtggctggctatagtccgatgacctgatcggctgttccgcctacgagtacatccacgcgctggactccgatgcggtcagcaagagcatccacaccttgctgagcaagggccaggcagtaacagggcagtatcgcttcctggcccggagtggtggctacctgtggacccagacccaggccacagtggtgtcagggggacggggcccccagtcggagagtatcgtctgtgtccattttttaatcagccaggtggaagagaccggagtggtgctgtccctggagcaaacggagcaacactctcgcagacccattcagcggggcgccccctctcagaaggacacccctaaccctggggacagccttgacacccctggcccccggatccttgccttcctgcacccgccttccctgagcgaggctgccctggccgctgacccccgccgtttctgcagccctgacctccgtcgcctcctgggacccatcctggatggggcttcagtagcagccactcccagcaccccgctggccacacggcacccccaaagtcctctttcggctgatctcccagatgaactacctgtgggcaccgagaatgtgcacagactcttcacctccgggaaagacactgaggcagtggagacagatttagatatagctcaggaccccagcaccccactcctgaacctgaatgagcccctgggttttcactttgtcacccagtctggagtgcagtggcacaaacacagctcaccgcagcctcgacctcctgggctcaagtgatcctcctacttcagctcccacaagtagctgggactgcagctatgtgccatcatgcctggctgatgtttatatgttttgtagagacgaggtttcaccatgttgcccaggctggtcttgaactcctgagttcaagcgatccacctgccttggcctcccaaagtgctgggattactggtatgaaccaccacgcccgacagtaaatatgttttgaatgaataaactctcataaatg

SEQ ID NO: 14141 - DNA, 804 bp, Homo sapiens
  source 1..804: mol_type = unassigned DNA
gagggctccggagcggcgactggcgagccatggcgctggggctgcagcgcgcaaggtcgaccacggagctgcgcaaggaaaagtcccgggatgcggcccgcagccggcgcagccaggagaccgaggtgctgtaccagctggctcacacgctgcccttcgcccgcggcgtcagcgcccacctggacaaggcctctatcatgcgcctcaccatcagctacctgcgcatgcaccgcctctgcgccgcaggaggagcttcaggacgccctgaccccccagcagaccctgtccaggaggaaggtggaggcccccacggagcggtgcttctccttgcgcatgaagagtacactcaccagccgcgggcgcaccctcaacctcaaggcggccacctggaaggtgctgaactgctctggacatatgagggcctacaagccacctgcgcagacttctccagctgggagccctgactcagagcccccgctgcagtgcctggtgctcatctgcgaagccatcccccacccaggcagcctggagcgctttgttcctgtgtcctctgctgctacttccctctgcctaccctctctctcacccagtaaagtggctggctatagtcccgatgacctgatcggctgttccgcctacgagtacatccacgcgctggactccgatgcgccccaggatgcactgcctccccacctcaacaccagctccctgctccccaagccccaaggaactgtctccttccttgccccctcatacccagtccccagatatttctctccccatttgcccccttggtggccctga

SEQ ID NO: 14142 - DNA, 1367 bp, Homo sapiens
  source 1..1367: mol_type = unassigned DNA
ccgagggctccggagcggcgactggcgagccatggcgctggggctgcagcgcgcaaggtcgaccacggagctgcgcaaggaaaagtcccgggatgcggcccgcagccggcgcagccaggagaccgaggtgctgtaccagctggctcacacgctgcccttcgcccgcggcgtcagcgcccacctggacaaggcctctatcatgcgcctcaccatcagctacctgcgcatgcaccgcctctgcgccgcaggggagtggaaccaggtgggagcagggggagaaccactggatgcctgctacctgaaggccctggagggcttcgtcatggtgctcaccgccgagggagacatggcttacctgtcggagaatgtcagcaaacacctgggcctcagtcagctggagctcattggacacagcatctttgatttcatccacccctgtgaccaagaggagcttcaggacgccctgaccccccagcagaccctgtccaggaggaaggtggaggcccccacggagcggtgcttctccttgcgcatgaagagtacactcaccagccgcgggcgcaccctcaacctcaaggcggccacctggaaggtgctgaactgctctggacatatgagggcctacaagccacctgcgcagacttctccagctgggagccctgactcagagcccccgctgcagtgcctggtgctcatctgcgaagccatcccccacccaggcagcctggagcccccactgggccgaggggccttcctcagccgccacagcctggacatgaagttcacctactgtgacgacaggattgcagaagtggctggctatagtcccgatgacctgatcggctgttccgcctacgagtacatccacgcgctggactccgatgcggtcagcaagagcatccacacctgtatgtatcccatttccccaggtgcgaagccagctgccacatggcccccagctgacaccaggaccccccagctccccataccccaggatgcactgcctccccacctcaacaccagctccctgctccccaagccccaaggaactgtctccttccttgccccctcatacccagtccccagatatttctctccccatttgcccccttggtggccctgatccctcccgatccccctcctcagtgctgagcaagggccaggcagtaacagggcagtatcgcttcctggcccggagtggtggctacctgtggacccagacccaggccacagtggtgtcagggggacggggcccccagtcggagagtatcgtctgtgtccattttttaatcaggtaagcaggaggaggggctggggtggctgtgtgtgggcctgatctgcatgtgtggacaggtgtgtgtgtgtgt

SEQ ID NO: 14143 - DNA, 4511 bp, Homo sapiens
  source 1..4511: mol_type = unassigned DNA
aatgtaacagtttgcaaaccgagaggagttgtgaagggcgcgggtggggggcgctgccggcctcgtgggtacgttcgtgccgcgtctgtcccagagctggggccgcaggagcggaggcaagaggggcactatggcagacaaagttaggaggcagaggccgaggaggcgagtctgttgggccttggtggctgtgctcttggcagacctgttggcactgagtgatacactggcagtgatgtctgtggacctgggcagtgagtccatgaaggtggccattgtcttgaataaggaatctcggaggaaaacaccggtgatcgtgaccctgaaagaaaatgaaagattctttggagacagtgcagcaagcatggcgattaagaatccaaaggctacgctacgttacttccagcacctcctggggaagcaggcagataacccccatgtagctctttaccaggcccgcttcccggagcacgagctgactttcgacccacagaggcagactgtgcactttcagatcagctcgcagctgcagttctcacctgaggaagtgttgggcatggttctcaattattctcgttctctagctgaagattttgcagagcagcccatcaaggatgcagtgatcaccgtgccagtcttcttcaaccaggccgagcgccgagctgtgctgcaggctgctcgtatggctggcctcaaagtgctgcagctcatcaatgacaacaccgccactgccctcagctatggtgtcttccgccggaaagatattaacaccactgcccagaatatcatgttctatgacatgggctcaggcagcaccgtatgcaccattgtgacctaccagatggtgaagactaaggaagctgggatgcagccacagctgcagatccggggagtaggatttgaccgtaccctggggggcctggagatggagctccggcttcgagaacgcctggctgggcttttcaatgagcagcgcaagggtcagagagcaaaggatgtgcgggagaacccgcgtgccatggccaagctgctgcgtgaggctaatcggctcaaaaccgtcctcagtgccaacgctgaccacatggcacagattgaaggcctgatggatgatgtggacttcaaggcaaaagtgactcgtgtggaatttgaggagttgtgtgcagacttgtttgagcgggtgcctgggcctgtacagcaggccctccagagtgccgaaatgagtctggatgagattgagcaggtgatcctggtgggtggggccactcgggtccccagagttcaggaggtgctgctgaaggccgtgggcaaggaggagctggggaagaacatcaatgcagatgaagcagccgccatgggggcagtgtaccaggcagctgcgctcagcaaagcctttaaagtgaagccatttgtcgtccgagatgcagtggtctaccccatcctggtggagttcacgagggaggtggaggaggagcctgggattcacagcctgaagcacaataaacgggtactcttctctcggatggggccctaccctcaacgcaaagtcatcacctttaaccgctacagccatgatttcaacttccacatcaactacggcgacctgggcttcctggggcctgaagatcttcgggtatttggctcccagaatctgaccacagtgaagctaaaaggggtgggtgacagcttcaagaagtatcctgactacgagtccaagggcatcaaggctcacttcaacctggatgagagtggcgtgctcagtctagacagggtggagtctgtatttgagacactggtagaggacagcgcagaagaggaatctactctcaccaaacttggcaacaccatttccagcctgtttggaggcggtaccacaccagatgccaaggagaatggtactgatactgtccaggaggaagaggagagccctgcagaggggagcaaggacgagcctggggagcaggtggagctcaaggaggaagctgaggccccagtggaggatggctctcagcccccaccccctgaacctaagggagatgcaacccctgagggagaaaaggccacagaaaaagaaaatggggacaagtctgaggcccagaaaccaagtgagaaggcagaggcagggcctgagggcgtcgctccagccccagagggagagaagaagcagaagcccgccaggaagcggcgaatggtagaggagatcggggtggagctggttgttctggacctgcctgacttgccagaggataagctggctcagtcggtgcagaaacttcaggacttgacactccgagacctggagaagcaggaacgggaaaaagctgccaacagcttggaagcattcatatttgagacccaggacaagctgtaccagcccgagtaccaggaagtgtccacagaggagcagcgtgaggagatctctgggaagctcagcgccgcatccacctggctggaggatgagggtgttggagccaccacagtgatgttgaaggagaagctggctgagctgaggaagctgtgccaagggctgttttttcgggtagaggagcgcaagaagtggcccgaacggctgtctgccctcgataatctcctcaaccattccagcatgttcctcaagggggcccggctcatcccagagatggaccagatcttcactgaggtggagatgacaacgttagagaaagtcatcaatgagacctgggcctggaagaatgcaactctggccgagcaggctaagctgcccgccacagagaagcctgtgttgctctcaaaagacattgaagctaagatgatggccctggaccgagaggtgcagtatctgctcaataaggccaagtttaccaagccccggccccggcctaaggacaagaatgggacccgggcagagccacccctcaatgccagtgccagtgaccagggggagaaggtcatccctccagcaggccagactgaagatgcagagcccatttcagaacctgagaaagtagagactgcaggatccgagccaggagacactgagcctttggagttaggaggtcctggagcagaacctgaacagaaagaacaatcgacaggacagaagcggcctttgaagaacgacgaactataacccccacctctgttttccccattcatctccacccccttcccccaccacttctatttatttaacatcgagggttgggggaggggttggtcctgccctcggctggagttcctttctcacccctgtgatttggaggtgtggagaaggggaagggagggacagctcactggttccttctgcagtacctctgtggttaaaaatggaaactgttctcctccccagccccactccctgttccctacccatataggccctaaatttgggaaaaatcactattaatttctgaatcctttgcctgtgggtaggaagagaatggctgccagtggctgatgggtcccggtgatgggaagggtatcaggttgctggggagtttccactcttctctggtgattgttccttccctcccttcctctcccaccatgcgatgagcatcctttcaggccagtgtctgcagagcctcagttaccaggtttggtttctgagtgcctatctgtgctctttcctccctctgcgggcttctcttgctctgagcctcccttccccattccccatccagctcctttccccctgggtttccttggcttcctgcagcaaattgggcagttctctgccccttgcctaaaagcctgtacctctggattggcggaagtaaatctggaaggattctcactcgtatttcccacccctagtggccagaggagggaggggcacagtgaagaagggagcccaccacctctccgaagaggaaagccacgtagagtggttggcatggggtgccagcatcgtgcaagctctgtcataatctgcatcttcccagcagcctggtaccccaggttcctgtaactccctgcctcctcctctcttctgctgttctgctcctcccagacagagcctttccctcaccccctgaccccctgggctgaccaaaatgtgctttctactgtgagtccctatcccaagatcctggggaaaggagagaccatggtgtgaatgtagagatgccacctccctctctctgaggcaggcctgtggatgaaggaggagggtcagggctggccttcctctgtgcatcactctgctaggttgggggcccccgacccaccatacctacgcctagggagcccgtcctccagtattccgtctgtagcaggagctagggctgctgcctcagctccaagacaagaatgaacctggctgtgtcagtcattttgtcttttccttttttttttttttttgccacattggcagagatgggacctaagggtcccacccctcaccccacccccacctcttctgtatgtttgaattctttcagtagctgttgatgctggttggacaggtttgagtcaaattgtactttgctccattgttaattgagaaactgtttcaataaaatattcttttctac

SEQ ID NO: 14144 - DNA, 4530 bp, Homo sapiens
  source 1..4530: mol_type = unassigned DNA
aacagtttgcaaaccgagaggagttgtgaagggcgcgggtggggggcgctgccggcctcgtgggtacgttcgtgccgcgtctgtcccagagctggggccgcaggagcggaggcaagaggggcactatggcagacaaagttaggaggcagaggccgaggaggcgagtctgttgggccttggtggctgtgctcttggcagacctgttggcactgagtgatacactggcagtgatgtctgtggacctgggcagtgagtccatgaaggtggccattgtcaaacctggagtgcccatggaaattgtcttgaataaggaatctcggaggaaaacaccggtgatcgtgaccctgaaagaaaatgaaagattctttggagacagtgcagcaagcatggcgattaagaatccaaaggctacgctacgttacttccagcacctcctggggaagcaggcagataacccccatgtagctctttaccaggcccgcttcccggagcacgagctgactttcgacccacagaggcagactgtgcactttcagatcagctcgcagctgcagttctcacctgaggaagtgttgggcatggttctcaattattctcgttctctagctgaagattttgcagagcagcccatcaaggatgcagtgatcaccgtgccagtcttcttcaaccaggccgagcgccgagctgtgctgcaggctgctcgtatggctggcctcaaagtgctgcagctcatcaatgacaacaccgccactgccctcagctatggtgtcttccgccggaaagatattaacaccactgcccagaatatcatgttctatgacatgggctcaggcagcaccgtatgcaccattgtgacctaccagatggtgaagactaaggaagctgggatgcagccacagctgcagatccggggagtaggatttgaccgtaccctggggggcctggagatggagctccggcttcgagaacgcctggctgggcttttcaatgagcagcgcaagggtcagagagcaaaggatgtgcgggagaacccgcgtgccatggccaagctgctgcgtgaggctaatcggctcaaaaccgtcctcagtgccaacgctgaccacatggcacagattgaaggcctgatggatgatgtggacttcaaggcaaaagtgactcgtgtggaatttgaggagttgtgtgcagacttgtttgagcgggtgcctgggcctgtacagcaggccctccagagtgccgaaatgagtctggatgagattgagcaggtgatcctggtgggtggggccactcgggtccccagagttcaggaggtgctgctgaaggccgtgggcaaggaggagctggggaagaacatcaatgcagatgaagcagccgccatgggggcagtgtaccaggcagctgcgctcagcaaagcctttaaagtgaagccatttgtcgtccgagatgcagtggtctaccccatcctggtggagttcacgagggaggtggaggaggagcctgggattcacagcctgaagcacaataaacgggtactcttctctcggatggggccctaccctcaacgcaaagtcatcacctttaaccgctacagccatgatttcaacttccacatcaactacggcgacctgggcttcctggggcctgaagatcttcgggtatttggctcccagaatctgaccacagtgaagctaaaaggggtgggtgacagcttcaagaagtatcctgactacgagtccaagggcatcaaggctcacttcaacctggatgagagtggcgtgctcagtctagacagggtggagtctgtatttgagacactggtagaggacagcgcagaagaggaatctactctcaccaaacttggcaacaccatttccagcctgtttggaggcggtaccacaccagatgccaaggagaatggtactgatactgtccaggaggaagaggagagccctgcagaggggagcaaggacgagcctggggagcaggtggagctcaaggaggaagctgaggccccagtggaggatggctctcagcccccaccccctgaacctaagggagatgcaacccctgagggagaaaaggccacagaaaaagaaaatggggacaagtctgaggcccagaaaccaagtgagaaggcagaggcagggcctgagggcgtcgctccagccccagagggagagaagaagcagaagcccgccaggaagcggcgaatggtagaggagatcggggtggagctggttgttctggacctgcctgacttgccagaggataagctggctcagtcggtgcagaaacttcaggacttgacactccgagacctggagaagcaggaacgggaaaaagctgccaacagcttggaagcattcatatttgagacccaggacaagctgtaccagcccgagtaccaggaagtgtccacagaggagcagcgtgaggagatctctgggaagctcagcgccgcatccacctggctggaggatgagggtgttggagccaccacagtgatgttgaaggagaagctggctgagctgaggaagctgtgccaagggctgttttttcgggtagaggagcgcaagaagtggcccgaacggctgtctgccctcgataatctcctcaaccattccagcatgttcctcaagggggcccggctcatcccagagatggaccagatcttcactgaggtggagatgacaacgttagagaaagtcatcaatgagacctgggcctggaagaatgcaactctggccgagcaggctaagctgcccgccacagagaagcctgtgttgctctcaaaagacattgaagctaagatgatggccctggaccgagaggtgcagtatctgctcaataaggccaagtttaccaagccccggccccggcctaaggacaagaatgggacccgggcagagccacccctcaatgccagtgccagtgaccagggggagaaggtcatccctccagcaggccagactgaagatgcagagcccatttcagaacctgagaaagtagagactggatccgagccaggagacactgagcctttggagttaggaggtcctggagcagaacctgaacagaaagaacaatcgacaggacagaagcggcctttgaagaacgacgaactataacccccacctctgttttccccattcatctccacccccttcccccaccacttctatttatttaacatcgagggttgggggaggggttggtcctgccctcggctggagttcctttctcacccctgtgatttggaggtgtggagaaggggaagggagggacagctcactggttccttctgcagtacctctgtggttaaaaatggaaactgttctcctccccagccccactccctgttccctacccatataggccctaaatttgggaaaaatcactattaatttctgaatcctttgcctgtgggtaggaagagaatggctgccagtggctgatgggtcccggtgatgggaagggtatcaggttgctggggagtttccactcttctctggtgattgttccttccctcccttcctctcccaccatgcgatgagcatcctttcaggccagtgtctgcagagcctcagttaccaggtttggtttctgagtgcctatctgtgctctttcctccctctgcgggcttctcttgctctgagcctcccttccccattccccatccagctcctttccccctgggtttccttggcttcctgcagcaaattgggcagttctctgccccttgcctaaaagcctgtacctctggattggcggaagtaaatctggaaggattctcactcgtatttcccacccctagtggccagaggagggaggggcacagtgaagaagggagcccaccacctctccgaagaggaaagccacgtagagtggttggcatggggtgccagcatcgtgcaagctctgtcataatctgcatcttcccagcagcctggtaccccaggttcctgtaactccctgcctcctcctctcttctgctgttctgctcctcccagacagagcctttccctcaccccctgaccccctgggctgaccaaaatgtgctttctactgtgagtccctatcccaagatcctggggaaaggagagaccatggtgtgaatgtagagatgccacctccctctctctgaggcaggcctgtggatgaaggaggagggtcagggctggccttcctctgtgcatcactctgctaggttgggggcccccgacccaccatacctacgcctagggagcccgtcctccagtattccgtctgtagcaggagctagggctgctgcctcagctccaagacaagaatgaacctggctgtgtcagtcattttgtcttttccttttttttttttttttgccacattggcagagatgggacctaagggtcccacccctcaccccacccccacctcttctgtatgtttgaattctttcagtagctgttgatgctggttggacaggtttgagtcaaattgtactttgctccattgttaattgagaaactgtttcaataaaatattcttttctac

SEQ ID NO: 14145 - DNA, 3134 bp, Homo sapiens
  source 1..3134: mol_type = unassigned DNA
aacagtttgcaaaccgagaggagttgtgaagggcgcgggtggggggcgctgccggcctcgtgggtacgttcgtgccgcgtctgtcccagagctggggccgcaggagcggaggcaagaggggcactatggcagacaaagttaggaggcagaggccgaggaggcgagctgactttcgacccacagaggcagactgtgcactttcagatcagctcgcagctgcagttctcacctgaggaagtgttgggcatggttctcaattattctcgttctctagctgaagattttgcagagcagcccatcaaggatgcagtgatcaccgtgccagtcttcttcaaccaggccgagcgccgagctgtgctgcaggctgctcgtatggctggcctcaaagtgctgcagctcatcaatgacaacaccgccactgccctcagctatggtgtcttccgccggaaagatattaacaccactgcccagaatatcatgttctatgacatgggctcaggcagcaccgtatgcaccattgtgacctaccagatggtgaagactaaggaagctgggatgcagccacagctgcagatccggggagtaggatttgaccgtaccctggggggcctggagatggagctccggcttcgagaacgcctggctgggcttttcaatgagcagcgcaagggtcagagagcaaaggatgtgcgggagaacccgcgtgccatggccaagctgctgcgtgaggctaatcggctcaaaaccgtcctcagtgccaacgctgaccacatggcacagattgaaggcctgatggatgatgtggacttcaaggcaaaagtgactcgtgtggaatttgaggagttgtgtgcagacttgtttgagcgggtgcctgggcctgtacagcaggccctccagagtgccgaaatgagtctggatgagattgagcaggtgatcctggtgggtggggccactcgggtccccagagttcaggaggtgctgctgaaggccgtgggcaaggaggagctggggaagaacatcaatgcagatgaagcagccgccatgggggcagtgtaccaggcagctgcgctcagcaaagcctttaaagtgaagccatttgtcgtccgagatgcagtggtctaccccatcctggtggagttcacgagggaggtggaggaggagcctgggattcacagcctgaagcacaataaacgggtactcttctctcggatggggccctaccctcaacgcaaagtcatcacctttaaccgctacagccatgatttcaacttccacatcaactacggcgacctgggcttcctggggcctgaagatcttcgggtatttggctcccagaatctgaccacagtgaagctaaaaggggtgggtgacagcttcaagaagtatcctgactacgagtccaagggcatcaaggctcacttcaacctggatgagagtggcgtgctcagtctagacagggtggagtctgtatttgagacactggtagaggacagcgcagaagaggaatctactctcaccaaacttggcaacaccatttccagcctgtttggaggcggtaccacaccagatgccaaggagaatggtactgatactgtccaggaggaagaggagagccctgcagaggggagcaaggacgagcctggggagcaggtggagctcaaggaggaagctgaggccccagtggaggatggctctcagcccccaccccctgaacctaagggagatgcaacccctgagggagaaaaggccacagaaaaagaaaatggggacaagtctgaggcccagaaaccaagtgagaaggcagaggcagggcctgagggcgtcgctccagccccagagggagagaagaagcagaagcccgccaggaagcggcgaatggtagaggagatcggggtggagctggttgttctggacctgcctgacttgccagaggataagctggctcagtcggtgcagaaacttcaggacttgacactccgagacctggagaagcaggaacgggaaaaagctgccaacagcttggaagcattcatatttgagacccaggacaagctgtaccagcccgagtaccaggaagtgtccacagaggagcagcgtgaggagatctctgggaagctcagcgccgcatccacctggctggaggatgagggtgttggagccaccacagtgatgttgaaggagaagctggctgagctgaggaagctgtgccaagggctgttttttcgggtagaggagcgcaagaagtggcccgaacggctgtctgccctcgataatctcctcaaccattccagcatgttcctcaagggggcccggctcatcccagagatggaccagatcttcactgaggtggagatgacaacgttagagaaagtcatcaatgagacctgggcctggaagaatgcaactctggccgagcaggctaagctgcccgccacagagaagcctgtgttgctctcaaaagacattgaagctaagatgatggccctggaccgagaggtgcagtatctgctcaataaggccaagtttaccaagccccggccccggcctaaggacaagaatgggacccgggcagagccacccctcaatgccagtgccagtgaccagggggagaaggtcatccctccagcaggccagactgaagatgcagagcccatttcagaacctgagaaagtagagactggatccgagccaggagacactgagcctttggagttaggaggtcctggagcagaacctgaacagaaagaacaatcgacaggacagaagcggcctttgaagaacgacgaactataacccccacctctgttttccccattcatctccacccccttcccccaccacttctatttatttaacatcgagggttgggggaggggttggtcctgccctcggctggagttcctttctcacccctgtgatttggaggtgtggagaaggggaagggagggacagctcactggttccttctgcagtacctctgtggttaaaaatggaaactgttctcctccccagccccactccctgttccctacccatataggccctaaatttgggaaaaatcactattaatttctgaatcctttgcctgtgggtaggaagagaatggctgccagtggctgatgggtcccggtgat

SEQ ID NO: 14146 - DNA, 2170 bp, Homo sapiens
  source 1..2170: mol_type = unassigned DNA
aatgtaacagtttgcaaaccgagaggagttgtgaagggcgcgggtggggggcgctgccggcctcgtgggtacgttcgtgccgcgtctgtcccagagctggggccgcaggagcggaggcaagaggggcactatggcagacaaagttaggaggcagaggccgaggaggcgagtctgttgggccttggtggctgtgctcttggcagacctgttggcactgagtgatacactggcagtgatgtctgtggacctgggcagtgagtccatgaaggtggccattgtcaaacctggagtgcccatggaaattgtcttgaataaggaatctcggaggaaaacaccggtgatcgtgaccctgaaagaaaatgaaagattctttggagacagtgcagcaagcatggcgattaagaatccaaaggctacgctacgttacttccagcacctcctggggaagcaggcagataacccccatgtagctctttaccaggcccgcttcccggagcacgagctgactttcgacccacagaggcagactgtgcactttcagatcagctcgcagctgcagttctcacctgaggaagtgttgggcatggttctcaattattctcgttctctagctgaagattttgcagagcagcccatcaaggatgcagtgatcaccgtgccagtcttcttcaaccaggccgagcgccgagctgtgctgcaggctgctcgtatggctggcctcaaagtgctgcagctcatcaatgacaacaccgccactgccctcagctatggtgtcttccgccggaaagatattaacaccactgcccagaatatcatgttctatgacatgggctcaggcagcaccgtatgcaccattgtgacctaccagatggtgaagactaaggaagctgggatgcagccacagctgcagatccggggagtaggatttgaccgtaccctggggggcctggagatggagctccggcttcgagaacgcctggctgggcttttcaatgagcagcgcaagggtcagagagcaaaggatgtgcgggagaacccgcgtgccatggccaagctgctgcgtgaggctaatcggctcaaaaccgtcctcagtgccaacgctgaccacatggcacagattgaaggcctgatggatgatgtggacttcaaggcaaaagtgactcgtgtggaatttgaggagttgtgtgcagacttgtttgagcgggtgcctgggcctgtacagcaggccctccagagtgccgaaatgagtctggatgagattgagcaggtgatcctggtgggtggggccactcgggtccccagagttcaggaggtgctgctgaaggccgtgggcaaggaggagctggggaagaacatcaatgcagatgaagcagccgccatgggggcagtgtaccaggcagctgcgctcagcaaagcctttaaagtgaagccatttgtcgtccgagatgcagtggtctaccccatcctggtggagttcacgagggaggtggaggaggagcctgggattcacagcctgaagcacaataaacgggtactcttctctcggatggggccctaccctcaacgcaaagtcatcacctttaaccgctacagccatgatttcaacttccacatcaactacggcgacctgggcttcctggggcctgaagatcttcgggtatttggctcccagaatctgaccacagtgaagctaaaaggggtgggtgacagcttcaagaagtatcctgactacgagtccaagggcatcaaggctcacttcaacctggatgagagtggcgtgctcagtctagacagggtggagtctgtatttgagacactggtagaggacagcgcagaagaggaatctactctcaccaaacttggcaacaccatttccagcctgtttggaggcggtaccacaccagatgccaaggagaatggtactgatactgtccaggaggaagaggagagccctgcagaggggagcaaggacgagcctggggagcaggtggagctcaaggaggaagctgaggccccagtggaggatggctctcagcccccaccccctgaacctaagggagatgcaacccctgagggagaaaaggccacagaaaaagaaaatggggacaagtctgaggcccagaaaccaaccagtgtctgcagagcctcagttaccaggtttggtttctga

SEQ ID NO: 14147 - DNA, 1570 bp, Homo sapiens
  source 1..1570: mol_type = unassigned DNA
gccgcgtccggggccggctggtgcgcgagacgccgccgagaggggcactatggcagacaaagttaggaggcagaggccgaggaggcgagtctgttgggccttggtggctgtgctcttggcagacctgttggcactgagtgatacactggcagtgatgtctgtggacctgggcagtgagtccatgaaggtggccattgtcaaacctggagtgcccatggaaattgtcttgaataaggaatctcggaggaaaacaccggtgatcgtgaccctgaaagaaaatgaaagattctttggagacagtgcagcaagcatggcgattaagaatccaaaggctacgctacgttacttccagcacctcctggggaagcaggcagataacccccatgtagctctttaccaggcccgcttcccggagcacgagctgactttcgacccacagaggcagactgtgcactttcagatcagctcgcagctgcagttctcacccctgtgatttggaggtgtggagaaggggaagggagggacagctcactgtttccactcttctctggtgattgttccttccctcccttcctctcccaccatgcgatgagcatcctttcaggccagtgtctgcagagcctcagttaccaggtttggtttctgagtgcctatctgtgctctttcctccctctgcgggcttctcttgctctgagcctcccttccccattccccatccagctcctttccccctgggtttccttggcttcctgcagcaaattgggcagttctctgccccttgcctaaaagcctgtacctctggattggcggaagtaaatctggaaggattctcactcgtatttcccacccctagtggccagaggagggaggggcacagtgaagaagggagcccaccacctctccgaagaggaaagccacgtagagtggttggcatggggtgccagcatcgtgcaagctctgtcataatctgcatcttcccagcagcctggtaccccaggttcctgtaactccctgcctcctcctctcttctgctgttctgctcctcccagacagagcctttccctcaccccctgaccccctgggctgaccaaaatgtgctttctactgtgagtccctatcccaagatcctggggaaaggagagaccatggtgtgaatgtagagatgccacctccctctctctgaggcaggcctgtggatgaaggaggagggtcagggctggccttcctctgtgcatcactctgctaggttgggggcccccgacccaccatacctacgcctagggagcccgtcctccagtattccgtctgtagcaggagctagggctgctgcctcagctccaagacaagaatgaacctggctgtgtcagtcattttgtcttttccttttttttttttttttgccacattggcagagatgggacctaagggtcccacccctcaccccacccccacctcttctgtatgtttgaattctttcagtagctgttgatgctggttggacaggtttgagtcaaattgtactttgctccattgttaattgagaaactgtttcaataaaatattcttttct

SEQ ID NO: 14148 - DNA, 2464 bp, Homo sapiens
  source 1..2464: mol_type = unassigned DNA
gtaacagtttgcaaaccgagaggagttgtgaagggcgcgggtggggggcgctgccggcctcgtgggtacgttcgtgccgcgtctgtcccagagctggggccgcaggagcggaggcaagaggggcactatggcagacaaagttaggaggcagaggccgaggaggcgagtctgttgggccttggtggctgtgctcttggcagacctgttggcactgagtgggaatctcggaggaaaacaccggtgatcgtgaccctgaaagaaaatgaaagattctttggagacagtgcagcaagcatggcgattaagaatccaaaggctacgctacgttacttccagcacctcctggggaagcaggcagataacccccatgtagctctttaccaggcccgcttcccggagcacgagctgactttcgacccacagaggcagactgtgcactttcagatcagctcgcagctgcagttctcacctgaggaagtgttgggcatggttctcaattattctcgttctctagctgaagattttgcagagcagcccatcaaggatgcagtgatcaccgtgccagtcttcttcaaccaggccgagcgccgagctgtgctgcaggctgctcgtatggctggcctcaaagtgctgcagctcatcaatgacaacaccgccactgccctcagctatggtgtcttccgccggaaagatattaacaccactgcccagaatatcatgttctatgacatgggctcaggcagcaccgtatgcaccattgtgacctaccagatggtgaagactaaggaagctgggatgcagccacagctgcagatccggggagtaggatttgaccgtaccctggggggcctggagatggagctccggcttcgagaacgcctggctgggcttttcaatgagcagcgcaagggtcagagagcaaaggatgtgcgggagaacccgcgtgccatggccaagctgctgcgtgaggctaatcggctcaaaaccgtcctcagtgccaacgctgaccacatggcacagattgaaggcctgatggatgatgtggacttcaaggcaaaagtgactcgtgtggaatttgaggagttgtgtgcagacttgtttgagcgggtgcctgggcctgtacagcaggccctccagagtgccgaaatgagtctggatgagattgagcaggtgatcctggtgggtggggccactcgggtccccagagttcaggaggtgctgctgaaggccgtgggcaaggaggagctggggaagaacatcaatgcagatgaagcagccgccatgggggcagtgtaccaggcagctgcgctcagcaaagcctttaaagtgaagccatttgtcgtccgagatgcagtggtctaccccatcctggtggagttcacgagggaggtggaggaggagcctgggattcacagcctgaagcacaataaacgggtactcttctctcggatggggccctaccctcaacgcaaagtcatcacctttaaccgctacagccatgatttcaacttccacatcaactacggcgacctgggcttcctggggcctgaagatcttcgggtatttggctcccagaatctgaccacagtgaagctaaaaggggtgggtgacagcttcaagaagtatcctgactacgagtccaagggcatcaaggctcacttcaacctggatgagagtggcgtgctcagtctagacagggtggagtctgtatttgagacactggtagaggacagcgcagaagaggaatctactctcaccaaacttggcaacaccatttccagcctgtttggaggcggtaccacaccagatgccaaggagaatggtactgatactgtccagatgctcttcctttgtccagctagattgccacagtccaagcaggccattgaccgtttccatacagcagtcacctgtatggaacccccatggggtcggcggtgccgagccaggcctgcctggaggctctgctcctgatcgttccctggggcgcctgtggtgtttcccaggaggaagaggagagccctgcagaggggagcaaggacgagcctggggagcaggtggagctcaaggaggaagctgaggccccagtggaggatggctctcagcccccaccccctgaacctaagggagatgcaacccctgagggagaaaaggccacagaaaaagaaaatggggacaagtctgaggcccagaaaccaagtgagaaggcagaggcagggcctgagggcgtcgctccagccccagagggagagaagaagcagaagcccgccaggaagcggcgaatggtagaggagatcggggtggagctggttgttctggacctgcctgacttgccagaggataagctggctcagtcggtgcagaaacttcaggacttgacactccgagacctggagaagcaggaacgggaaaaagctgccaacagcttggaagcattcatatttgagacccaggacaagctgta

SEQ ID NO: 14149 - DNA, 3355 bp, Homo sapiens
  source 1..3355: mol_type = unassigned DNA
agtttgcaaaccgagaggagttgtgaagggcgcgggtggggggcgctgccggcctcgtgggtacgttcgtgccgcgtctgtcccagagctggggccgcaggagcggaggcaagagcttctctgtttagggatgtggcaaagccgaggacccatgctctttcacttgggcctttgtgtgggcgctgctgggatgattagagaatggtttgtacccatcaggagggagaagggaagtaggctgatctgccctgggggcactatggcagacaaagttaggaggcagaggccgaggaggcgagtctgttgggccttggtggctgtgctcttggcagacctgttggcactgagtgatacactggcagtgatgtctgtggacctgggcagtgagtccatgaaggtggccattgtcaaacctggagtgcccatggaaattgtcttgaataaggaatctcggaggaaaacaccggtgatcgtgaccctgaaagaaaatgaaagattctttggagacagtgcagcaagcatggcgattaagaatccaaaggctacgctacgttacttccagcacctcctggggaagcaggcagataacccccatgtagctctttaccaggcccgcttcccggagcacgagctgactttcgacccacagaggcagactgtgcactttcagatcagctcgcagctgcagttctcacctgaggaagtgttgggcatggttctcaattattctcgttctctagctgaagattttgcagagcagcccatcaaggatgcagtgatcaccgtgccagtcttcttcaaccaggccgagcgccgagctgtgctgcaggctgctcgtatggctggcctcaaagtgctgcagctcatcaatgacaacaccgccactgccctcagctatggtgtcttccgccggaaagatattaacaccactgcccagaatatcatgttctatgacatgggctcaggcagcaccgtatgcaccattgtgacctaccagatggtgaagactaaggaagctgggatgcagccacagctgcagatccggggagtaggatttgaccgtaccctggggggcctggagatggagctccggcttcgagaacgcctggctgggcttttcaatgagcagcgcaagggtcagagagcaaaggatgtgcgggagaacccgcgtgccatggccaagctgctgcgtgaggctaatcggctcaaaaccgtcctcagtgccaacgctgaccacatggcacagattgaaggcctgatggatgatgtggacttcaaggcaaaagtgactcgtgtggaatttgaggagttgtgtgcagacttgtttgagcgggtgcctgggcctgtacagcaggccctccagagtgccgaaatgagtctggatgagattgagcaggtgatcctggtgggtggggccactcgggtccccagagttcaggaggtgctgctgaaggccgtgggcaaggaggagctggggaagaacatcaatgcagatgaagcagccgccatgggggcagtgtaccaggcagctgcgctcagcaaagcctttaaagtgaagccatttgtcgtccgagatgcagtggtctaccccatcctggtggagttcacgagggaggtggaggaggagcctgggattcacagcctgaagcacaataaacgggtactcttctctcggatggggccctaccctcaacgcaaagtcatcacctttaaccgctacagccatgatttcaacttccacatcaactacggcgacctgggcttcctggggcctgaagatcttcgggtatttggctcccagaatctgaccacagtgaagctaaaaggggtgggtgacagcttcaagaagtatcctgactacgagtccaagggcatcaaggctcacttcaacctggatgagagtggcgtgctcagtctagacagggtggagtctgtatttgagacactggtagaggacagcgcagaagaggaatctactctcaccaaacttggcaacaccatttccagcctgtttggaggcggtaccacaccagatgccaaggagaatggtactgatactgtccagaaaccaagtgagaaggcagaggcagggcctgagggcgtcgctccagccccagagggagagaagaagcagaagcccgccaggaagcggcgaatggtagaggagatcggggtggagctggttgttctggacctgcctgacttgccagaggataagctggctcagtcggtgcagaaacttcaggacttgacactccgagacctggagaagcaggaacgggaaaaagctgccaacagcttggaagcattcatatttgagacccaggacaagctgtaccagcccgagtaccaggaagtgtccacagaggagcagcgtgaggagatctctgggaagctcagcgccgcatccacctggctggaggatgagggtgttggagccaccacagtgatgttgaaggagaagctggctgagctgaggaagctgtgccaagggctgttttttcgggtagaggagcgcaagaagtggcccgaacggctgtctgccctcgataatctcctcaaccattccagcatgttcctcaagggggcccggctcatcccagagatggaccagatcttcactgaggtggagatgacaacgttagagaaagtcatcaatgagacctgggcctggaagaatgcaactctggccgagcaggctaagctgcccgccacagagaagcctgtgttgctctcaaaagacattgaagctaagatgatggccctggaccgagaggtgcagtatctgctcaataaggccaagtttaccaagccccggccccggcctaaggacaagaatgggacccgggcagagccacccctcaatgccagtgccagtgaccagggggagaaggtcatccctccagcaggccagactgaagatgcagagcccatttcagaacctgagaaagtagagactggatccgagccaggagacactgagcctttggagttaggaggtcctggagcagaacctgaacagaaagaacaatcgacaggacagaagcggcctttgaagaacgacgaactataacccccacctctgttttccccattcatctccacccccttcccccaccacttctatttatttaacatcgagggttgggggaggggttggtcctgccctcggctggagttcctttctcacccctgtgatttggaggtgtggagaaggggaagggagggacagctcactggttccttctgcagtacctctgtggttaaaaatggaaactgttctcctccccagccccactccctgttccctacccatataggccctaaatttgggaaaaatcactattaatttctg

SEQ ID NO: 14150 - DNA, 769 bp, Homo sapiens
  source 1..769: mol_type = unassigned DNA
ctccactgcaaccacccagagccatggctccccgaggctgcatcgtagctgtctttgccattttctgcatctccaggctcctctgctcacacggagccccagtggcccccatgactccttacctgatgctgtgccagccacacaagagatgtggggacaagttctacgaccccctgcagcactgttgctatgatgatgccgtcgtgcccttggccaggacccagacgtgtggaaactgcaccttcagagtctgctttgagcagtgctgcccctggaccttcatggtgaagctgataaaccagaactgcgactcagcccggacctcggatgacaggctttgtcgcagtgtcagctaatggaacatcaggggaacgatgactcctggattctccttcctgggtgggcctggagaaagaggctggtgttacctgagatctgggatgctgagtggctgtttgggggccagagaaacacacactcaactgcccacttcattctgtgacctgtctgaggcccaccctgcagctgccctgaggaggcccacaggtccccttctagaattctggacagcatgagatgcgtgtgctgatgggggcccagggactctgaaccctcctgatgacccctatggccaacatcaacccggcaccaccccaaggctggctggggaacccttcacccttctgtgagattttccatcatctcaagttctcttctatccaggagcaaagcacaggatcataataaatttatgtactttataaatgaa

SEQ ID NO: 14151 - DNA, 610 bp, Homo sapiens
  source 1..610: mol_type = unassigned DNA
gcactgctgctgtcccatcagctgctctgaagctccatggtgcccagaatcttcgctcctgcttatgtgtcagtctgtctcctcctcttgtgtccaagggaagtcatcgctcccgctggctcagaaccatggctgtgccagccggcacccaggtgtggagacaagatctacaaccccttggagcagtgctgttacaatgacgccatcgtgtccctgagcgagacccgccaatgtggtcccccctgcaccttctggccctgctttgagctctgctgtcttgattcctttggcctcacaaacgattttgttgtgaagctgaaggttcagggtgtgaattcccagtgccactcatctcccatctccagtaaatgtgaaagcagaagacgttttccctgagaagacatagaaagaaaatcaactttcactaaggcatctcagaaacataggctaaggtaatatgtgtaccagtagagaagcctgaggaatttacaaaatgatgcagctccaagccattgtatggcccatgtgggagactgatgggacatggagaatgacagtagattatcaggaaataaataaagtggtttttccaatgtacacacctgtaccc

SEQ ID NO: 14152 - DNA, 898 bp, Homo sapiens
  source 1..898: mol_type = unassigned DNA
tttgggtttggacgggtgcgtttgtttctcatagtgcaggtctggagccggactgagatggggagtagagggaccccttgaaacttcagggtggatgaatatgaagtttcatcaccagctgtgatgtttgatattggactgtggttgtgccagttgacactcaggagtggagactagatctgcaatctgttgggactgtgatgaggggatcatcctgccctcgaaccagacccagccctgtagcccaggcactattgcctggagttcctgggctctcagcgccaggaaatcatgaggttcagtgtctcaggcatgaggaccgactaccccaggagtgtgctggctcctgcttatgtgtcagtctgtctcctcctcttgtgtccaagggaagtcatcgctcccgctggctcagaaccatggctgtgccagccggcacccaggtgtggagacaagatctacaaccccttggagcagtgctgttacaatgacgccatcgtgtccctgagcgagacccgccaatgtggtcccccctgcaccttctggccctgctttgagctctgctgtcttgattcctttggcctcacaaacgattttgttgtgaagctgaaggttcagggtgtgaattcccagtgccactcatctcccatctccagtaaatgtgaaagcagaagacgttttccctgagaagacatagaaagaaaatcaactttcactaaggcatctcagaaacataggctaaggtaatatgtgtaccagtagagaagcctgaggaatttacaaaatgatgcagctccaagccattgtatggcccatgtgggagactgatgggacatggagaatgacagtagattatcaggaaataaataaagtggtttttccaatgtacacacctgtaccc

SEQ ID NO: 14153 - DNA, 662 bp, Homo sapiens
  source 1..662: mol_type = unassigned DNA
attctcctagagcatctttggaagcatgaggccacgatgctgcatcttggctcttgtctgctggataacagtcttcctcctccagtgttcaaaaggaactacagacgctcctgttggctcaggactgtggctgtgccagccgacacccaggtgtgggaacaagatctacaacccttcagagcagtgctgttatgatgatgccatcttatccttaaaggagacccgccgctgtggctccacctgcaccttctggccctgctttgagctctgctgtcccgagtcttttggcccccagcagaagtttcttgtgaagttgagggttctgggtatgaagtctcagtgtcacttatctcccatctcccggagctgtaccaggaacaggaggcacgtcctgtacccataaaaaccccaggctccactggcagacggcagacaaggggagaagagacgaagcagctggacatcggagactacagttgaacttcggagagaagcaacttgacttcagagggatggctcaatgacatagctttggagaggagcccagctggggatggccagacttcaggggaagaatgccttcctgcttcatcccctttccagctccccttcccgctgagagccactttcatcggcaataaaatcccccacatttaccatct

SEQ ID NO: 14154 - DNA, 573 bp, Homo sapiens
  source 1..573: mol_type = unassigned DNA
tcactgacccatttccactgctgctccctcgtccgctgctctgaagcctaacccatggtgcccagaatttctgctgccatcttcatttttgaacttttgggttcaaactcagaaggagtcacagatcttagactgtggctatgccagccagcgcccaggtgcggggagtggacctacaaccccttggagcagtgctgtgatgacggtgtcatcctagacttgaaccagacccggctctgcggctccagctgcaccttctggccctgcttccagcactgctgcctggagtctttgggctctcagaaccagacagttgtgaggttcaaggtcccaggcatgaagccagattgcaagtcctcccctatcaccaggatctgtgcccaggaataccacccaaaaagccctgtgtcaagatctgacctcatctagactgttctggggtagcagagtcacagatcactctagaatctaatacttggtaattatactgcattgattttgttgttgttgtgacagagtttcactctgtcccccaggctggagtgcaaataagcaacttcagcaaagtctcag

SEQ ID NO: 14155 - DNA, 1194 bp, Homo sapiens
  source 1..1194: mol_type = unassigned DNA
cacaacttcagctgaggaacttggcacggccagcttgggacccaggaccctaacgcagaggcgctgtgtttggaagtcccgctatcacggccccccagatggggcctggacgatgcctcctgacggccttgttgcttctggccctggcgccaccgccggaagcctcccagtactgcggccgccttgaatactggaacccagacaacaagtgctgcagcagctgcctgcaacgcttcgggccgcccccctgcccggactatgagttccgggaaaactgcggactcaatgaccacggcgatttcgtaacgcccccgttccgaaagtgttcttctgggcagtgcaaccccgacggcgcggagctatgtagcccctgcggcggcggagccgtgacccctactcccgccgcgggcgggggcagaaccccgtggcgctgcagagagaggccggtccctgccaaggggcactgccccctcacacctggaaacccaggcgcccctagctcccaggagcgcagctcaccagcaagttccattgcctggaggacccctgagcctgtccctcagcaggcctggccgaatttccttccgctcgtggtgctggtcctgctcctgaccttggcggtgatagcgatcctcctgtttattctgctctggcatctctgctggcccaaggagaaagccgacccctatccctatcctggcttggtctgcggagtccccaacacccacaccccttcctcctcgcatctgtcctccccaggcgccctggagacaggggacacatggaaggaggcctcactacttccactcctgagcagggaactgtccagtctggcgtcacaacccctgtctcgcctcctggatgagctggaggtgctggaagagctgattgtactgctggaccctgagcctgggccaggtgggggtatggcccatggcactactcgacacctggccgcaagatatgggctgcctgctgcctggtccacctttgcctattcgctgaggccgagtcgctcgccgctgcgggctctgattgagatggtggtggcaagggagccctctgcctccctgggccagcttggcacacacctcgcccagctagggcgggcagatgcattgcgggtgctgtccaagcttggctcatctggggtttgctgggcttaacacccaataaagaactttgctgactact

SEQ ID NO: 14156 - DNA, 630 bp, Homo sapiens
  source 1..630: mol_type = unassigned DNA
cacaacttcagctgaggaacttggcacggccagcttgggacccaggaccctaacgcagaggcgctgtgtttggaagtcccgctatcacggccccccagatggggcctggacgatgcctcctgacggccttgttgcttctggccctggcgccaccgccggaagcctcccagtactgcggccgccttgaatactggaacccagacaacaagtgctgcagcagctgcctgcaacgcttcgggccgcccccctgcccggaactgtccagtctggcgtcacaacccctgtctcgcctcctggatgagctggaggtgctggaagagctgattgtactgctggaccctgagcctgggccaggtgggggtatggcccatggcactactcgacacctggccgcaagatatgggctgcctgctgcctggtccacctttgcctattcgctgaggccgagtcgctcgccgctgcgggctctgattgagatggtggtggcaagggagccctctgcctccctgggccagcttggcacacacctcgcccagctagggcgggcagatgcattgcgggtgctgtccaagcttggctcatctggggtttgctgggcttaacacccaataaagaactttgctgactact

SEQ ID NO: 14157 - DNA, 1857 bp, Homo sapiens
  source 1..1857: mol_type = unassigned DNA
cgattgttggtgacagcgaaagaacgataacaaaatgccggagcgagatagtgagccgttctccaaccctttggcccccgatggccacgatgtggatgatcctcactccttccaccaatcaaaactcaccaatgaagacttcaggaaacttctcatgacccccagggctgcacctacctctgcaccaccttctaagtcacgtcaccatgagatgccaagggagtacaatgaggatgaagacccagctgcacgaaggaggaaaaagaaaagttattatgccaagctacgccaacaagaaattgagagagagagagagctagcagagaagtaccgggatcgtgccaaggaacggagagatggagtgaacaaagattatgaagaaaccgagcttatcagcaccacagctaactatagggctgttggccccactgctgaggcggacaaatcagctgcagagaagagaagacagttgatccaggagtccaaattcttgggtggtgacatggaacacacccatttggtgaaaggcttggattttgctctgcttcaaaaggtacgagctgagattgccagcaaagagaaagaggaagaggaactgatggaaaagccccagaaagaaaccaagaaagatgaggatcctgaaaataaaattgaatttaaaacacgtctgggccgcaatgtttaccgaatgctttttaagagcaaagcatatgagcggaatgagttgttcctgccgggccgcatggccatgtggtagacctggatgatgagtatgctgacacagatatccccaccactcttatccgcagcaaggctgattgccccaccatggaggcccagaccacactgaccacaaatgacattgtcattagcaagctgacccagatcctttcatacctgaggcagggaacccgtaacaagaagcttaagaagaaggataaagggaagctggaagagaagaaacctcctgaggctgacatgaatatttttgaagacattggggattacgtaccctccacaaccaagacacctcgggacaaggagcgggagagatatcgggaacgggagcgtgatcgggaaagagacagagaccgtgaccgagagcgagagcgagaacgagatcgggaacgagagcgagagcgggaccgagagagagaagaggaaaagaagagacacagctactttgagaagccaaaagtagatgatgagcccatggacgttgacaaaggacctgggtctaccaaggagttgatcaagtccatcaatgaaaagtttgctgggtctgctggctgggaaggcacagaatcgctgaagaagccagaagacaaaaagcagctgggagatttctttggcatgtccaacagttatgcagagtgctacccagccacgatggatgacatggctgtggatagtgatgaggaggtggattatagcaaaatggaccagggtaacaagaaggggcccttaggccgttgggactttgatacccaggaagaatacagcgagtatatgaacaacaaagaagctttgcccaaggctgcattccagtatggtatcaaaatgtctgaagggcggaaaaccaggcgcttcaaggaaaccaatgacaaagcagagcttgatcgccagtggaagaagattagtgcaatcattgagaagaggaagaagatggaagctgatggggttgaagtcaaaagaccaaaatactaatcactagttacaaccagagatgctccacaaggatatgctccccactgttttctttctacaatttccaaaggttgcaagatgtttttttgtggatgaatataaaattttattgtgtaattacttggttccattaaaattggttaacttgct

SEQ ID NO: 14158 - DNA, 1962 bp, Homo sapiens
  source 1..1962: mol_type = unassigned DNA
gggaaaaacaggaagcggaaaggctgcgaacgcaaagcagtgtgggttgattctgaggtgcactgtgggaaagagcttgtcgctgcggtgttgctgttggagactcgattgttggtgacagcgaaagaacgataacaaaatgccggagcgagatagtgagccgttctccaaccctttggcccccgatggccacgatgtggatgatcctcactccttccaccaatcaaaactcaccaatgaagacttcaggaaacttctcatgacccccagggctgcacctacctctgcaccaccttctaagtcacgtcaccatgagatgccaagggagtacaatgaggatgaagacccagctgcacgaaggaggaaaaagaaaagttattatgccaagctacgccaacaagaaattgagagagagagagagctagcagagaagtaccgggatcgtgccaaggaacggagagatggagtgaacaaagattatgaagaaaccgagcttatcagcaccacagctaactatagggctgttggccccactgctgaggcggacaaatcagctgcagagaagagaagacagttgatccaggagtccaaattcttgggtggtgacatggaacacacccatttggtgaaaggcttggattttgctctgcttcaaaaggtacgagctgagattgccagcaaagagaaagaggaagaggaactgatggaaaagccccagaaagaaaccaagaaagatgaggatcctgaaaataaaattgaatttaaaacacgtctgggccgcaatgtttaccgaatgctttttaagagcaaagcatatgagcggaatgagttgttcctgccgggccgcatggcctatgtggtagacctggatgatgagtatgctgacacagatatccccaccactcttatccgcagcaaggctgattgccccaccatggaggcccagaccacactgaccacaaatgacattgtcattagcaagctgacccagatcctttcatacctgaggcagggaacccgtaacaagaagcttaagaagaaggataaagggaagctggaagagaagaaacctcctgaggctgacatgaatatttttgaagacattggggattacgtaccctccacaaccaagacacctcgggacaaggagcgggagagatatcgggaacgggagcgtgatcgggaaagagacagagaccgtgaccgagagcgagagcgagaacgagatcgggaacgagagcgagagcgggaccgagagagagaagaggaaaagaagagacacagctactttgagaagccaaaagtagatgatgagcccatggacgttgacaaaggacctgggtctaccaaggagttgatcaagtccatcaatgaaaagtttgctgggtctgctggctgggaaggcacagaatcgctgaagaagccagaagacaaaaagcagctgggagatttctttggcatgtccaacagttatgcagagtgctacccagccacgatggatgacatggctgtggatagtgatgaggaggtggattatagcaaaatggaccagggtaacaagaaggggcccttaggccgttgggactttgatacccaggaagaatacagcgagtatatgaacaacaaagaagctttgcccaaggctgcattccagtatggtatcaaaatgtctgaagggcggaaaaccaggcgcttcaaggaaaccaatgacaaagcagagcttgatcgccagtggaagaagattagtgcaatcattgagaagaggaagaagatggaagctgatggggttgaagtcaaaagaccaaaatactaatcactagttacaaccagagatgctccacaaggatatgctccccactgttttctttctacaatttccaaaggttgcaagatgtttttttgtggatgaatataaaattttattgtgtaattacttggttccattaaaattggttaacttgc

SEQ ID NO: 14159 - DNA, 6189 bp, Homo sapiens
  source 1..6189: mol_type = unassigned DNA
cgcggcgcatcccagcctgggcgggacgctcggccgcggcgaggcgggcaagcctggcagggcagagggagccccggctccgaggttgctcttcgcacccgaggatcagtcttggccccaaagcgcgacgcacaaatccacataacctgaggaccatggatgctgatgagggtcaagacatgtcccaagtttcagggaaggaaagcccccctgtaagcgatactccagatgagggcgatgagcccatgccgatccccgaggacctctccaccacctcgggaggacagcaaagctccaagagtgacagagtcgtggccagtaatgttaaagtagagactcagagtgatgaagagaatgggcgtgcctgtgaaatgaatggggaagaatgtgcggaggatttacgaatgcttgatgcctcgggagagaaaatgaatggctcccacagggaccaaggcagctcggctttgtcgggagttggaggcattcgacttcctaacggaaaactaaagtgtgatatctgtgggatcatttgcatcgggcccaatgtgctcatggttcacaaaagaagccacactggagaacggcccttccagtgcaatcagtgcggggcctcattcacccagaagggcaacctgctccggcacatcaagctgcattccggggagaagcccttcaaatgccacctctgcaactacgcctgccgccggagggacgccctcactggccacctgaggacgcactccgttggtaaacctcacaaatgtggatattgtggccgaagctataaacagcgaagctctttagaggaacataaagagcgctgccacaactacttggaaagcatgggccttccgggcacactgtacccagtcattaaagaagaaactaatcacagtgaaatggcagaagacctgtgcaagataggatcagagagatctctcgtgctggacagactagcaagtaacgtcgccaaacgtaagagctctatgcctcagaaatttcttggggacaagggcctgtccgacacgccctacgacagcagcgccagctacgagaaggagaacgaaatgatgaagtcccacgtgatggaccaagccatcaacaacgccatcaactacctgggggccgagtccctgcgcccgctggtgcagacgcccccgggcggttccgaggtggtcccggtcatcagcccgatgtaccagctgcacaagccgctcgcggagggcaccccgcgctccaaccactcggcccaggacagcgccgtggagaacctgctgctgctctccaaggccaagttggtgccctcggagcgcgaggcgtccccgagcaacagctgccaagactccacggacaccgagagcaacaacgaggagcagcgcagcggtctcatctacctgaccaaccacatcgccccgcacgcgcgcaacgggctgtcgctcaaggaggagcaccgcgcctacgacctgctgcgcgccgcctccgagaactcgcaggacgcgctccgcgtggtcagcaccagcggggagcagatgaaggtgtacaagtgcgaacactgccgggtgctcttcctggatcacgtcatgtacaccatccacatgggctgccacggcttccgtgatccttttgagtgcaacatgtgcggctaccacagccaggaccggtacgagttctcgtcgcacataacgcgaggggagcaccgcttccacatgagctaaagccctcccgcgcccccaccccagaccccgagccaccccaggaaaagcacaaggactgccgccttctcgctcccgccagcagcatagactggactggaccagacaatgttgtgtttggatttgtaactgttttttgttttttgtttgagttggttgattggggtttgatttgcttttgaaaagatttttatttttagaggcagggctgcattgggagcatccagaactgctaccttcctagatgtttccccagaccgctggctgagattccctcacctgtcgcttcctagaatccccttctccaaacgattagtctaaattttcagagagaaatagataaaacacgccacagcctgggaaggagcgtgctctaccctgtgctaagcacggggttcgcgcaccaggtgtctttttccagtccccagaagcagagagcacagcccctgctgtgtgggtctgcaggtgagcagacaggacaggtgtgccgccacccaagtgccaagacacagcagggccaacaacctgtgcccaggccagcttcgagctacatgcatctagggcggagaggctgcacttgtgagagaaaatactatttcaagtcatattctgcgtaggaaaatgaattggttggggaaagtcgtgtctgtcagactgccctgggtggagggagacgccgggctagagcctttgggatcgtcctggattcactggctttgcggaggctgctcagatggcctgagcctcccgaggcttgctgccccgtaggaggagactgtcttcccgtgggcatatctggggagccctgttccccgctttttcactcccatacctttaatggcccccaaaatctgtcactacaatttaaacaccagtcccgaaatttggatcttctttctttttgaatctctcaaacggcaacattcctcagaaaccaaagctttatttcaaatctcttccttccctggctggttccatctagtaccagaggcctcttttcctgaagaaatccaatcctagccctcattttaattatgtacatctgtttgtagccacaagcctgaatttctcagtgttggtaagtttctttacctaccctcactatatattattctcgttttaaaacccataaaggagtgatttagaacagtcattaattttcaactcaatgaaatatgtgaagcccagcatctctgttgctaacacacagagctcacctgtttgaaaccaagctttcaaacatgttgaagctctttactgtaaaggcaagccagcatgtgtgtccacacatacataggatggctggctctgcacctgtaggatattggaatgcacagggcaattgagggactgagccagaccttcggagagtaatgccaccagatcccctaggaaagaggaggcaaatggcactgcaggtgagaaccccgcccatccgtgctatgacatggaggcactgaagcccgaggaaggtgtgtggagattctaatcccaacaagcaagggtctccttcaagattaatgctatcaatcattaaggtcattactctcaaccacctaggcaatgaagaatataccatttcaaatatttacagtacttgtcttcaccaacactgtcccaaggtgaaatgaagcaacagagaggaaattgtacataagtacctcagcatttaatccaaacaggggttcttagtctcagcactatgacattttgggctgactacttatttgttaggcgggagctctcctgtgcattgtaggataattagcagtatccctggtggctacccaatagacgccagtagcaccccgaattgacaacccaaactctccagacatcaccaactgtcccctgcgaggagaaatcactcctgggggagaaccactgacccaaatgaattctaaaccaatcaaatgtctgggaagccctccaagaaaaaaaatagaaaagcacttgaagaatattcccaatattcccggtcagcagtatcaaggctgacttgtgttcatgtggagtcattataaattctataaatcaattattccccttcggtcttaaaaatatatttcctcataaacatttgagttttgttgaaaagatggagtttacaaagataccattcttgagtcatggatttctctgctcacagaagggtgtggcatttggaaacgggaataaacaaaattgctgcaccaatgcactgagtgaaggaagagagacagaggatcaagggctttagacagcactccttcaatatgcaatcacagagaaagatgcgccttatccaagttaatatctctaaggtgagagccttcttagagtcagtttgttgcaaatttcacctactctgttcttttccatccatccccctgagtcagttggttgaagggagttattttttcaagtggaattcaaacaaagctcaaaccagaactgtaaatagtgattgcaggaattcttttctaaactgctttgccctttcctctcactgccttttatagccaatataaatgtctctttgcacaccttttgttgtggttttatattgtaacaccatttttctttgaaactattgtatttaaagtaaggtttcatattatgtcagcaagtaattaacttatgtttaaaaggtggccatatcatgtaccaaaagttgctgaagtttctcttctagctggtaaagtaggagtttgcatgacttcacactttttttgcgtagtttcttctgttgtatgatggcgtgagtgtgtgtcttgggtaccgctgtgtactactgtgtgcctagattccatgcactctcgttgtgtttgaagtaaatattggagaccggagggtaacaggttggcctgttgattacagctagtaatcgctgtgtcttgttccgccccctccctgacaccccagcttcccaggatgtggaaagcctggatctcagctccttgccccatatcccttctgtaatttgtacctaaagagtgtgattatcctaattcaagagtcactaaaactcatcacattatcattgcatatcagcaaagggtaaagtcctagcaccaattgcttcacataccagcatgttccatttccaatttagaattagccacataataaaatcttagaatcttccttgagaaagagctgcctgagatgtagttttgttatatggttccccaccgaccatttttgtgcttttttcttgttttgttttgttttgactgcactgtgagttttgtagtgtcctcttcttgccaaaacaaacgcgagatgaactggacttatgtagacaaatcgtgatgccagtgtatccttcctttcttcagttccagcaataatgaatggtcaacttttttaaaatctagatctctctcattcatttcaatgtatttttactttaagatgaaccaaaattattagacttatttaagatgtacaggcatcagaaaaaagaagcacataatgcttttggtgcgatggcactcactgtgaacatgtgtaaccacatattaatatgcaatattgtttccaatactttctaatacagttttttataatgttgtgtgtggtgattgttcaggtcgaatctgttgtatccagtacagctttaggtcttcagctgcccttctggcgagtacatgcacaggattgtaaatgagaaatgcagtcatatttccagtctgcctctatgatgatgttaaattattgctgtttagctgtgaacaagggatgtaccactggaggaatagagtatccttttgtacacattttgaaatgcttcttctgtagtgatagaacaaataaatgcaacgaatactctgtctgccctatcccgtgaagtccacactggcgtaagagaaggcccagcagagcaggaatctgcctagactttctcccaatgagatcccaatatgagagggagaagagatgggcctcaggacagctgcaataccacttgggaacacatgtggtgtcttgatgtggccagcgcagcagttcagcacaacgtacctcccatctacaacagtgctggacgtgggaattctaagtcccagtcttgagggtgggtggagatggagggcaacaagagatacatttccagttctccactgcagcatgcttcagtcattctgtgagtggccgggcccagggccctcacaatttcactaccttgtcttttacatagtcataagaattatcctcaacatagccttttgacgctgtaaatcttgagtattcatttacccttttctgatctcctggaaacagctgcctgcctgcattgcacttctcttcccgaggagtggggtaaatttaaaagtcaagttatagtttggatgttagtatagaattttgaaattgggaattaaaaatcaggactggggactgggagaccaaaaatttctgatcccatttctgatggatgtgtcacaccttttctgtcaaaataaaatgtcttggaggttatgactccttggtgaaa

SEQ ID NO: 14160 - DNA, 5928 bp, Homo sapiens
  source 1..5928: mol_type = unassigned DNA
cgcggcgcatcccagcctgggcgggacgctcggccgcggcgaggcgggcaagcctggcagggcagagggagccccggctccgaggttgctcttcgcacccgaggatcagtcttggccccaaagcgcgacgcacaaatccacataacctgaggaccatggatgctgatgagggtcaagacatgtcccaagtttcagggaaggaaagcccccctgtaagcgatactccagatgagggcgatgagcccatgccgatccccgaggacctctccaccacctcgggaggacagcaaagctccaagagtgacagagtcgtgggagaacggcccttccagtgcaatcagtgcggggcctcattcacccagaagggcaacctgctccggcacatcaagctgcattccggggagaagcccttcaaatgccacctctgcaactacgcctgccgccggagggacgccctcactggccacctgaggacgcactccgttggtaaacctcacaaatgtggatattgtggccgaagctataaacagcgaagctctttagaggaacataaagagcgctgccacaactacttggaaagcatgggccttccgggcacactgtacccagtcattaaagaagaaactaatcacagtgaaatggcagaagacctgtgcaagataggatcagagagatctctcgtgctggacagactagcaagtaacgtcgccaaacgtaagagctctatgcctcagaaatttcttggggacaagggcctgtccgacacgccctacgacagcagcgccagctacgagaaggagaacgaaatgatgaagtcccacgtgatggaccaagccatcaacaacgccatcaactacctgggggccgagtccctgcgcccgctggtgcagacgcccccgggcggttccgaggtggtcccggtcatcagcccgatgtaccagctgcacaagccgctcgcggagggcaccccgcgctccaaccactcggcccaggacagcgccgtggagaacctgctgctgctctccaaggccaagttggtgccctcggagcgcgaggcgtccccgagcaacagctgccaagactccacggacaccgagagcaacaacgaggagcagcgcagcggtctcatctacctgaccaaccacatcgccccgcacgcgcgcaacgggctgtcgctcaaggaggagcaccgcgcctacgacctgctgcgcgccgcctccgagaactcgcaggacgcgctccgcgtggtcagcaccagcggggagcagatgaaggtgtacaagtgcgaacactgccgggtgctcttcctggatcacgtcatgtacaccatccacatgggctgccacggcttccgtgatccttttgagtgcaacatgtgcggctaccacagccaggaccggtacgagttctcgtcgcacataacgcgaggggagcaccgcttccacatgagctaaagccctcccgcgcccccaccccagaccccgagccaccccaggaaaagcacaaggactgccgccttctcgctcccgccagcagcatagactggactggaccagacaatgttgtgtttggatttgtaactgttttttgttttttgtttgagttggttgattggggtttgatttgcttttgaaaagatttttatttttagaggcagggctgcattgggagcatccagaactgctaccttcctagatgtttccccagaccgctggctgagattccctcacctgtcgcttcctagaatccccttctccaaacgattagtctaaattttcagagagaaatagataaaacacgccacagcctgggaaggagcgtgctctaccctgtgctaagcacggggttcgcgcaccaggtgtctttttccagtccccagaagcagagagcacagcccctgctgtgtgggtctgcaggtgagcagacaggacaggtgtgccgccacccaagtgccaagacacagcagggccaacaacctgtgcccaggccagcttcgagctacatgcatctagggcggagaggctgcacttgtgagagaaaatactatttcaagtcatattctgcgtaggaaaatgaattggttggggaaagtcgtgtctgtcagactgccctgggtggagggagacgccgggctagagcctttgggatcgtcctggattcactggctttgcggaggctgctcagatggcctgagcctcccgaggcttgctgccccgtaggaggagactgtcttcccgtgggcatatctggggagccctgttccccgctttttcactcccatacctttaatggcccccaaaatctgtcactacaatttaaacaccagtcccgaaatttggatcttctttctttttgaatctctcaaacggcaacattcctcagaaaccaaagctttatttcaaatctcttccttccctggctggttccatctagtaccagaggcctcttttcctgaagaaatccaatcctagccctcattttaattatgtacatctgtttgtagccacaagcctgaatttctcagtgttggtaagtttctttacctaccctcactatatattattctcgttttaaaacccataaaggagtgatttagaacagtcattaattttcaactcaatgaaatatgtgaagcccagcatctctgttgctaacacacagagctcacctgtttgaaaccaagctttcaaacatgttgaagctctttactgtaaaggcaagccagcatgtgtgtccacacatacataggatggctggctctgcacctgtaggatattggaatgcacagggcaattgagggactgagccagaccttcggagagtaatgccaccagatcccctaggaaagaggaggcaaatggcactgcaggtgagaaccccgcccatccgtgctatgacatggaggcactgaagcccgaggaaggtgtgtggagattctaatcccaacaagcaagggtctccttcaagattaatgctatcaatcattaaggtcattactctcaaccacctaggcaatgaagaatataccatttcaaatatttacagtacttgtcttcaccaacactgtcccaaggtgaaatgaagcaacagagaggaaattgtacataagtacctcagcatttaatccaaacaggggttcttagtctcagcactatgacattttgggctgactacttatttgttaggcgggagctctcctgtgcattgtaggataattagcagtatccctggtggctacccaatagacgccagtagcaccccgaattgacaacccaaactctccagacatcaccaactgtcccctgcgaggagaaatcactcctgggggagaaccactgacccaaatgaattctaaaccaatcaaatgtctgggaagccctccaagaaaaaaaatagaaaagcacttgaagaatattcccaatattcccggtcagcagtatcaaggctgacttgtgttcatgtggagtcattataaattctataaatcaattattccccttcggtcttaaaaatatatttcctcataaacatttgagttttgttgaaaagatggagtttacaaagataccattcttgagtcatggatttctctgctcacagaagggtgtggcatttggaaacgggaataaacaaaattgctgcaccaatgcactgagtgaaggaagagagacagaggatcaagggctttagacagcactccttcaatatgcaatcacagagaaagatgcgccttatccaagttaatatctctaaggtgagagccttcttagagtcagtttgttgcaaatttcacctactctgttcttttccatccatccccctgagtcagttggttgaagggagttattttttcaagtggaattcaaacaaagctcaaaccagaactgtaaatagtgattgcaggaattcttttctaaactgctttgccctttcctctcactgccttttatagccaatataaatgtctctttgcacaccttttgttgtggttttatattgtaacaccatttttctttgaaactattgtatttaaagtaaggtttcatattatgtcagcaagtaattaacttatgtttaaaaggtggccatatcatgtaccaaaagttgctgaagtttctcttctagctggtaaagtaggagtttgcatgacttcacactttttttgcgtagtttcttctgttgtatgatggcgtgagtgtgtgtcttgggtaccgctgtgtactactgtgtgcctagattccatgcactctcgttgtgtttgaagtaaatattggagaccggagggtaacaggttggcctgttgattacagctagtaatcgctgtgtcttgttccgccccctccctgacaccccagcttcccaggatgtggaaagcctggatctcagctccttgccccatatcccttctgtaatttgtacctaaagagtgtgattatcctaattcaagagtcactaaaactcatcacattatcattgcatatcagcaaagggtaaagtcctagcaccaattgcttcacataccagcatgttccatttccaatttagaattagccacataataaaatcttagaatcttccttgagaaagagctgcctgagatgtagttttgttatatggttccccaccgaccatttttgtgcttttttcttgttttgttttgttttgactgcactgtgagttttgtagtgtcctcttcttgccaaaacaaacgcgagatgaactggacttatgtagacaaatcgtgatgccagtgtatccttcctttcttcagttccagcaataatgaatggtcaacttttttaaaatctagatctctctcattcatttcaatgtatttttactttaagatgaaccaaaattattagacttatttaagatgtacaggcatcagaaaaaagaagcacataatgcttttggtgcgatggcactcactgtgaacatgtgtaaccacatattaatatgcaatattgtttccaatactttctaatacagttttttataatgttgtgtgtggtgattgttcaggtcgaatctgttgtatccagtacagctttaggtcttcagctgcccttctggcgagtacatgcacaggattgtaaatgagaaatgcagtcatatttccagtctgcctctatgatgatgttaaattattgctgtttagctgtgaacaagggatgtaccactggaggaatagagtatccttttgtacacattttgaaatgcttcttctgtagtgatagaacaaataaatgcaacgaatactctgtctgccctatcccgtgaagtccacactggcgtaagagaaggcccagcagagcaggaatctgcctagactttctcccaatgagatcccaatatgagagggagaagagatgggcctcaggacagctgcaataccacttgggaacacatgtggtgtcttgatgtggccagcgcagcagttcagcacaacgtacctcccatctacaacagtgctggacgtgggaattctaagtcccagtcttgagggtgggtggagatggagggcaacaagagatacatttccagttctccactgcagcatgcttcagtcattctgtgagtggccgggcccagggccctcacaatttcactaccttgtcttttacatagtcataagaattatcctcaacatagccttttgacgctgtaaatcttgagtattcatttacccttttctgatctcctggaaacagctgcctgcctgcattgcacttctcttcccgaggagtggggtaaatttaaaagtcaagttatagtttggatgttagtatagaattttgaaattgggaattaaaaatcaggactggggactgggagaccaaaaatttctgatcccatttctgatggatgtgtcacaccttttctgtcaaaataaaatgtcttggaggttatgactccttggtgaaa

SEQ ID NO: 14161 - DNA, 5499 bp, Homo sapiens
  source 1..5499: mol_type = unassigned DNA
cgcggcgcatcccagcctgggcgggacgctcggccgcggcgaggcgggcaagcctggcagggcagagggagccccggctccgaggttgctcttcgcacccgaggatcagtcttggccccaaagcgcgacgcacaaatccacataacctgaggaccatggatgctgatgagggtcaagacatgtcccaagtttcagggaaggaaagcccccctgtaagcgatactccagatgagggcgatgagcccatgccgatccccgaggacctctccaccacctcgggaggacagcaaagctccaagagtgacagagtcgtgggggacaagggcctgtccgacacgccctacgacagcagcgccagctacgagaaggagaacgaaatgatgaagtcccacgtgatggaccaagccatcaacaacgccatcaactacctgggggccgagtccctgcgcccgctggtgcagacgcccccgggcggttccgaggtggtcccggtcatcagcccgatgtaccagctgcacaagccgctcgcggagggcaccccgcgctccaaccactcggcccaggacagcgccgtggagaacctgctgctgctctccaaggccaagttggtgccctcggagcgcgaggcgtccccgagcaacagctgccaagactccacggacaccgagagcaacaacgaggagcagcgcagcggtctcatctacctgaccaaccacatcgccccgcacgcgcgcaacgggctgtcgctcaaggaggagcaccgcgcctacgacctgctgcgcgccgcctccgagaactcgcaggacgcgctccgcgtggtcagcaccagcggggagcagatgaaggtgtacaagtgcgaacactgccgggtgctcttcctggatcacgtcatgtacaccatccacatgggctgccacggcttccgtgatccttttgagtgcaacatgtgcggctaccacagccaggaccggtacgagttctcgtcgcacataacgcgaggggagcaccgcttccacatgagctaaagccctcccgcgcccccaccccagaccccgagccaccccaggaaaagcacaaggactgccgccttctcgctcccgccagcagcatagactggactggaccagacaatgttgtgtttggatttgtaactgttttttgttttttgtttgagttggttgattggggtttgatttgcttttgaaaagatttttatttttagaggcagggctgcattgggagcatccagaactgctaccttcctagatgtttccccagaccgctggctgagattccctcacctgtcgcttcctagaatccccttctccaaacgattagtctaaattttcagagagaaatagataaaacacgccacagcctgggaaggagcgtgctctaccctgtgctaagcacggggttcgcgcaccaggtgtctttttccagtccccagaagcagagagcacagcccctgctgtgtgggtctgcaggtgagcagacaggacaggtgtgccgccacccaagtgccaagacacagcagggccaacaacctgtgcccaggccagcttcgagctacatgcatctagggcggagaggctgcacttgtgagagaaaatactatttcaagtcatattctgcgtaggaaaatgaattggttggggaaagtcgtgtctgtcagactgccctgggtggagggagacgccgggctagagcctttgggatcgtcctggattcactggctttgcggaggctgctcagatggcctgagcctcccgaggcttgctgccccgtaggaggagactgtcttcccgtgggcatatctggggagccctgttccccgctttttcactcccatacctttaatggcccccaaaatctgtcactacaatttaaacaccagtcccgaaatttggatcttctttctttttgaatctctcaaacggcaacattcctcagaaaccaaagctttatttcaaatctcttccttccctggctggttccatctagtaccagaggcctcttttcctgaagaaatccaatcctagccctcattttaattatgtacatctgtttgtagccacaagcctgaatttctcagtgttggtaagtttctttacctaccctcactatatattattctcgttttaaaacccataaaggagtgatttagaacagtcattaattttcaactcaatgaaatatgtgaagcccagcatctctgttgctaacacacagagctcacctgtttgaaaccaagctttcaaacatgttgaagctctttactgtaaaggcaagccagcatgtgtgtccacacatacataggatggctggctctgcacctgtaggatattggaatgcacagggcaattgagggactgagccagaccttcggagagtaatgccaccagatcccctaggaaagaggaggcaaatggcactgcaggtgagaaccccgcccatccgtgctatgacatggaggcactgaagcccgaggaaggtgtgtggagattctaatcccaacaagcaagggtctccttcaagattaatgctatcaatcattaaggtcattactctcaaccacctaggcaatgaagaatataccatttcaaatatttacagtacttgtcttcaccaacactgtcccaaggtgaaatgaagcaacagagaggaaattgtacataagtacctcagcatttaatccaaacaggggttcttagtctcagcactatgacattttgggctgactacttatttgttaggcgggagctctcctgtgcattgtaggataattagcagtatccctggtggctacccaatagacgccagtagcaccccgaattgacaacccaaactctccagacatcaccaactgtcccctgcgaggagaaatcactcctgggggagaaccactgacccaaatgaattctaaaccaatcaaatgtctgggaagccctccaagaaaaaaaatagaaaagcacttgaagaatattcccaatattcccggtcagcagtatcaaggctgacttgtgttcatgtggagtcattataaattctataaatcaattattccccttcggtcttaaaaatatatttcctcataaacatttgagttttgttgaaaagatggagtttacaaagataccattcttgagtcatggatttctctgctcacagaagggtgtggcatttggaaacgggaataaacaaaattgctgcaccaatgcactgagtgaaggaagagagacagaggatcaagggctttagacagcactccttcaatatgcaatcacagagaaagatgcgccttatccaagttaatatctctaaggtgagagccttcttagagtcagtttgttgcaaatttcacctactctgttcttttccatccatccccctgagtcagttggttgaagggagttattttttcaagtggaattcaaacaaagctcaaaccagaactgtaaatagtgattgcaggaattcttttctaaactgctttgccctttcctctcactgccttttatagccaatataaatgtctctttgcacaccttttgttgtggttttatattgtaacaccatttttctttgaaactattgtatttaaagtaaggtttcatattatgtcagcaagtaattaacttatgtttaaaaggtggccatatcatgtaccaaaagttgctgaagtttctcttctagctggtaaagtaggagtttgcatgacttcacactttttttgcgtagtttcttctgttgtatgatggcgtgagtgtgtgtcttgggtaccgctgtgtactactgtgtgcctagattccatgcactctcgttgtgtttgaagtaaatattggagaccggagggtaacaggttggcctgttgattacagctagtaatcgctgtgtcttgttccgccccctccctgacaccccagcttcccaggatgtggaaagcctggatctcagctccttgccccatatcccttctgtaatttgtacctaaagagtgtgattatcctaattcaagagtcactaaaactcatcacattatcattgcatatcagcaaagggtaaagtcctagcaccaattgcttcacataccagcatgttccatttccaatttagaattagccacataataaaatcttagaatcttccttgagaaagagctgcctgagatgtagttttgttatatggttccccaccgaccatttttgtgcttttttcttgttttgttttgttttgactgcactgtgagttttgtagtgtcctcttcttgccaaaacaaacgcgagatgaactggacttatgtagacaaatcgtgatgccagtgtatccttcctttcttcagttccagcaataatgaatggtcaacttttttaaaatctagatctctctcattcatttcaatgtatttttactttaagatgaaccaaaattattagacttatttaagatgtacaggcatcagaaaaaagaagcacataatgcttttggtgcgatggcactcactgtgaacatgtgtaaccacatattaatatgcaatattgtttccaatactttctaatacagttttttataatgttgtgtgtggtgattgttcaggtcgaatctgttgtatccagtacagctttaggtcttcagctgcccttctggcgagtacatgcacaggattgtaaatgagaaatgcagtcatatttccagtctgcctctatgatgatgttaaattattgctgtttagctgtgaacaagggatgtaccactggaggaatagagtatccttttgtacacattttgaaatgcttcttctgtagtgatagaacaaataaatgcaacgaatactctgtctgccctatcccgtgaagtccacactggcgtaagagaaggcccagcagagcaggaatctgcctagactttctcccaatgagatcccaatatgagagggagaagagatgggcctcaggacagctgcaataccacttgggaacacatgtggtgtcttgatgtggccagcgcagcagttcagcacaacgtacctcccatctacaacagtgctggacgtgggaattctaagtcccagtcttgagggtgggtggagatggagggcaacaagagatacatttccagttctccactgcagcatgcttcagtcattctgtgagtggccgggcccagggccctcacaatttcactaccttgtcttttacatagtcataagaattatcctcaacatagccttttgacgctgtaaatcttgagtattcatttacccttttctgatctcctggaaacagctgcctgcctgcattgcacttctcttcccgaggagtggggtaaatttaaaagtcaagttatagtttggatgttagtatagaattttgaaattgggaattaaaaatcaggactggggactgggagaccaaaaatttctgatcccatttctgatggatgtgtcacaccttttctgtcaaaataaaatgtcttggaggttatgactccttggtgaaa

SEQ ID NO: 14162 - DNA, 5760 bp, Homo sapiens
  source 1..5760: mol_type = unassigned DNA
cgcggcgcatcccagcctgggcgggacgctcggccgcggcgaggcgggcaagcctggcagggcagagggagccccggctccgaggttgctcttcgcacccgaggatcagtcttggccccaaagcgcgacgcacaaatccacataacctgaggaccatggatgctgatgagggtcaagacatgtcccaagtttcagggaaggaaagcccccctgtaagcgatactccagatgagggcgatgagcccatgccgatccccgaggacctctccaccacctcgggaggacagcaaagctccaagagtgacagagtcgtggccagtaatgttaaagtagagactcagagtgatgaagagaatgggcgtgcctgtgaaatgaatggggaagaatgtgcggaggatttacgaatgcttgatgcctcgggagagaaaatgaatggctcccacagggaccaaggcagctcggctttgtcgggagttggaggcattcgacttcctaacggaaaactaaagtgtgatatctgtgggatcatttgcatcgggcccaatgtgctcatggttcacaaaagaagccacactggggacaagggcctgtccgacacgccctacgacagcagcgccagctacgagaaggagaacgaaatgatgaagtcccacgtgatggaccaagccatcaacaacgccatcaactacctgggggccgagtccctgcgcccgctggtgcagacgcccccgggcggttccgaggtggtcccggtcatcagcccgatgtaccagctgcacaagccgctcgcggagggcaccccgcgctccaaccactcggcccaggacagcgccgtggagaacctgctgctgctctccaaggccaagttggtgccctcggagcgcgaggcgtccccgagcaacagctgccaagactccacggacaccgagagcaacaacgaggagcagcgcagcggtctcatctacctgaccaaccacatcgccccgcacgcgcgcaacgggctgtcgctcaaggaggagcaccgcgcctacgacctgctgcgcgccgcctccgagaactcgcaggacgcgctccgcgtggtcagcaccagcggggagcagatgaaggtgtacaagtgcgaacactgccgggtgctcttcctggatcacgtcatgtacaccatccacatgggctgccacggcttccgtgatccttttgagtgcaacatgtgcggctaccacagccaggaccggtacgagttctcgtcgcacataacgcgaggggagcaccgcttccacatgagctaaagccctcccgcgcccccaccccagaccccgagccaccccaggaaaagcacaaggactgccgccttctcgctcccgccagcagcatagactggactggaccagacaatgttgtgtttggatttgtaactgttttttgttttttgtttgagttggttgattggggtttgatttgcttttgaaaagatttttatttttagaggcagggctgcattgggagcatccagaactgctaccttcctagatgtttccccagaccgctggctgagattccctcacctgtcgcttcctagaatccccttctccaaacgattagtctaaattttcagagagaaatagataaaacacgccacagcctgggaaggagcgtgctctaccctgtgctaagcacggggttcgcgcaccaggtgtctttttccagtccccagaagcagagagcacagcccctgctgtgtgggtctgcaggtgagcagacaggacaggtgtgccgccacccaagtgccaagacacagcagggccaacaacctgtgcccaggccagcttcgagctacatgcatctagggcggagaggctgcacttgtgagagaaaatactatttcaagtcatattctgcgtaggaaaatgaattggttggggaaagtcgtgtctgtcagactgccctgggtggagggagacgccgggctagagcctttgggatcgtcctggattcactggctttgcggaggctgctcagatggcctgagcctcccgaggcttgctgccccgtaggaggagactgtcttcccgtgggcatatctggggagccctgttccccgctttttcactcccatacctttaatggcccccaaaatctgtcactacaatttaaacaccagtcccgaaatttggatcttctttctttttgaatctctcaaacggcaacattcctcagaaaccaaagctttatttcaaatctcttccttccctggctggttccatctagtaccagaggcctcttttcctgaagaaatccaatcctagccctcattttaattatgtacatctgtttgtagccacaagcctgaatttctcagtgttggtaagtttctttacctaccctcactatatattattctcgttttaaaacccataaaggagtgatttagaacagtcattaattttcaactcaatgaaatatgtgaagcccagcatctctgttgctaacacacagagctcacctgtttgaaaccaagctttcaaacatgttgaagctctttactgtaaaggcaagccagcatgtgtgtccacacatacataggatggctggctctgcacctgtaggatattggaatgcacagggcaattgagggactgagccagaccttcggagagtaatgccaccagatcccctaggaaagaggaggcaaatggcactgcaggtgagaaccccgcccatccgtgctatgacatggaggcactgaagcccgaggaaggtgtgtggagattctaatcccaacaagcaagggtctccttcaagattaatgctatcaatcattaaggtcattactctcaaccacctaggcaatgaagaatataccatttcaaatatttacagtacttgtcttcaccaacactgtcccaaggtgaaatgaagcaacagagaggaaattgtacataagtacctcagcatttaatccaaacaggggttcttagtctcagcactatgacattttgggctgactacttatttgttaggcgggagctctcctgtgcattgtaggataattagcagtatccctggtggctacccaatagacgccagtagcaccccgaattgacaacccaaactctccagacatcaccaactgtcccctgcgaggagaaatcactcctgggggagaaccactgacccaaatgaattctaaaccaatcaaatgtctgggaagccctccaagaaaaaaaatagaaaagcacttgaagaatattcccaatattcccggtcagcagtatcaaggctgacttgtgttcatgtggagtcattataaattctataaatcaattattccccttcggtcttaaaaatatatttcctcataaacatttgagttttgttgaaaagatggagtttacaaagataccattcttgagtcatggatttctctgctcacagaagggtgtggcatttggaaacgggaataaacaaaattgctgcaccaatgcactgagtgaaggaagagagacagaggatcaagggctttagacagcactccttcaatatgcaatcacagagaaagatgcgccttatccaagttaatatctctaaggtgagagccttcttagagtcagtttgttgcaaatttcacctactctgttcttttccatccatccccctgagtcagttggttgaagggagttattttttcaagtggaattcaaacaaagctcaaaccagaactgtaaatagtgattgcaggaattcttttctaaactgctttgccctttcctctcactgccttttatagccaatataaatgtctctttgcacaccttttgttgtggttttatattgtaacaccatttttctttgaaactattgtatttaaagtaaggtttcatattatgtcagcaagtaattaacttatgtttaaaaggtggccatatcatgtaccaaaagttgctgaagtttctcttctagctggtaaagtaggagtttgcatgacttcacactttttttgcgtagtttcttctgttgtatgatggcgtgagtgtgtgtcttgggtaccgctgtgtactactgtgtgcctagattccatgcactctcgttgtgtttgaagtaaatattggagaccggagggtaacaggttggcctgttgattacagctagtaatcgctgtgtcttgttccgccccctccctgacaccccagcttcccaggatgtggaaagcctggatctcagctccttgccccatatcccttctgtaatttgtacctaaagagtgtgattatcctaattcaagagtcactaaaactcatcacattatcattgcatatcagcaaagggtaaagtcctagcaccaattgcttcacataccagcatgttccatttccaatttagaattagccacataataaaatcttagaatcttccttgagaaagagctgcctgagatgtagttttgttatatggttccccaccgaccatttttgtgcttttttcttgttttgttttgttttgactgcactgtgagttttgtagtgtcctcttcttgccaaaacaaacgcgagatgaactggacttatgtagacaaatcgtgatgccagtgtatccttcctttcttcagttccagcaataatgaatggtcaacttttttaaaatctagatctctctcattcatttcaatgtatttttactttaagatgaaccaaaattattagacttatttaagatgtacaggcatcagaaaaaagaagcacataatgcttttggtgcgatggcactcactgtgaacatgtgtaaccacatattaatatgcaatattgtttccaatactttctaatacagttttttataatgttgtgtgtggtgattgttcaggtcgaatctgttgtatccagtacagctttaggtcttcagctgcccttctggcgagtacatgcacaggattgtaaatgagaaatgcagtcatatttccagtctgcctctatgatgatgttaaattattgctgtttagctgtgaacaagggatgtaccactggaggaatagagtatccttttgtacacattttgaaatgcttcttctgtagtgatagaacaaataaatgcaacgaatactctgtctgccctatcccgtgaagtccacactggcgtaagagaaggcccagcagagcaggaatctgcctagactttctcccaatgagatcccaatatgagagggagaagagatgggcctcaggacagctgcaataccacttgggaacacatgtggtgtcttgatgtggccagcgcagcagttcagcacaacgtacctcccatctacaacagtgctggacgtgggaattctaagtcccagtcttgagggtgggtggagatggagggcaacaagagatacatttccagttctccactgcagcatgcttcagtcattctgtgagtggccgggcccagggccctcacaatttcactaccttgtcttttacatagtcataagaattatcctcaacatagccttttgacgctgtaaatcttgagtattcatttacccttttctgatctcctggaaacagctgcctgcctgcattgcacttctcttcccgaggagtggggtaaatttaaaagtcaagttatagtttggatgttagtatagaattttgaaattgggaattaaaaatcaggactggggactgggagaccaaaaatttctgatcccatttctgatggatgtgtcacaccttttctgtcaaaataaaatgtcttggaggttatgactccttggtgaaa

SEQ ID NO: 14163 - DNA, 5928 bp, Homo sapiens
  source 1..5928: mol_type = unassigned DNA
cgcggcgcatcccagcctgggcgggacgctcggccgcggcgaggcgggcaagcctggcagggcagagggagccccggctccgaggttgctcttcgcacccgaggatcagtcttggccccaaagcgcgacgcacaaatccacataacctgaggaccatggatgctgatgagggtcaagacatgtcccaagtttcagggaaggaaagcccccctgtaagcgatactccagatgagggcgatgagcccatgccgatccccgaggacctctccaccacctcgggaggacagcaaagctccaagagtgacagagtcgtggccagtaatgttaaagtagagactcagagtgatgaagagaatgggcgtgcctgtgaaatgaatggggaagaatgtgcggaggatttacgaatgcttgatgcctcgggagagaaaatgaatggctcccacagggaccaaggcagctcggctttgtcgggagttggaggcattcgacttcctaacggaaaactaaagtgtgatatctgtgggatcatttgcatcgggcccaatgtgctcatggttcacaaaagaagccacactggagaacggcccttccagtgcaatcagtgcggggcctcattcacccagaagggcaacctgctccggcacatcaagctgcattccggggagaagcccttcaaatgccacctctgcaactacgcctgccgccggagggacgccctcactggccacctgaggacgcactccggggacaagggcctgtccgacacgccctacgacagcagcgccagctacgagaaggagaacgaaatgatgaagtcccacgtgatggaccaagccatcaacaacgccatcaactacctgggggccgagtccctgcgcccgctggtgcagacgcccccgggcggttccgaggtggtcccggtcatcagcccgatgtaccagctgcacaagccgctcgcggagggcaccccgcgctccaaccactcggcccaggacagcgccgtggagaacctgctgctgctctccaaggccaagttggtgccctcggagcgcgaggcgtccccgagcaacagctgccaagactccacggacaccgagagcaacaacgaggagcagcgcagcggtctcatctacctgaccaaccacatcgccccgcacgcgcgcaacgggctgtcgctcaaggaggagcaccgcgcctacgacctgctgcgcgccgcctccgagaactcgcaggacgcgctccgcgtggtcagcaccagcggggagcagatgaaggtgtacaagtgcgaacactgccgggtgctcttcctggatcacgtcatgtacaccatccacatgggctgccacggcttccgtgatccttttgagtgcaacatgtgcggctaccacagccaggaccggtacgagttctcgtcgcacataacgcgaggggagcaccgcttccacatgagctaaagccctcccgcgcccccaccccagaccccgagccaccccaggaaaagcacaaggactgccgccttctcgctcccgccagcagcatagactggactggaccagacaatgttgtgtttggatttgtaactgttttttgttttttgtttgagttggttgattggggtttgatttgcttttgaaaagatttttatttttagaggcagggctgcattgggagcatccagaactgctaccttcctagatgtttccccagaccgctggctgagattccctcacctgtcgcttcctagaatccccttctccaaacgattagtctaaattttcagagagaaatagataaaacacgccacagcctgggaaggagcgtgctctaccctgtgctaagcacggggttcgcgcaccaggtgtctttttccagtccccagaagcagagagcacagcccctgctgtgtgggtctgcaggtgagcagacaggacaggtgtgccgccacccaagtgccaagacacagcagggccaacaacctgtgcccaggccagcttcgagctacatgcatctagggcggagaggctgcacttgtgagagaaaatactatttcaagtcatattctgcgtaggaaaatgaattggttggggaaagtcgtgtctgtcagactgccctgggtggagggagacgccgggctagagcctttgggatcgtcctggattcactggctttgcggaggctgctcagatggcctgagcctcccgaggcttgctgccccgtaggaggagactgtcttcccgtgggcatatctggggagccctgttccccgctttttcactcccatacctttaatggcccccaaaatctgtcactacaatttaaacaccagtcccgaaatttggatcttctttctttttgaatctctcaaacggcaacattcctcagaaaccaaagctttatttcaaatctcttccttccctggctggttccatctagtaccagaggcctcttttcctgaagaaatccaatcctagccctcattttaattatgtacatctgtttgtagccacaagcctgaatttctcagtgttggtaagtttctttacctaccctcactatatattattctcgttttaaaacccataaaggagtgatttagaacagtcattaattttcaactcaatgaaatatgtgaagcccagcatctctgttgctaacacacagagctcacctgtttgaaaccaagctttcaaacatgttgaagctctttactgtaaaggcaagccagcatgtgtgtccacacatacataggatggctggctctgcacctgtaggatattggaatgcacagggcaattgagggactgagccagaccttcggagagtaatgccaccagatcccctaggaaagaggaggcaaatggcactgcaggtgagaaccccgcccatccgtgctatgacatggaggcactgaagcccgaggaaggtgtgtggagattctaatcccaacaagcaagggtctccttcaagattaatgctatcaatcattaaggtcattactctcaaccacctaggcaatgaagaatataccatttcaaatatttacagtacttgtcttcaccaacactgtcccaaggtgaaatgaagcaacagagaggaaattgtacataagtacctcagcatttaatccaaacaggggttcttagtctcagcactatgacattttgggctgactacttatttgttaggcgggagctctcctgtgcattgtaggataattagcagtatccctggtggctacccaatagacgccagtagcaccccgaattgacaacccaaactctccagacatcaccaactgtcccctgcgaggagaaatcactcctgggggagaaccactgacccaaatgaattctaaaccaatcaaatgtctgggaagccctccaagaaaaaaaatagaaaagcacttgaagaatattcccaatattcccggtcagcagtatcaaggctgacttgtgttcatgtggagtcattataaattctataaatcaattattccccttcggtcttaaaaatatatttcctcataaacatttgagttttgttgaaaagatggagtttacaaagataccattcttgagtcatggatttctctgctcacagaagggtgtggcatttggaaacgggaataaacaaaattgctgcaccaatgcactgagtgaaggaagagagacagaggatcaagggctttagacagcactccttcaatatgcaatcacagagaaagatgcgccttatccaagttaatatctctaaggtgagagccttcttagagtcagtttgttgcaaatttcacctactctgttcttttccatccatccccctgagtcagttggttgaagggagttattttttcaagtggaattcaaacaaagctcaaaccagaactgtaaatagtgattgcaggaattcttttctaaactgctttgccctttcctctcactgccttttatagccaatataaatgtctctttgcacaccttttgttgtggttttatattgtaacaccatttttctttgaaactattgtatttaaagtaaggtttcatattatgtcagcaagtaattaacttatgtttaaaaggtggccatatcatgtaccaaaagttgctgaagtttctcttctagctggtaaagtaggagtttgcatgacttcacactttttttgcgtagtttcttctgttgtatgatggcgtgagtgtgtgtcttgggtaccgctgtgtactactgtgtgcctagattccatgcactctcgttgtgtttgaagtaaatattggagaccggagggtaacaggttggcctgttgattacagctagtaatcgctgtgtcttgttccgccccctccctgacaccccagcttcccaggatgtggaaagcctggatctcagctccttgccccatatcccttctgtaatttgtacctaaagagtgtgattatcctaattcaagagtcactaaaactcatcacattatcattgcatatcagcaaagggtaaagtcctagcaccaattgcttcacataccagcatgttccatttccaatttagaattagccacataataaaatcttagaatcttccttgagaaagagctgcctgagatgtagttttgttatatggttccccaccgaccatttttgtgcttttttcttgttttgttttgttttgactgcactgtgagttttgtagtgtcctcttcttgccaaaacaaacgcgagatgaactggacttatgtagacaaatcgtgatgccagtgtatccttcctttcttcagttccagcaataatgaatggtcaacttttttaaaatctagatctctctcattcatttcaatgtatttttactttaagatgaaccaaaattattagacttatttaagatgtacaggcatcagaaaaaagaagcacataatgcttttggtgcgatggcactcactgtgaacatgtgtaaccacatattaatatgcaatattgtttccaatactttctaatacagttttttataatgttgtgtgtggtgattgttcaggtcgaatctgttgtatccagtacagctttaggtcttcagctgcccttctggcgagtacatgcacaggattgtaaatgagaaatgcagtcatatttccagtctgcctctatgatgatgttaaattattgctgtttagctgtgaacaagggatgtaccactggaggaatagagtatccttttgtacacattttgaaatgcttcttctgtagtgatagaacaaataaatgcaacgaatactctgtctgccctatcccgtgaagtccacactggcgtaagagaaggcccagcagagcaggaatctgcctagactttctcccaatgagatcccaatatgagagggagaagagatgggcctcaggacagctgcaataccacttgggaacacatgtggtgtcttgatgtggccagcgcagcagttcagcacaacgtacctcccatctacaacagtgctggacgtgggaattctaagtcccagtcttgagggtgggtggagatggagggcaacaagagatacatttccagttctccactgcagcatgcttcagtcattctgtgagtggccgggcccagggccctcacaatttcactaccttgtcttttacatagtcataagaattatcctcaacatagccttttgacgctgtaaatcttgagtattcatttacccttttctgatctcctggaaacagctgcctgcctgcattgcacttctcttcccgaggagtggggtaaatttaaaagtcaagttatagtttggatgttagtatagaattttgaaattgggaattaaaaatcaggactggggactgggagaccaaaaatttctgatcccatttctgatggatgtgtcacaccttttctgtcaaaataaaatgtcttggaggttatgactccttggtgaaa

SEQ ID NO: 14164 - DNA, 3487 bp, Homo sapiens
  source 1..3487: mol_type = unassigned DNA
cgcggcgcatcccagcctgggcgggacgctcggccgcggcgaggcgggcaagcctggcagggcagagggagccccggctccgaggttgctcttcgcacccgaggatcagtcttggccccaaagcgcgacgcacaaatccacataacctgaggaccatggatgctgatgagggtcaagacatgtcccaagtttcagggaaggaaagcccccctgtaagcgatactccagatgagggcgatgagcccatgccgatccccgaggacctctccaccacctcgggaggacagcaaagctccaagagtgacagagtcgtggccagtaatgttaaagtagagactcagagtgatgaagagaatgggcgtgcctgtgaaatgaatggggaagaatgtgcggaggatttacgaatgcttgatgcctcgggagagaaaatgaatggctcccacagggaccaaggcagctcggctttgtcgggagttggaggcattcgacttcctaacggaaaactaaagtgtgatatctgtgggatcatttgcatcgggcccaatgtgctcatggttcacaaaagaagccacactggagaacggcccttccagtgcaatcagtgcggggcctcattcacccagaagggcaacctgctccggcacatcaagctgcattccggggagaagcccttcaaatgccacctctgcaactacgcctgccgccggagggacgccctcactggccacctgaggacgcactccgtcattaaagaagaaactaatcacagtgaaatggcagaagacctgtgcaagataggatcagagagatctctcgtgctggacagactagcaagtaacgtcgccaaacgtaagagctctatgcctcagaaatttcttggggacaagggcctgtccgacacgccctacgacagcagcgccagctacgagaaggagaacgaaatgatgaagtcccacgtgatggaccaagccatcaacaacgccatcaactacctgggggccgagtccctgcgcccgctggtgcagacgcccccgggcggttccgaggtggtcccggtcatcagcccgatgtaccagctgcacaagccgctcgcggagggcaccccgcgctccaaccactcggcccaggacagcgccgtggagaacctgctgctgctctccaaggccaagttggtgccctcggagcgcgaggcgtccccgagcaacagctgccaagactccacggacaccgagagcaacaacgaggagcagcgcagcggtctcatctacctgaccaaccacatcgccccgcacgcgcgcaacgggctgtcgctcaaggaggagcaccgcgcctacgacctgctgcgcgccgcctccgagaactcgcaggacgcgctccgcgtggtcagcaccagcggggagcagatgaaggtgtacaagtgcgaacactgccgggtgctcttcctggatcacgtcatgtacaccatccacatgggctgccacggcttccgtgatccttttgagtgcaacatgtgcggctaccacagccaggaccggtacgagttctcgtcgcacataacgcgaggggagcaccgcttccacatgagctaaagccctcccgcgcccccaccccagaccccgagccaccccaggaaaagcacaaggactgccgccttctcgctcccgccagcagcatagactggactggaccagacaatgttgtgtttggatttgtaactgttttttgttttttgtttgagttggttgattggggtttgatttgcttttgaaaagatttttatttttagaggcagggctgcattgggagcatccagaactgctaccttcctagatgtttccccagaccgctggctgagattccctcacctgtcgcttcctagaatccccttctccaaacgattagtctaaattttcagagagaaatagataaaacacgccacagcctgggaaggagcgtgctctaccctgtgctaagcacggggttcgcgcaccaggtgtctttttccagtccccagaagcagagagcacagcccctgctgtgtgggtctgcaggtgagcagacaggacaggtgtgccgccacccaagtgccaagacacagcagggccaacaacctgtgcccaggccagcttcgagctacatgcatctagggcggagaggctgcacttgtgagagaaaatactatttcaagtcatattctgcgtaggaaaatgaattggttggggaaagtcgtgtctgtcagactgccctgggtggagggagacgccgggctagagcctttgggatcgtcctggattcactggctttgcggaggctgctcagatggcctgagcctcccgaggcttgctgccccgtaggaggagactgtcttcccgtgggcatatctggggagccctgttccccgctttttcactcccatacctttaatggcccccaaaatctgtcactacaatttaaacaccagtcccgaaatttggatcttctttctttttgaatctctcaaacggcaacattcctcagaaaccaaagctttatttcaaatctcttccttccctggctggttccatctagtaccagaggcctcttttcctgaagaaatccaatcctagccctcattttaattatgtacatctgtttgtagccacaagcctgaatttctcagtgttggtaagtttctttacctaccctcactatatattattctcgttttaaaacccataaaggagtgatttagaacagtcattaattttcaactcaatgaaatatgtgaagcccagcatctctgttgctaacacacagagctcacctgtttgaaaccaagctttcaaacatgttgaagctctttactgtaaaggcaagccagcatgtgtgtccacacatacataggatggctggctctgcacctgtaggatattggaatgcacagggcaattgagggactgagccagaccttcggagagtaatgccaccagatcccctaggaaagaggaggcaaatggcactgcaggtgagaaccccgcccatccgtgctatgacatggaggcactgaagcccgaggaaggtgtgtggagattctaatcccaacaagcaagggtctccttcaagattaatgctatcaatcattaaggtcattactctcaaccacctaggcaatgaagaatataccatttcaaatatttacagtacttgtcttcaccaacactgtcccaaggtgaaatgaagcaacagagaggaaattgtacataagtacctcagcatttaatccaaacaggggttcttagtctcagcactatgacattttgggctgactacttatttgttaggcgggagctctcctgtgcattgtaggataattagcagtatccctggtggctacccaatagacgccagtagcaccccgaattgacaacccaaactctccagacatcaccaactgtcccctgcgaggagaaatcactcctgggggagaaccactgacccaaatgaattc

SEQ ID NO: 14165 - DNA, 1748 bp, Homo sapiens
  source 1..1748: mol_type = unassigned DNA
agtgtgaaggcagcagaggaaccttttggaggaggaagaggacacagaggccctgtagccaggcaccaagatccctcccaggtggctgggtctgaggggaactccgagcagccctaggtcctcaaagtctggatttgtgtggaaaaggcagctctcacttggccttggcgaggcctcggttggttgataacctgaggaccatggatgctgatgagggtcaagacatgtcccaagtttcagggaaggaaagcccccctgtaagcgatactccagatgagggcgatgagcccatgccgatccccgaggacctctccaccacctcgggaggacagcaaagctccaagagtgacagagtcgtgggagaacggcccttccagtgcaatcagtgcggggcctcattcacccagaagggcaacctgctccggcacatcaagctgcattccggggagaagcccttcaaatgccacctctgcaactacgcctgccgccggagggacgccctcactggccacctgaggacgcactccgttggtaaacctcacaaatgtggatattgtggccgaagctataaacagcgaagctctttagaggaacataaagagcgctgccacaactacttggaaagcatgggccttccgggcacactgtacccagtcattaaagaagaaactaatcacagtgaaatggcagaagacctgtgcaagataggatcagagagatctctcgtgctggacagactagcaagtaacgtcgccaaacgtaagagctctatgcctcagaaatttcttggggacaagggcctgtccgacacgccctacgacagcagcgccagctacgagaaggagaacgaaatgatgaagtcccacgtgatggaccaagccatcaacaacgccatcaactacctgggggccgagtccctgcgcccgctggtgcagacgcccccgggcggttccgaggtggtcccggtcatcagcccgatgtaccagctgcacaagccgctcgcggagggcaccccgcgctccaaccactcggcccaggacagcgccgtggagaacctgctgctgctctccaaggccaagttggtgccctcggagcgcgaggcgtccccgagcaacagctgccaagactccacggacaccgagagcaacaacgaggagcagcgcagcggtctcatctacctgaccaaccacatcgccccgcacgcgcgcaacgggctgtcgctcaaggaggagcaccgcgcctacgacctgctgcgcgccgcctccgagaactcgcaggacgcgctccgcgtggtcagcaccagcggggagcagatgaaggtgtacaagtgcgaacactgccgggtgctcttcctggatcacgtcatgtacaccatccacatgggctgccacggcttccgtgatccttttgagtgcaacatgtgcggctaccacagccaggaccggtacgagttctcgtcgcacataacgcgaggggagcaccgcttccacatgagctaaagccctcccgcgcccccaccccagaccccgagccaccccaggaaaagcacaaggactgccgccttctcgctcccgccagcagcatagactggactggaccagacaatgttgtgtttggatttgtaactgttttttgttttttgtttgagttggttgattggggtttgatttgcttttgaaaagatttttatttttagaggcagggctgcattgggagcatccagaactgctaccttcctagatgtttcc

SEQ ID NO: 14166 - DNA, 3572 bp, Homo sapiens
  source 1..3572: mol_type = unassigned DNA
gtgtgaaggcagcagaggaaccttttggaggaggaagaggacacagaggccctgtagccaggcaccaagatccctcccaggtggctgggtctgaggggaactccgagcagccctaggtcctcaaagtctggatttgtgtggaaaaggcagctctcacttggccttggcgaggcctcggttggttgataacctgaggaccatggatgctgatgagggtcaagacatgtcccaagtttcagggaaggaaagcccccctgtaagcgatactccagatgagggcgatgagcccatgccgatccccgaggacctctccaccacctcgggaggacagcaaagctccaagagtgacagagtcgtggccagtaatgttaaagtagagactcagagtgatgaagagaatgggcgtgcctgtgaaatgaatggggaagaatgtgcggaggatttacgaatgcttgatgcctcgggagagaaaatgaatggctcccacagggaccaaggcagctcggctttgtcgggagttggaggcattcgacttcctaacggaaaactaaagtgtgatatctgtgggatcatttgcatcgggcccaatgtgctcatggttcacaaaagaagccacactggagaacggcccttccagtgcaatcagtgcggggcctcattcacccagaagggcaacctgctccggcacatcaagctgcattccggggagaagcccttcaaatgccacctctgcaactacgcctgccgccggagggacgccctcactggccacctgaggacgcactccgtcattaaagaagaaactaatcacagtgaaatggcagaagacctgtgcaagataggatcagagagatctctcgtgctggacagactagcaagtaacgtcgccaaacgtaagagctctatgcctcagaaatttcttggggacaagggcctgtccgacacgccctacgacagcagcgccagctacgagaaggagaacgaaatgatgaagtcccacgtgatggaccaagccatcaacaacgccatcaactacctgggggccgagtccctgcgcccgctggtgcagacgcccccgggcggttccgaggtggtcccggtcatcagcccgatgtaccagctgcacaagccgctcgcggagggcaccccgcgctccaaccactcggcccaggacagcgccgtggagaacctgctgctgctctccaaggccaagttggtgccctcggagcgcgaggcgtccccgagcaacagctgccaagactccacggacaccgagagcaacaacgaggagcagcgcagcggtctcatctacctgaccaaccacatcgccccgcacgcgcgcaacgggctgtcgctcaaggaggagcaccgcgcctacgacctgctgcgcgccgcctccgagaactcgcaggacgcgctccgcgtggtcagcaccagcggggagcagatgaaggtgtacaagtgcgaacactgccgggtgctcttcctggatcacgtcatgtacaccatccacatgggctgccacggcttccgtgatccttttgagtgcaacatgtgcggctaccacagccaggaccggtacgagttctcgtcgcacataacgcgaggggagcaccgcttccacatgagctaaagccctcccgcgcccccaccccagaccccgagccaccccaggaaaagcacaaggactgccgccttctcgctcccgccagcagcatagactggactggaccagacaatgttgtgtttggatttgtaactgttttttgttttttgtttgagttggttgattggggtttgatttgcttttgaaaagatttttatttttagaggcagggctgcattgggagcatccagaactgctaccttcctagatgtttccccagaccgctggctgagattccctcacctgtcgcttcctagaatccccttctccaaacgattagtctaaattttcagagagaaatagataaaacacgccacagcctgggaaggagcgtgctctaccctgtgctaagcacggggttcgcgcaccaggtgtctttttccagtccccagaagcagagagcacagcccctgctgtgtgggtctgcaggtgagcagacaggacaggtgtgccgccacccaagtgccaagacacagcagggccaacaacctgtgcccaggccagcttcgagctacatgcatctagggcggagaggctgcacttgtgagagaaaatactatttcaagtcatattctgcgtaggaaaatgaattggttggggaaagtcgtgtctgtcagactgccctgggtggagggagacgccgggctagagcctttgggatcgtcctggattcactggctttgcggaggctgctcagatggcctgagcctcccgaggcttgctgccccgtaggaggagactgtcttcccgtgggcatatctggggagccctgttccccgctttttcactcccatacctttaatggcccccaaaatctgtcactacaatttaaacaccagtcccgaaatttggatcttctttctttttgaatctctcaaacggcaacattcctcagaaaccaaagctttatttcaaatctcttccttccctggctggttccatctagtaccagaggcctcttttcctgaagaaatccaatcctagccctcattttaattatgtacatctgtttgtagccacaagcctgaatttctcagtgttggtaagtttctttacctaccctcactatatattattctcgttttaaaacccataaaggagtgatttagaacagtcattaattttcaactcaatgaaatatgtgaagcccagcatctctgttgctaacacacagagctcacctgtttgaaaccaagctttcaaacatgttgaagctctttactgtaaaggcaagccagcatgtgtgtccacacatacataggatggctggctctgcacctgtaggatattggaatgcacagggcaattgagggactgagccagaccttcggagagtaatgccaccagatcccctaggaaagaggaggcaaatggcactgcaggtgagaaccccgcccatccgtgctatgacatggaggcactgaagcccgaggaaggtgtgtggagattctaatcccaacaagcaagggtctccttcaagattaatgctatcaatcattaaggtcattactctcaaccacctaggcaatgaagaatataccatttcaaatatttacagtacttgtcttcaccaacactgtcccaaggtgaaatgaagcaacagagaggaaattgtacataagtacctcagcatttaatccaaacaggggttcttagtctcagcactatgacattttgggctgactacttatttgttaggcgggagctctcctgtgcattgtaggataattagcagtatccctggtggctacccaatagacgccagtagcaccccgaattgacaacccaaactctccagacatcaccaactgtcccctgcgaggagaaatcactcctgggggagaaccactgacccaaatgaattctaaaccaatcaaatgtctgggaagccctccaagaaaaaaaa

SEQ ID NO: 14167 - DNA, 3485 bp, Homo sapiens
  source 1..3485: mol_type = unassigned DNA
cgcggcgcatcccagcctgggcgggacgctcggccgcggcgaggcgggcaagcctggcagggcagagggagccccggctccgaggttgctcttcgcacccgaggatcagtcttggccccaaagcgcgacgcacaaatccacataacctgaggaccatggatgctgatgagggtcaagacatgtcccaagtttcagggaaggaaagcccccctgtaagcgatactccagatgagggcgatgagcccatgccgatccccgaggacctctccaccacctcgggaggacagcaaagctccaagagtgacagagtcgtggccagtaatgttaaagtagagactcagagtgatgaagagaatgggcgtgcctgtgaaatgaatggggaagaatgtgcggaggatttacgaatgcttgatgcctcgggagagaaaatgaatggctcccacagggaccaaggcagctcggctttgtcgggagttggaggcattcgacttcctaacggaaaactaaagtgtgatatctgtgggatcatttgcatcgggcccaatgtgctcatggttcacaaaagaagccacactggagaacggcccttccagtgcaatcagtgcggggcctcattcacccagaagggcaacctgctccggcacatcaagctgcattccggggagaagcccttcaaatgccacctctgcaactacgcctgccgccggagggacgccctcactggccacctgaggacgcactccgtcattaaagaagaaactaatcacagtgaaatggcagaagacctgtgcaagataggatcagagatctctcgtgctggacagactagcaagtaacgtcgccaaacgtaagagctctatgcctcagaaatttcttggggacaagggcctgtccgacacgccctacgacagcagcgccagctacgagaaggagaacgaaatgatgaagtcccacgtgatggaccaagccatcaacaacgccatcaactacctgggggccgagtccctgcgcccgctggtgcagacgcccccgggcggttccgaggtggtcccggtcatcagcccgatgtaccagctgcacaagccgctcgcggagggcaccccgcgctccaaccactcggcccaggacagcgccgtggagaacctgctgctgctctccaaggccaagttggtgccctcggagcgcgaggcgtccccgagcaacagctgccaagactccacggacaccgagagcaacaacgaggagcagcgcagcggtctcatctacctgaccaaccacatcgccccgcacgcgcgcaacgggctgtcgctcaaggaggagcaccgcgcctacgacctgctgcgcgccgcctccgagaactcgcaggacgcgctccgcgtggtcagcaccagcggggagcagatgaaggtgtacaagtgcgaacactgccgggtgctcttcctggatcacgtcatgtacaccatccacatgggctgccacggcttccgtgatccttttgagtgcaacatgtgcggctaccacagccaggaccggtacgagttctcgtcgcacataacgcgaggggagcaccgcttccacatgagctaaagccctcccgcgcccccaccccagaccccgagccaccccaggaaaagcacaaggactgccgccttctcgctcccgccagcagcatagactggactggaccagacaatgttgtgtttggatttgtaactgttttttgttttttgtttgagttggttgattggggtttgatttgcttttgaaaagatttttatttttagaggcagggctgcattgggagcatccagaactgctaccttcctagatgtttccccagaccgctggctgagattccctcacctgtcgcttcctagaatccccttctccaaacgattagtctaaattttcagagagaaatagataaaacacgccacagcctgggaaggagcgtgctctaccctgtgctaagcacggggttcgcgcaccaggtgtctttttccagtccccagaagcagagagcacagcccctgctgtgtgggtctgcaggtgagcagacaggacaggtgtgccgccacccaagtgccaagacacagcagggccaacaacctgtgcccaggccagcttcgagctacatgcatctagggcggagaggctgcacttgtgagagaaaatactatttcaagtcatattctgcgtaggaaaatgaattggttggggaaagtcgtgtctgtcagactgccctgggtggagggagacgccgggctagagcctttgggatcgtcctggattcactggctttgcggaggctgctcagatggcctgagcctcccgaggcttgctgccccgtaggaggagactgtcttcccgtgggcatatctggggagccctgttccccgctttttcactcccatacctttaatggcccccaaaatctgtcactacaatttaaacaccagtcccgaaatttggatcttctttctttttgaatctctcaaacggcaacattcctcagaaaccaaagctttatttcaaatctcttccttccctggctggttccatctagtaccagaggcctcttttcctgaagaaatccaatcctagccctcattttaattatgtacatctgtttgtagccacaagcctgaatttctcagtgttggtaagtttctttacctaccctcactatatattattctcgttttaaaacccataaaggagtgatttagaacagtcattaattttcaactcaatgaaatatgtgaagcccagcatctctgttgctaacacacagagctcacctgtttgaaaccaagctttcaaacatgttgaagctctttactgtaaaggcaagccagcatgtgtgtccacacatacataggatggctggctctgcacctgtaggatattggaatgcacagggcaattgagggactgagccagaccttcggagagtaatgccaccagatcccctaggaaagaggaggcaaatggcactgcaggtgagaaccccgcccatccgtgctatgacatggaggcactgaagcccgaggaaggtgtgtggagattctaatcccaacaagcaagggtctccttcaagattaatgctatcaatcattaaggtcattactctcaaccacctaggcaatgaagaatataccatttcaaatatttacagtacttgtcttcaccaacactgtcccaaggtgaaatgaagcaacagagaggaaattgtacataagtacctcagcatttaatccaaacaggggttcttagtctcagcactatgacattttgggctgactacttatttgttaggcgggagctctcctgtgcattgtaggataattagcagtatccctggtggctacccaatagacgccagtagcaccccgaattgacaacccaaactctccagacatcaccaactgtcccctgcgaggagaaatcactcctgggggagaaccactgacccaaatgaattc

SEQ ID NO: 14168 - DNA, 5229 bp, Homo sapiens
  source 1..5229: mol_type = unassigned DNA
cctcgcctccctctcccccaacactgtcccctctccccaacccctcacagcctgcgcgcgcgcggagacacctcagtctacatggggaggacagagaagcgcaaagaacaagagaaaagatgcatccatctgagatctaaaaggagacaatgagaatctctttaaaatggacatagaagactgcaatggccgctcctatgtgtctgtaggaccaatgaaggaattattggcatgcactaaaggagatagcaagatgggtcagacacacatatgagagtcattggcaacacccgggtaatgtaaggaatccacgcttcctggaaggtgagtggctgggctcacccctgcctgccactgagacgcagacatgcatacaccacccgcactccctcgccgtttccaaggcggcggccgcgttcgcaccccagggtctcaccggcaagggaaggataatctggagagggatccctcaggagggtgtgttccggatttcttgcctcaggcccaagactccaaccattttataatggaatctttattttgtgaaagtagcggggactcatctctggagaaggagttcctcggggccccagtggggccctcggtgagcacccccaacagccagcactcttctcctagccgctcactcagtgccaactccatcaaggtggagatgtacagcgatgaggagtcaagcagactgctggggccagatgagcggctcctggaaaaggacgacagcgtgattgtggaagattcattgtctgagcccctgggctactgtgatgggagtgggccagagcctcactcccctgggggcatccggctgcccaatggcaagctcaagtgtgacgtctgcggcatggtctgtattggacccaacgtgctcatggtgcacaagcgcagtcacactggtgaaaggcccttccattgcaaccagtgtggtgcctccttcacccagaaggggaacctgctgcgccacatcaagctgcactctggggagaagccctttaaatgtcccttctgcaactatgcctgccgccggcgtgatgcactcactggtcacctccgcacacactcagtctcctctcccacagtgggcaagccctacaagtgtaactactgtggccggagctacaaacagcagagtaccctggaggagcacaaggagcggtgccataactacctacagagtctcagcactgaagcccaagctttggctggccaaccaggtgacgaaatacgtgacctggagatggtgccagactccatgctgcactcatcctctgagcggccaactttcatcgatcgtctggccaatagcctcaccaaacgcaagcgttccacaccccagaagtttgtaggcgaaaagcagatgcgcttcagcctctcagacctcccctatgatgtgaactcgggtggctatgaaaaggatgtggagttggtggcacaccacagcctagagcctggctttggaagttccctggcctttgtgggtgcagagcatctgcgtcccctccgccttccacccaccaattgcatctcagaactcacgcctgtcatcagctctgtctacacccagatgcagcccctccctggtcgactggagcttccaggatcccgagaagcaggtgagggacctgaggacctggctgatggaggtcccctcctctaccggccccgaggccccctgactgaccctggggcatcccccagcaatggctgccaggactccacagacacagaaagcaaccacgaagatcgggttgcgggggtggtatccctccctcagggtcccccaccccagccacctcccaccattgtggtgggccggcacagtcctgcctacgccaaagaggaccccaagccacaggaggggttattgcggggcaccccaggcccctccaaggaagtgcttcgggtggtgggcgagagtggtgagcctgtgaaggccttcaagtgtgagcactgccgtatcctcttcctggaccacgtcatgttcactatccacatgggctgccatggcttcagagacccttttgagtgcaacatctgtggttatcacagccaggaccggtacgaattctcttcccacattgtccggggggagcataaggtgggctagcaacctctccctctctcctcagtccaccactccactgccctgactacaggcattgatccctgtccccaccatttcccaaggagttttgctttgtagccctcactactggccacctgacctcacacctgaccctgacccctcctcacctattctcttcctctatcctgaccgatgtaagcattgtgatgaaacagatcttttgcttatgtttttcctttttatcttctctcatcccagcatactgagttatttattaattagttgatttatttttgcctttttaaattttaacttatatcagtcacttgccactcccccaccctcctgtccacaactcctttccactttaggccaatttttctctcttagatcttccagcagccccaggggtaggaagctcctcttagtactaagagacttcaagcttcttgctttaagtcctcaccctttacattatctaattcttcagttttgatgctgatacctgcccccggccctaccttagctctgtggcattatatctcctctctgggactcttcaacctggtactccatacctcttgtgccctctcactttaggcagcttgcactattcttgaatgaatgaagaattatttcctcatttggaagtaggagggactgaagaaattctccccaggcactgtgggactgagagtcctattcccctagtaataggtcatattcccctagtaatatgagttctcaaagcctacattcaggatctccctctaggatgtgatagatctggtccctctccttgaactacccctccacacgctctagtcccttcaacctaccggtctattaagtggtggcttttctctccttggagtgccccaattttatattctcaggggccaaggctaggtctgcaaccctctgtctctgacagattgggagccacaggtgcctaattgggaaccagggcatgggaaaggagtgggtcaaaattcttctctttctcctccacctctcaaacttcttcactatagtgaccttcctaggctctcaggggctccttcagtccccatcctatgagaaactagtgggttgctgcctgatgacaaggggttgtttcagcccctcagtcatgctgccttctgctgctccctcccagcaggattcaccctctcattcccgggctcctgggccctgttcttaggatcagtggcagggagaaacgggtatctcttttctctcttctaattttcagtataaccaaaaattatcccagcatgagcacgggcacgtgcccttcaccccattccacccttgttccagcaagactgggatgggtacaactgaactggggtcttcctttactacccccttctacactcagctcccagacacagggtaggaggggggactgctggctactgcagagacccttggctatttgagtaacctaggattagtgagaaggggcagaaggagatacaactccactgcaagtggaggtttctttctacaagagttttctgcccaaggccacagccatcccactctctgcttccttgagattcaaaccaaaggctgtttttctatgtttaaagaaaaaaaaaagtaaaaaccaaacacaacacctcacaagttgtaactcttggtccttctctctctccttttctcttcccttccttccccttccatctttctttccacatgtcctttccttattggctcttttacctcctacttttctcactccctatcagggatattttggggggggatggtaaagggtgggctaaggaacagaccctgggattagggccttaagggctctgagaggagtctaccttgccttcttatgggaagggagaccctaaaaaactttctcctctttgtcctcctttttctcccccactctgaggtttccccaagagaaccagattggcagggagaagcattgtggggcaattgttcctccttgacaatgtagcaataaatagatgctgccaagggcagaaaatggggaggttagctcagagcagagtagtctctagagaaaggaagaatcctcaacggcaccctggggtgctagctcctttttagaatgtcagcagagctgagattaatatctgggcttttcctgaactattctggttattgagcccttcctgttagacctaccgcctcccacctcttctgtgtctgctgtgtatttggtgacacttcataaggactagtcccttctggggtatcagagccttagggtgcccccatccccttccccagtcaactgtggcacctgtaacctcccggaacatgaaggactatgctctgaggctatactctgtgcccatgagagcagagactggaagggcaagaccaggtgctaaggaggggagagggggcatcctgtctctctccagaccatcactgcactttaaccagggtcttaggtacaaaatcctacttttcagagccttccagctctggaacctcaaacatcctcatgctctctcccagctccttttgcataaaaaaaaaagtaaagaaaaagaaaaaaaaatacacacacactgaaacccacatggagaaaagaggtgtttccttttatattgctattcaaaatcaataccaccaacaaaatatttctaagtagacacttttccagacctttgtttttttgtgtcagtgtccaagctgcagataggattttgtaatacttctggcagcttctttccttgtgtacataatatatatatatacatatatatatatatttttaatcagaagttatgaagaacaaaaagaaaaaataaacacagaagcaagtgcaataccacctctcttctccctctctcctagggtttcctttgtagcctatgtttggtgtctcttttgacctttaccccttcacctcctcctctcttcttctgattcccctcccccccttttttaaagagtttttctcctttctcaaggggagttaaactagcttttgagacttattgcaaagcattttgtatatgtaatatattgtaagtaaatatttgtgtaacggagatatactactgtaagttttgtactgtactggctgaaagtctgttataaataaacatgagtaatttaacacc

SEQ ID NO: 14169 - DNA, 3683 bp, Homo sapiens
  source 1..3683: mol_type = unassigned DNA
cttgcctctctcaggcatttgttgtgcagttcctctttgtctgctgggcacgaggggcaacagcatctgcctttccctccctgtgcacacacccaccacccacccccttcactgtcttggaaaagggatgctgtagcctagcatctcccccactatatacacatatacattctctccagccccctccccaagcacatccaagcgtgctctcccctctccttctctccctctctctctctctctctctcacacacacacacacacacacactcaacacacatacaccctgggctgagctgctcttgctggctgcagccgtgggcctctgctcaccgtgccgctgctgctgcctgcgaaatgacggcggttcccctcacttccaggaatccacgcttcctggaaggtgagtggctgggctcacccctgcctgccactgagacgcagacatgcatacaccacccgcactccctcgccgtttccaaggcggcggccgcgttcgcaccccagggtctcaccggcaagggaaggataatgtagcggggactcatctctggagaaggagttcctcggggccccagtggggccctcggtgagcacccccaacagccagcactcttctcctagccgctcactcagtgccaactccatcaaggtggagatgtacagcgatgaggagtcaagcagactgctggggccagatgagcggctcctggaaaaggacgacagcgtgattgtggaagattcattgtctgagcccctgggctactgtgatgggagtgggccagagcctcactcccctgggggcatccggctgcccaatggcaagctcaagtgtgacgtctgcggcatggtctgtattggacccaacgtgctcatggtgcacaagcgcagtcacactggtgaaaggcccttccattgcaaccagtgtggtgcctccttcacccagaaggggaacctgctgcgccacatcaagctgcactctggggagaagccctttaaatgtcccttctgcaactatgcctgccgccggcgtgatgcactcactggtcacctccgcacacactcagtctcctctcccacagtgggcaagccctacaagtgtaactactgtggccggagctacaaacagcagagtaccctggaggagcacaaggagcggtgccataactacctacagagtctcagcactgaagcccaagctttggctggccaaccaggtgacgaaatacgtgacctggagatggtgccagactccatgctgcactcatcctctgagcggccaactttcatcgatcgtctggccaatagcctcaccaaacgcaagcgttccacaccccagaagtttgtaggcgaaaagcagatgcgcttcagcctctcagacctcccctatgatgtgaactcgggtggctatgaaaaggatgtggagttggtggcacaccacagcctagagcctggctttggaagttccctggcctttgtgggtgcagagcatctgcgtcccctccgccttccacccaccaattgcatctcagaactcacgcctgtcatcagctctgtctacacccagatgcagcccctccctggtcgactggagcttccaggatcccgagaagcaggtgagggacctgaggacctggctgatggaggtcccctcctctaccggccccgaggccccctgactgaccctggggcatcccccagcaatggctgccaggactccacagacacagaaagcaaccacgaagatcgggttgcgggggtggtatccctccctcagggtcccccaccccagccacctcccaccattgtggtgggccggcacagtcctgcctacgccaaagaggaccccaagccacaggaggggttattgcggggcaccccaggcccctccaaggaagtgcttcgggtggtgggcgagagtggtgagcctgtgaaggccttcaagtgtgagcactgccgtatcctcttcctggaccacgtcatgttcactatccacatgggctgccatggcttcagagacccttttgagtgcaacatctgtggttatcacagccaggaccggtacgaattctcttcccacattgtccggggggagcataaggtgggctagcaacctctccctctctcctcagtccaccactccactgccctgactacaggcattgatccctgtccccaccatttcccaaggagttttgctttgtagccctcactactggccacctgacctcacacctgaccctgacccctcctcacctattctcttcctctatcctgaccgatgtaagcattgtgatgaaacagatcttttgcttatgtttttcctttttatcttctctcatcccagcatactgagttatttattaattagttgatttatttttgcctttttaaattttaacttatatcagtcacttgccactcccccaccctcctgtccacaactcctttccactttaggccaatttttctctcttagatcttccagcagccccaggggtaggaagctcctcttagtactaagagacttcaagcttcttgctttaagtcctcaccctttacattatctaattcttcagttttgatgctgatacctgcccccggccctaccttagctctgtggcattatatctcctctctgggactcttcaacctggtactccatacctcttgtgccctctcactttaggcagcttgcactattcttgaatgaatgaagaattatttcctcatttggaagtaggagggactgaagaaattctccccaggcactgtgggactgagagtcctattcccctagtaataggtcatattcccctagtaatatgagttctcaaagcctacattcaggatctccctctaggatgtgatagatctggtccctctccttgaactacccctccacacgctctagtcccttcaacctaccggtctattaagtggtggcttttctctccttggagtgccccaattttatattctcaggggccaaggctaggtctgcaaccctctgtctctgacagattgggagccacaggtgcctaattgggaaccagggcatgggaaaggagtgggtcaaaattcttctctttctcctccacctctcaaacttcttcactatagtgaccttcctaggctctcaggggctccttcagtccccatcctatgagaaactagtgggttgctgcctgatgacaaggggttgtttcagcccctcagtcatgctgccttctgctgctccctcccagcaggattcaccctctcattcccgggctcctgggccctgttcttaggatcagtggcagggagaaacgggtatctcttttctctcttctaattttcagtataaccaaaaattatcccagcatgagcacgggcacgtgcccttcaccccattccacccttgttccagcaagactgggatgggtacaactgaactggggtcttcctttactacccccttctacactcagctcccagacacagggtaggaggggggactgctggctactgcagagacccttggctatttgagtaacctaggattagtgagaaggggcagaaggagatacaactccactgcaagtggaggtttctttctacaagagttttctgcccaaggccacagccatcccactctctgcttccttgagattcaaaccaaaggctgtttttctatgttt

SEQ ID NO: 14170 - DNA, 2539 bp, Homo sapiens
  source 1..2539: mol_type = unassigned DNA
ctctttgtctgctgggcacgaggggcaacagcatctgcctttccctccctgtgcacacacccaccacccacccccttcactgtcttggaaaagggatgctgtagcctagcatctcccccactatatacacatatacattctctccagccccctccccaagcacatccaagcgtgctctcccctctccttctctccctctctctctctctctctctcacacacacacacacacacacactcaacacacatacaccctgggctgagctgctcttgctggctgcagccgtgggcctctgctcaccgtgccgctgctgctgcctgcgaaatgacggcggttcccctcacttccaggaatccacgcttcctggaaggtgagtggctgggctcacccctgcctgccactgagacgcagacatgcatacaccacccgcactccctcgccgtttccaaggcggcggccgcgttcgcaccccagggtctcaccggcaagggaaggataatctggagagggatccctcaggagggtgtgttccggatttcttgcctcaggcccaagactccaaccattttataatggaatctttattttgtgaaagtagcggggactcatctctggagaaggagttcctcggggccccagtggggccctcggtgagcacccccaacagccagcactcttctcctagccgctcactcagtgccaactccatcaaggtggagatgtacagcgatgaggagtcaagcagactgctggggccagatgagcggctcctggaaaaggacgacagcgtgattgtggaagattcattgtctgagcccctgggctactgtgatgggagtgggccagagcctcactcccctgggggcatccggctgcccaatggcaagctcaagtgtgacgtctgcggcatggtctgtattggacccaacgtgctcatggtgcacaagcgcagtcacactggtgaaaggcccttccattgcaaccagtgtggtgcctccttcacccagaaggggaacctgctgcgccacatcaagctgcactctggggagaagccctttaaatgtcccttctgcaactatgcctgccgccggcgtgatgcactcactggtcacctccgcacacactcagtctcctctcccacagtgggcaagccctacaagtgtaactactgtggccggagctacaaacagcagagtaccctggaggagcacaaggagcggtgccataactacctacagagtctcagcactgaagcccaagctttggctggccaaccaggtgacgaaatacgtgacctggagatggtgccagactccatgctgcactcatcctctgagcggccaactttcatcgatcgtctggccaatagcctcaccaaacgcaagcgttccacaccccagaagtttgtaggcgaaaagcagatgcgcttcagcctctcagacctcccctatgatgtgaactcgggtggctatgaaaaggatgtggagttggtggcacaccacagcctagagcctggctttggaagttccctggcctttgtgggtgcagagcatctgcgtcccctccgccttccacccaccaattgcatctcagaactcacgcctgtcatcagctctgtctacacccagatgcagcccctccctggtcgactggagcttccaggatcccgagaagcaggtgagggacctgaggacctggctgatggaggtcccctcctctaccggccccgaggccccctgactgaccctggggcatcccccagcaatggctgccaggactccacagacacagaaagcaaccacgaagatcgggttgcgggggtggtatccctccctcagggtcccccaccccagccacctcccaccattgtggtgggccggcacagtcctgcctacgccaaagaggaccccaagccacaggaggggttattgcggggcaccccaggcccctccaaggaagtgcttcgggtggtgggcgagagtggtgagcctgtgaaggccttcaagtgtgagcactgccgtatcctcttcctggaccacgtcatgttcactatccacatgggctgccatggcttcagagacccttttgagtgcaacatctgtggttatcacagccaggaccggtacgaattctcttcccacattgtccggggggagcataaggtgggctagcaacctctccctctctcctcagtccaccactccactgccctgactacaggcattgatccctgtccccaccatttcccaaggagttttgctttgtagccctcactactggccacctgacctcacacctgaccctgacccctcctcacctattctcttcctctatcctgaccgatgtaagcattgtgatgaaacagatcttttgcttatgtttttcctttttatcttctctcatcccagcatactgagttatttattaattagttgatttatttttgcctttttaaattttaacttatatcagtcacttgccactcccccaccctcctgtccacaactcctttccactttaggccaatttttctctctt

SEQ ID NO: 14171 - DNA, 420 bp, Homo sapiens
  source 1..420: mol_type = unassigned DNA
tggccattcctaggatgacctgggaatttatcccctctgcactgctccccaagcacttggataatgaagctgagctgtcttcaactgtattatatgtagacagaaggtcaccatctacagcctggtgaaaaatgagtcagacctttccactgtaaagacaaacacatgagctgagctaagaatctctttaaaatggacatagaagactgcaatggccgctcctatgtgtctggaccaatgaaggaattattggcatgcactaaaggagatagcaagatgggtcagacacacatatgagagtcattggcaacacccgggtaatgtaaggaatccacgcttcctggaaggtgagtggctgggctcacccctgcctgccactgagacgcagacatgcatacaccacccgcactccctcgccgt

SEQ ID NO: 14172 - DNA, 4528 bp, Homo sapiens
  source 1..4528: mol_type = unassigned DNA
gttgatagaaagataacgttgaaggcaagttgcccttgagcagctctctgaagatcaactgcctccacattgcattctttgccccaaaactctttcctttggttgtgctaagaggtgatgcccaaggtgcaccacctttcaagaactggatcatgaacaactttatcctcctggaagaacagctcatcaagaaatcccaacaaaagagaagaacttctccctcgaactttaaagtccgcttctttgtgttaaccaaagccagcctggcatactttgaagatcgtcatgggaagaagcgcacgctgaaggggtccattgagctctcccgaatcaaatgtgttgagattgtgaaaagtgacatcagcatcccatgccactataaatacccgtttcaggtggtgcatgacaactacctcctatatgtgtttgctccagatcgtgagagccggcagcgctgggtgctggcccttaaagaagaaacgaggaataataacagtttggtgcctaaatatcatcctaatttctggatggatgggaagtggaggtgctgttctcagctggagaagcttgcaacaggctgtgcccaatatgatccaaccaagaatgcttcaaagaagcctcttcctcctactcctgaagacaacaggcgaccactttgggaacctgaagaaactgtggtcattgccttatatgactaccaaaccaatgatcctcaggaactcgcactgcggcgcaacgaagagtactgcctgctggacagttctgagattcactggtggagagtccaggacaggaatgggcatgaaggatatgtaccaagcagttatctggtggaaaaatctccaaataatctggaaacctatgagtggtacaataagagtatcagccgagacaaagctgaaaaacttcttttggacacaggcaaagaaggagccttcatggtaagggattccaggactgcaggaacatacaccgtgtctgttttcaccaaggctgttgtaagtgagaacaatccctgtataaagcattatcacatcaaggaaacaaatgacaatcctaagcgatactatgtggctgaaaagtatgtgttcgattccatccctcttctcatcaactatcaccaacataatggaggaggcctggtgactcgactccggtatccagtttgttttgggaggcagaaagccccagttacagcagggctgagatacgggaaatgggtgatcgacccctcagagctcacttttgtgcaagagattggcagtgggcaatttgggttggtgcatctgggctactggctcaacaaggacaaggtggctatcaaaaccattcgggaaggggctatgtcagaagaggacttcatagaggaggctgaagtaatgatgaaactctctcatcccaaactggtgcagctgtatggggtgtgcctggagcaggcccccatctgcctggtgtttgagttcatggagcacggctgcctgtcagattatctacgcacccagcggggactttttgctgcagagaccctgctgggcatgtgtctggatgtgtgtgagggcatggcctacctggaagaggcatgtgtcatccacagagacttggctgccagaaattgtttggtgggagaaaaccaagtcatcaaggtgtctgactttgggatgacaaggttcgttctggatgatcagtacaccagttccacaggcaccaaattcccggtgaagtgggcatccccagaggttttctctttcagtcgctatagcagcaagtccgatgtgtggtcatttggtgtgctgatgtgggaagttttcagtgaaggcaaaatcccgtatgaaaaccgaagcaactcagaggtggtggaagacatcagtaccggatttcggttgtacaagccccggctggcctccacacacgtctaccagattatgaatcactgctggaaagagagaccagaagatcggccagccttctccagactgctgcgtcaactggctgaaattgcagaatcaggactttagtagagactgagtaccaggccacgggctgcagatcctgaatggaggaaggatatgtcctcattccatagagcattagaagctgccaccagcccaggaccctccagaggcagcctggcctgtggcatcagtccctgagtcaccatggaagcagcatcctgaccacagctggcagtcaagccacagctggagggtcagccaccaagctgggagctgagccagaacaggagtgatgtctctgcccttcctctagcctcttgtcacatgtggtgcacaaacctcaacctgacagctttcagacagcattcttgcacttcttagcaacagagagagacatgagtaagacccagattgctatttttattgttatttttaacatgaatctaaagtttatggttccagggactttttatttgacccaacaacacagtatcccaggatatggaggcaaggggaacaaagagcatgagtctttttccaagaaaactggtgagttaagtaagattagagtgagtgtgctctgttgctgtgatgctgtcagccacagcttcctgccgtagagaatgatagagcagctgctcacacaggaggccggatattctgagaagcagctttatgaggttttacagagtatgctgctacctctctccttgaagggagcatggcgagacccattggatggattggggtgaacagttcaggtcccatgcttggagcattgggtatctgatgtctgcaccagaacaagagaacctctgacggtggagaaccatgtggtgcaagaagagatcttaggtctcttcttttataccaagctcatcttttataccaagctgtgcaggtgactatgcctcctcttctgcacagaatgcttccaccagcatcctgagaagaaatgattacttctgaaaaacatccttttttccagcctctgggaatcagccccccctctctgcactatccgatcctcatcaacagagggcagcattgtgttggtcaatgttcccttggcgagcaattgaaacttgtttaggccctagggttgagcaattttaaggttgagactccaagtctcctaaaattctaggagagaaataaagagtctgtttttgctcaaaccatcaggatggaaacagtcaggcactgactggggtgcttccaagaggcatgagagtgcctactctggcttgagcacttctatatgcaaggtgaatatgtactgagctaggagacttccctgcaaaatctctgttcaccctgggttcacatccccatgaggtaatattattattcccattttacaaataatgtaactgaggctttaaaaagccaagacatctgcccaaagtgatggaactagaaagtctagagctggtattctagcccaaatctgtctgaccgcaatacacagattctttattcctattcgacactggcttctactgaaaatgaaacggattgcagagggaataaatacaaagatggaaagccagtaaagaagtcagtatagaaccactagcgaatagtgttgctctggcacagaccactgtggttgatggcatggccctccaacttggaataggattttccttttcctattctgtatccttaccttggtcatgttaatgactttggagttattcagttaatgaccctttaattctcacaaccaaccagtcatgttgcttgaagccatttatagacgagcttcaaagcaactttaaaagattcttctgtagaagtatgagttcttcctttaattatcattccaactttcagctgtagtcttcttgaacacttcatgaggagggacattccctgatataagagaggatggtgttgcaattggctctttctaaatcatgtgacgttttgactggcttgagattcagatgcataatttttaattataattattgtgaagtggagagcctcaagataaaactctgtcattcagaagatgattttactcagcttatccaaaattatctctgtttactttttagaattttgtacattatcttttgggatccttaattagagatgatttctggaacattcagtctagaaagaaaacattggaattgactgatctctgtggtttggtttagaaaattcccctgtgcatggtattacctttttcaagctcagattcatctaatcctcaactgtacatgtgtacattcttcacctcctggtgccctatcccgcaaaatgggcttcctgcctggtttttctcttctcacattttttaaatggtcccctgtgtttgtagagaactcccttatacagagttttggttctagttttatttcgtagattttgcattttgtaccttttgagactatgtatttatatttggatcagatgcatatttattaatgtacagtcactgctagtgttcaaaataaaaatgttacaaatacctgttatcctttgtagagcacacagagttaaaagttgaatatagcaatattaaagctgcattttaataaatatggtgcatagggcctcgg

SEQ ID NO: 14173 - DNA, 2304 bp, Homo sapiens
  source 1..2304: mol_type = unassigned DNA
tgcgcatcgggccggactacggggcgccgctgagccaagtgggccacccgggcacggccacgctcccgggtcacgtgacacggagggggccgaattctgctggaggcagcgccatatcctggaggtgaaggtaccacctcatggagacccccgcggccgccgcccccgctgggagcttattcccctccttcctgctcctggcctgcgggacgctggtggccgccttgctgggcgccgctcaccgcctggggctcttctatcagctgctgcacaaggtggacaaggcaagcgtccggcatggcggagagaacgtggccgctgtgctgagggcccatggtgtgcggttcatcttcacgctggtcggtgggcacatttccccgctgctggtggcctgtgagaaactgggcatccgtgtggtggacacacgccatgaggtcacggccgtctttgctgctgatgctatggcccgcctgtccgggacggtgggcgtggcggcagtgacagcaggccctggcctcaccaacacggtgactgcggtgaagaatgctcagatggctcagtccccaatcctgcttctgggtggggctgccagcactctgctgcagaaccggggtgcgctccaggctgttgatcagctgtcccttttccggccactctgtaagttttgtgtgtctgtgcggagggtgcgggacattgtgcccaccctgagggccgcgatggctgccgcccagtcgggcaccccaggtccggtgtttgtggagctgcccgttgacgtgctgtacccctacttcatggtccagaaggagatggtgccagccaagccacccaagggcctcgtgggccgagtggtctcctggtatttagagaattacctggccaacctctttgcaggagcctgggagcctcagcccgagggaccgctgcccctggacatcccccaggcttccccgcagcaggttcagcgctgtgtggagatcctgagccgggccaagaggcctctgatggtgctggggagtcaggccctgctcaccccaacgtctgccgacaagcttcgggctgccgtggagaccttgggtgttccctgcttccttggagggatggcacgggggctgttaggccgcaaccaccccctccacatccgggagaaccgcagtgcggccctgaagaaggcggatgtcattgtcctagcaggaactgtgtgtgacttccgcctatcctatggccgtgtcctcagccacagcagcaagatcatcatcgtcaatcgtaatcgggaagagatgttgctcaactcagacatcttctggaagccccaggaggctgtgcagggagatgtgggttccttcgtgctgaagttagtggagggccttcagggccagacctgggccccagactgggtggaggagctgcgggaagccgaccggcagaaggagcagacctttcgggagaaggcagcgatgcctgtggcccagcacctgaacccagtgcaggtgctgcagctggtggaggaaacgctacctgacaactcaattctggtggtggatggcggggacttcgtgggcactgctgcccatctggtacagccccgcggccccctgcgctggctcgatcctggggcctttgggactctgggagttggtgcaggatttgcacttggggccaagctgtgccggccagatgctgaggtctggtgcctgtttggggacggagcttttggctacagcctcatcgaatttgatacattcgtcagacacaagatcccagtgatggccttggtagggaatgatgctggctggacacagatttctcgggagcaggtgccctctctgggcagcaacgtggcctgtggcctggcctacactgattatcacaaggcagccatgggtctgggggcccggggcttgctgctctcacgggagaacgaggatcaggtggtcaaggtgctgcacgatgcccagcagcagtgccgagacggccacccggttgtggtcaacatcctcattgggaggacggacttccgcgatggctccattgctgtatagggccttgtgggtcaggacgcttggctgccttcctgcccctggactgtgtccagctggtttggagtctcatcattgcttgccctgggcctatcccatgaggcccagtgactccacaacctccctgaggaggggatggaggggtcaaatctcagagaggctctcttgtgagctcttggaccctcctcttcacggacccaactgtgccgtttgtcccctctcttatggagactgaataaaccacctctggcccatgtaggcccaagta

SEQ ID NO: 14174 - DNA, 725 bp, Homo sapiens
  source 1..725: mol_type = unassigned DNA
attctgctggaggcagcgccatatcctggaggtgaaggtaccacctcatggagacccccgcggccgccgcccccgctgggagcttattcccctccttcctgctcctggcctgcgggacgctggtggccgccttgctgggcgccgctcaccgcctggggctcttctatcagctgctgcacaaggtggacaaggcaagcgtccggcatggcggagagaacgtggccgctgtgctgagggcccatggtgtgcggttcatcttcacgctggtcggtgggcacatttccccgctgctggtggcctgtgagaaactgggcatccgtgtggtggacacacgccatgaggtcacggccgtctttgctgctgatgctatggcccgcctgtccgggacggtgggcgtggcggcagtgacagcaggccctggcctcaccaacacggtgactgcggtgaagaatgctcagatggctcagtccccaatcctgcttctgggtggggctgccagcactctgctgcagaaccggggtgcgctccaggctgttgatcagctgtcccttttccggccaccacccggttgtggtcaacatcctcattgggaggacggacttccgcgatggctccattgctgtatagggccttgtgggtcaggacgcttggctgccttcctgcccctggactgtgtccagctggtttggagtctcatcattgcttgccctgggcctatcccatga

SEQ ID NO: 14175 - DNA, 1090 bp, Homo sapiens
  source 1..1090: mol_type = unassigned DNA
gtgtggtgctgtcgtcgccaccttgacttgtggtggctagtttgggtgggagtggtggtgatgtaaaggactggggctagccccgcgaggggcgtgaccttgtcacggagaggcatggcttcaccccgagcctaggcgcacaaagggcgtggtctggcagggttgggggcgtggccgcacagaaactggcggcaagggtcgtggccctggatcctgctgcgagaaggggcgcgatttcttccggagaggttccctgtcgcgcccaagtctgggaagtgccctttctctcttaggtaccacctcatggagacccccgcggccgccgcccccgctgggagcttattcccctccttcctgctcctggcctgcgggacgctggtggccgccttgctgggcgccgctcaccgcctggggctcttctatcagctgctgcacaaggtggacaaggcaagcgtccggcatggcggagagaacgtggccgctgtgctgagggcccatggtgtgcggttcatcttcacgctggtcggtgggcacatttccccgctgctggtggcctgtgagaaactgggcatccgtgtggtggacacacgccatgaggtcacggccgtctttgctgctgatgctatggcccgcctgtccgggacggtgggcgtggcggcagtgacagcaggccctggcctcaccaacacggtgactgcggtgaagaatgctcagatggctcagtccccaatcctgcttctgggtggggctgccagcactctgctgcagaaccggggtgcgctccaggctgttgatcagctgtcccttttccggccactctgtaagttttgtgtgtctgtgcggagggtgcgggacattgtgcccaccctgagggccgcgatggctgccgcccagtcgggcaccccaggtccggtgtttgtggagctgcccgttgacgtgctgtacccctacttcatggtccagaaggagatggtgccagccaagccacccaagggcctcgtgggccgagtggtctcctggtatttagagaattacctggccaacctctttgcaggagcctgggagcctcagcccgagggaccgctgcccc

SEQ ID NO: 14176 - DNA, 788 bp, Homo sapiens
  source 1..788: mol_type = unassigned DNA
gaaggtgaatagcgtcgggggtcgagctggtgtgggagaaccacatcctgatgcgatgtgacctcgacccagcctggcccggggtcggggatcaggctcgggcccgtgcgctctttaagggagaggcgtgggttgcgtggagggtcgcgcccgctaacccgggggcgtgacctcgtgcctcttggtgacgtaacatggggcgggctcactactggggctgagatttggggtccggttgtggaaagagaggcggggcttccgcctgtccattgacaagtaggtaccacctcatggagacccccgcggccgccgcccccgctgggagcttattcccctccttcctgctcctggcctgcgggacgctggtggccgccttgctgggcgccgctcaccgcctggggctcttctatcagctgctgcacaaggtggacaaggcaagcgtccggcatggcggagagaacgtggccgctgtgctgagggcccatggtgtgcggttcatcttcacgctggtcggtgggcacatttccccgctgctggtggcctgtgagaaactgggcatccgtgtggtggacacacgccatgaggtcacggccgtctttgctgctgatgctatggcccgcctgtccgggacggtgggcgtggcggcagtgacagcaggccctggcctcaccaacacggtgactgcggtgaagaatgctcagatggctcagtccccaatcctgcttctgggtggggctgccagcactctgctgcagaaccggggtgcgctccaggctgttgatcagctg

SEQ ID NO: 14177 - DNA, 878 bp, Homo sapiens
  source 1..878: mol_type = unassigned DNA
gcatggcggccaccaggtgcctgcgctggggcctgagccgagccggagtctggctgctcccaccgcccgcacggtgcccacgccgggcgctgcacaagcagaaagacggcactgagttcaagagcatctacagcctggacaagctctaccccgaatctcagggctcggacaccgcctggagggtcccgaatggtgcaaagcaagccgacagtgacatccctctagatcgcttgacaatatcttattgtcggagtagtggtcctggggggcagaatgtgaacaaagtgaattccaaggcagaagtcaggttccatttggcaactgccgagtggatcgcggagcccgtgcggcagaagatagccatcacgcataaaaacaagatcaacaggttaggagagttgatcctcacctctgagagcagccgctatcagttccggaatctggcagattgcctgcagaaaattcgagacatgatcactgaggccagccagacaccgaaggagccaacaaaagaagatgttaaacttcatagaatcaggatagaaaacatgaatcgggaaaggctgagacaaaagagaattcattctgctgtaaagacaagcaggagggtcgacatggactgaaatcaccctctgcagctgggagggctcttctgggcgtccgggcagctgcagctgagaggactttcacaccataaggagatttctgtttttctttttggctgttaatgcttgtctataacattggagccatcacaagaatgttcatttggaatgaaggctgcaggcactggttgcagacgtctttataggcagtcaccatgttgtcaaaccttaataatgcacctcatgtattagtcacaataaaaatcagaactc

SEQ ID NO: 14178 - DNA, 1244 bp, Homo sapiens
  source 1..1244: mol_type = unassigned DNA
gaccctcacttggccttacactccgctcggctcaccatgtgtcactctcgcagctgccacccgaccatgaccatcctgcaggccccgaccccggccccctccaccatcccgggaccccggcggggctccggtcctgagatcttcaccttcgaccctctcccggagcccgcagcggcccctgccgggcgccccagcgcctctcgcgggcaccgaaagcgcagccgcagggttctctaccctcgagtggtccggcgccagctgccagtcgaggaaccgaacccagccaaaaggcttctctttctgctgctcaccatcgtcttctgccagatcctgatggctgaagagggtgtgccggcgcccctgcctccagaggacgcccctaacgccgcatccctggcgcccacccctgtgtccgccgtcctcgagccctttaatctgacttcggagccctcggactacgctctggacctcagcactttcctccagcaacacccggccgccttctaactgtgactccccgcactccccaaaaagaatccgaaaaaccacaaagaaacaccaggcgtacctggtgcgcgagagcgtatccccaactgggacttccgaggcaacttgaactcagaacactacagcggagacgccacccggtgcttgaggcgggaccgaggcgcacagagaccgaggcgcatagagaccgaggcacagcccagctggggctaggcccggtgggaaggagagcgtcgttaatttatttcttattgctcctaattaatatttatatgtatttatgtacgtcctcctaggtgatggagatgtgtacgtaatatttattttaacttatgcaagggtgtgagatgttccccctgctgtaaatgcaggtctcttggtatttattgagctttgtgggactggtggaagcaggacacctggaactgcggcaaagtaggagaagaaatggggaggactcgggtgggggaggacgtcccggctgggatgaagtctggtggtgggtcgtaagtttaggaggtgactgcatcctccagcatctcaactccgtctgtctactgtgtgagacttcggcggaccattaggaatgagatccgtgagatccttccatcttcttgaagtcgcctttagggtggctgcgaggtagagggttgggggttggtgggctgtcacggagcgactgtcgagatcgcctagtatgttctgtgaacacaaataaaattgatttactgtctgca

SEQ ID NO: 14179 - DNA, 1350 bp, Homo sapiens
  source 1..1350: mol_type = unassigned DNA
cacttggccttacactccgctcggctcaccatgtgtcactctcgcagctgccacccgaccatgaccatcctgcaggccccgaccccggccccctccaccatcccgggaccccggcggggctccggtcctgagatcttcaccttcgaccctctcccggagcccgcagcggcccctgccgggcgccccagcgcctctcgcgggcaccgaaagcgcagccgcagggttctctaccctcgagtggtgagtatcgccgaagtgggcattcgcggggtgcgctgccctggagtcactggggaacgacccgactccagaggcctcgacctgacctgtctcctgttttgtctccccttaggtccggcgccagctgccagtcgaggaaccgaacccagccaaaaggcttctctttctgctgctcaccatcgtcttctgccagatcctgatggctgaagagggtgtgccggcgcccctgcctccagaggacgcccctaacgccgcatccctggcgcccacccctgtgtccgccgtcctcgagccctttaatctgacttcggagccctcggactacgctctggacctcagcactttcctccagcaacacccggccgccttctaactgtgactccccgcactccccaaaaagaatccgaaaaaccacaaagaaacaccaggcgtacctggtgcgcgagagcgtatccccaactgggacttccgaggcaacttgaactcagaacactacagcggagacgccacccggtgcttgaggcgggaccgaggcgcacagagaccgaggcgcatagagaccgaggcacagcccagctggggctaggcccggtgggaaggagagcgtcgttaatttatttcttattgctcctaattaatatttatatgtatttatgtacgtcctcctaggtgatggagatgtgtacgtaatatttattttaacttatgcaagggtgtgagatgttccccctgctgtaaatgcaggtctcttggtatttattgagctttgtgggactggtggaagcaggacacctggaactgcggcaaagtaggagaagaaatggggaggactcgggtgggggaggacgtcccggctgggatgaagtctggtggtgggtcgtaagtttaggaggtgactgcatcctccagcatctcaactccgtctgtctactgtgtgagacttcggcggaccattaggaatgagatccgtgagatccttccatcttcttgaagtcgcctttagggtggctgcgaggtagagggttgggggttggtgggctgtcacggagcgactgtcgagatcgcctagtatgttctgtgaacacaaataaaattgatttactgtctgca

SEQ ID NO: 14180 - DNA, 1308 bp, Homo sapiens
  source 1..1308: mol_type = unassigned DNA
atgtgtcactctcgcagctgccacccgaccatgaccatcctgcaggccccgaccccggccccctccaccatcccgggaccccggcggggctccggtcctgagatcttcaccttcgaccctctcccggagcccgcagcggcccctgccgggcgccccagcgcctctcgcgggcaccgaaagcgcagccgcagggttctcccctcgagtggtgagtatcgccgaagtgggcattcgcggggtgcgctgccctggagtcactggggaacgacccgactccagggcctcgacctgacctgtctcctgttttgtctccccttagtccggcgccagctgccagtcgaggaaccgaacccagccaaaaggcttctctttctgctgctcaccatcgtcttctgccagatcctgatggctgaagagggtgtgccggcgcccctgcctccagaggacgcccctaacgccgcatccctggcgcccacccctgtgtccgccgtcctcgagccctttaatctgacttcggagccctcggactacgctctggacctcagcactttcctccagcaacacccggccgccttctaactgtgactccccgcactccccaaaaagaatccgaaaaaccacaaagaaacaccaggcgtacctggtgcgcgagagcgtatccccaactgggacttccgaggcaacttgaactcagaacactacagcggagacgccacccggtgcttgaggcgggaccgaggcgcacagagaccgaggcgcatagagaccgaggcacagcccagctggggctaggcccggtgggaaggagagcgtcgttaatttatttcttattgctcctaattaatatttatatgtatttatgtacgtcctcctaggtgatggagatgtgtacgtaatatttattttaacttatgcaagggtgtgagatgttccccctgctgtaaatgcaggtctcttggtatttattgagctttgtgggactggtggaagcaggacacctggaactgcggcaaagtaggagaagaaatggggaggactcgggtgggggaggacgtcccggctgggatgaagtctggtggtgggtcgtaagtttaggaggtgactgcatcctccagcatctcaactccgtctgtctactgtgtgagacttcggcggaccattaggaatgagatccgtgagatccttccatcttcttgaagtcgcctttagggtggctgcgaggtagagggttgggggttggtgggctgtcacggagcgactgtcgagatcgcctagtatgttctgtgaacacaaataaaattgatttac

SEQ ID NO: 14181 - DNA, 1244 bp, Homo sapiens
  source 1..1244: mol_type = unassigned DNA
gaccctcacttggccttacactccgctcggctcaccatgtgtcactctcgcagctgccacccgaccatgaccatcctgcaggccccgaccccggccccctccaccatcccgggaccccggcggggctccggtcctgagatcttcaccttcgaccctctcccggagcccgcagcggcccctgccgggcgccccagcgcctctcgcgggcaccgaaagcgcagccgcagggttctctaccctcgagtggtccggcgccagctgccagtcgaggaaccgaacccagccaaaaggcttctctttctgctgctcaccatcgtcttctgccagatcctgatggctgaagagggtgtgccggcgcccctgcctccagaggacgcccctaacgccgcatccctggcgcccacccctgtgtcccccgtcctcgagccctttaatctgacttcggagccctcggactacgctctggacctcagcactttcctccagcaacacccggccgccttctaactgtgactccccgcactccccaaaaagaatccgaaaaaccacaaagaaacaccaggcgtacctggtgcgcgagagcgtatccccaactgggacttccgaggcaacttgaactcagaacactacagcggagacgccacccggtgcttgaggcgggaccgaggcgcacagagaccgaggcgcatagagaccgaggcacagcccagctggggctaggcccggtgggaaggagagcgtcgttaatttatttcttattgctcctaattaatatttatatgtatttatgtacgtcctcctaggtgatggagatgtgtacgtaatatttattttaacttatgcaagggtgtgagatgttccctctgctgtaaatgcaggtctcttggtatttattgagctttgtgggactggtggaagcaggacacctggaactgcggcaaagtaggagaagaaatggggaggactcgggtgggggaggacgtcccggctgggatgaagtctggtggtgggtcgtaagtttaggaggtgactgcatcctccagcatctcaactccgtctgtctactgtgtgagacttcggcggaccattaggaatgagatccgtgagatccttccatcttcttgaagtcgcctttagggtggctgcgaggtagagggttgggggttggtgggctgtcacggagcgactgtcgagatcgcctagtatgttctgtgaacacaaataaaattgatttactgtctgca

SEQ ID NO: 14182 - DNA, 1350 bp, Homo sapiens
  source 1..1350: mol_type = unassigned DNA
cacttggccttacactccgctcggctcaccatgtgtcactctcgcagctgccacccgaccatgaccatcctgcaggccccgaccccggccccctccaccatcccgggaccccggcggggctccggtcctgagatcttcaccttcgaccctctcccggagcccgcagcggcccctgccgggcgccccagcgcctctcgcgggcaccgaaagcgcagccgcagggttctctaccctcgagtggtgagtatcgccgaagtgggcattcgcggggtgcgctgccctggagtcactggggaacgacccgactccagaggcctcgacctgacctgtctcctgttttgtctccccttaggtccggcgccagctgccagtcgaggaaccgaacccagccaaaaggcttctctttctgctgctcaccatcgtcttctgccagatcctgatggctgaagagggtgtgccggcgcccctgcctccagaggacgcccctaacgccgcatccctggcgcccacccctgtgtcccccgtcctcgagccctttaatctgacttcggagccctcggactacgctctggacctcagcactttcctccagcaacacccggccgccttctaactgtgactccccgcactccccaaaaagaatccgaaaaaccacaaagaaacaccaggcgtacctggtgcgcgagagcgtatccccaactgggacttccgaggcaacttgaactcagaacactacagcggagacgccacccggtgcttgaggcgggaccgaggcgcacagagaccgaggcgcatagagaccgaggcacagcccagctggggctaggcccggtgggaaggagagcgtcgttaatttatttcttattgctcctaattaatatttatatgtatttatgtacgtcctcctaggtgatggagatgtgtacgtaatatttattttaacttatgcaagggtgtgagatgttccctctgctgtaaatgcaggtctcttggtatttattgagctttgtgggactggtggaagcaggacacctggaactgcggcaaagtaggagaagaaatggggaggactcgggtgggggaggacgtcccggctgggatgaagtctggtggtgggtcgtaagtttaggaggtgactgcatcctccagcatctcaactccgtctgtctactgtgtgagacttcggcggaccattaggaatgagatccgtgagatccttccatcttcttgaagtcgcctttagggtggctgcgaggtagagggttgggggttggtgggctgtcacggagcgactgtcgagatcgcctagtatgttctgtgaacacaaataaaattgatttactgtctgca

SEQ ID NO: 14183 - DNA, 1350 bp, Homo sapiens
  source 1..1350: mol_type = unassigned DNA
cacttggccttacactccgctcggctcaccatgtgtcactctcgcagctgccacccgaccatgaccatcctgcaggccccgaccccggccccctccaccatcccgggaccccggcggggctccggtcctgagatcttcaccttcgaccctctcccggagcccgcagcggcccctgccgggcgccccagcgcctctcgcgggcaccgaaagcgcagccgcagggttctctaccctcgagtggtgagtatcgccgaagtgggcattcgcggggtgcgctgccctggagtcactggggaacgacccgactccagaggcctcgacctgacctgtctcctgttttgtctccccttaggtccggcgccagctgccagtcgaggaaccgaacccagccaaaaggcttctctttctgctgctcaccatcgtcttctgccagatcctgatggctgaagagggtgtgccggcgcccctgcctccagaggacgcccctaacgccgcatccctggcgcccacccctgtgtcccccgtcctcgagccctttaatctgacttcggagccctcggactacgctctggacctcagcactttcctccagcaacacccggccgccttctaactgtgactccccgcactccccaaaaagaatccgaaaaaccacaaagaaacaccaggcgtacctggtgcgcgagagcgtatccccaactgggacttccgaggcaacttgaactcagaacactacagcggagacgccacccggtgcttgaggcgggaccgaggcgcacagagaccgaggcgcatagagaccgaggcacagcccagctggggctaggcccggtgggaaggagagcgtcgttaatttatttcttattgctcctaattaatatttatatgtatttatgtacgtcctcctaggtgatggagatgtgtacgtaatatttattttaacttatgcaagggtgtgagatgttccccctgctgtaaatgcaggtctcttggtatttattgagctttgtgggactggtggaagcaggacacctggaactgcggcaaagtaggagaagaaatggggaggactcgggtgggggaggacgtcccggctgggatgaagtctggtggtgggtcgtaagtttaggaggtgactgcatcctccagcatctcaactccgtctgtctactgtgtgagacttcggcggaccattaggaatgagatccgtgagatccttccatcttcttgaagtcgcctttagggtggctgcgaggtagagggttgggggttggtgggctgtcacggagcgactgtcgagatcgcctagtatgttctgtgaacacaaataaaattgatttactgtctgca

SEQ ID NO: 14184 - DNA, 1244 bp, Homo sapiens
  source 1..1244: mol_type = unassigned DNA
gaccctcacttggccttacactccgctcggctcaccatgtgtcactctcgcagctgccacccgaccatgaccatcctgcaggccccgaccccggccccctccaccatcccgggaccccggcggggctccggtcctgagatcttcaccttcgaccctctcccggagcccgcagcggcccctgccgggcgccccagcgcctctcgcgggcaccgaaagcgcagccgcagggttctctaccctcgagtggtccggcgccagctgccagtcgaggaaccgaacccagccaaaaggcttctctttctgctgctcaccatcgtcttctgccagatcctgatggctgaagagggtgtgccggcgcccctgcctccagaggacgcccctaacgccgcatccctggcgcccacccctgtgtcccccgtcctcgagccctttaatctgacttcggagccctcggactacgctctggacctcagcactttcctccagcaacacccggccgccttctaactgtgactccccgcactccccaaaaagaatccgaaaaaccacaaagaaacaccaggcgtacctggtgcgcgagagcgtatccccaactgggacttccgaggcaacttgaactcagaacactacagcggagacgccacccggtgcttgaggcgggaccgaggcgcacagagaccgaggcgcatagagaccgaggcacagcccagctggggctaggcccggtgggaaggagagcgtcgttaatttatttcttattgctcctaattaatatttatatgtatttatgtacgtcctcctaggtgatggagatgtgtacgtaatatttattttaacttatgcaagggtgtgagatgttccccctgctgtaaatgcaggtctcttggtatttattgagctttgtgggactggtggaagcaggacacctggaactgcggcaaagtaggagaagaaatggggaggactcgggtgggggaggacgtcccggctgggatgaagtctggtggtgggtcgtaagtttaggaggtgactgcatcctccagcatctcaactccgtctgtctactgtgtgagacttcggcggaccattaggaatgagatccgtgagatccttccatcttcttgaagtcgcctttagggtggctgcgaggtagagggttgggggttggtgggctgtcacggagcgactgtcgagatcgcctagtatgttctgtgaacacaaataaaattgatttactgtctgca

SEQ ID NO: 14185 - DNA, 1350 bp, Homo sapiens; identical to SEQ ID NO: 14183
  source 1..1350: mol_type = unassigned DNA

SEQ ID NO: 14186 - DNA, 1244 bp, Homo sapiens; identical to SEQ ID NO: 14184
  source 1..1244: mol_type = unassigned DNA

SEQ ID NO: 14187 - DNA, 1350 bp, Homo sapiens; identical to SEQ ID NO: 14183
  source 1..1350: mol_type = unassigned DNA

SEQ ID NO: 14188 - DNA, 1244 bp, Homo sapiens; identical to SEQ ID NO: 14184
  source 1..1244: mol_type = unassigned DNA

SEQ ID NO: 14189 - DNA, 1350 bp, Homo sapiens; identical to SEQ ID NO: 14183
  source 1..1350: mol_type = unassigned DNA

SEQ ID NO: 14190 - DNA, 1244 bp, Homo sapiens; identical to SEQ ID NO: 14184
  source 1..1244: mol_type = unassigned DNA

SEQ ID NO: 14191 - DNA, 1481 bp, Homo sapiens
  source 1..1481: mol_type = unassigned DNA
atcggcttccgtaggaaggcgccggccgtggaggcgccacgtcccttgcggcggcgggagagaaatcgcttggacttcggggcggcctcggacggccatggcctttaccctgtactcactgctgcaggcagccctgctctgcgtcaacgccatcgcagtgctgcacgaggagcgattcctcaagaacattggctggggaacagaccagggaattggtggatttggagaagagccgggaattaaatcacagctaatgaaccttattcgatctgtaagaaccgtgatgagagtgccattgataatagtaaactcaattgcaattgtgttacttttattatttggatgaatatcagtggagaaaatggagactcagaagaggacatgccagtagaagttattactttggtcattattggaatatttatatcttagctggctgaccttgcacttgtcaaaaatgtaaagctgaaaataaaaccagggtttctatttatctgtttttttttttaatgttgcacttgtagtttcattacaaaagatcagatcatgaaaggcagtaactctccaggactggaatatctgattgctcagtgttaatagtagttcatgctgtggtgagattgttaaaagggtgcaagactgttgcttctctttttttagatatttttctatctctcacttctcagggatgaaattctttttcaaagttttgaagttccttgcaacttagccatgatgtgagtggttatccctagataaaattaaaaggatttttaaaaagtaattactgcacataaaatgataaataggtaatttgaataattttattttaagctccttggttaattattttgtctattgtctcagctataaattcaaatttatacatactattgagtattaatattctctgatttcagggagaattctgtcagtcacatgatgattatgtttttgtttaacattctttccatgcacttgttattttattaatttgcctgaatgatgagaccagaccagtgtctacagattttcattgtcagaaaaatctataagtctgccctttttacaatgatgatttaaaaaaaacaacagcgtaaatattagcccacaagagcagtcctaaacaatcacaattacactgtactacccaagaagactgtttattgtgaagcatttacctttcaaaaaatcattacatttctatttcttggtggagcagcacattgtggagtgtgattcttaattcttcattgagtttgtcaataggacattgatgctggataggttgtcttttgtttttatgtctcagaccatcttgtgagattgtttgcctatctcataatacagttttatgcagaaaggttgaaactatgtaaatggtttttatggaaattatcagttacaatattttaaaggtgtagaatggcatctttgtttataggagaacatttgtaaataaagttaaatttctaagtcaa

SEQ ID NO: 14192 - DNA, 2340 bp, Homo sapiens
  source 1..2340: mol_type = unassigned DNA
gcggccgcaagccgtcgccccctttaagagcctgctccgcgggactaacgttcgaacgggccctggcgcccctcctcgggctccgattggccgtgcgcggcgcacgagggcgcgccggccagccccggaacggttggcggcccttcgtgattggcggtcgagaagcctatataaggcgcggggcagccaggctgccctgtttagcgaccggacccgaaacggggaagttgtcttgtttggagaggttagtagagcagcgcgcgcgtcaccagagtcgtttctcttcggagtcttaggtgatcgagggtgtgcccagggggcggacttgtttgcgcctcccgttccctcccaatttccaaacgtgtcaccccggcgccgacggccctgtgcaggggaagcagatggagttcaagctggaggctcatcgcatcgtcagcatctctctgggcaagatctacaactcgcgggtccagcgcggcggcatcaagctgcataagaacctcctggtctcgctggtgctgcgcagcgcccgccaagtctacctgagcgacccgtgccccggcctctacctggccggtcccgctgggaccccggcgccgccaccgcagcagcagcccggggagccggcggccgggccacccgccggctggggagagccgcccccgcccgccgctcgtgcctcttggccggagaccgagccgcagccggagcgctcctccgtctcagacgcgccgcgggtaggggacgaggtgccggtggccacggtgactggagtcggggacgtttttcagggcggagaggcggacgcgacggaagctgcctggagccgcgtggaggggccgcgccaggcggcggccagagaagccgagggtaccgccggaggctggggcgtcttccccgaggtatctcgtgccgcgcgccgcccctgcggctgccccctaggcggggaggacccgccgggtacaccggccgcgaccccccgcgctgcctgctgctgcgcgccgcaaccagcggaggacgagccccccgcgccgcccgcggtgtgccccaggaagcgctgcgcggcgggggtgggcggcggcccagcgggctgcccggcgcccggctcgaccccgctcaagaagccccgccggaacttagagcagccgccgagtggaggagaggacgacgacgcggaggagatggagaccgggaacgtggctaacctcatcagcatcttcggttccagtttctcgggactcctacggaaaagccccgggggcggcagagaggaagaggagggagaggagagcggtccggaagccgccgagcccgggcagatctgctgcgataagccggtgctgagagacatgaacccctggagcacagccatcgtggccttctgagcccttggcccccctgcggggaggaggtggagcagcgggcgtccccgaagtgagggccaggcccttcccggctgcgaggacgcccagagaccgcgggcgctgagcgcgttgggcagactggttgcctctgggcatcgcaaactgcccccgggcgcatctggcttatctggagacctgggagcttgaggctcattggaagaggacgatcgttaacttttgtgtttgtgtatgtctgtgtatgtaagtttgtcttgtggcattaagactattttgctcttctggaatgcaccactccttccccagggtttaagagattgggggcagacagggactttcctctgccggctgcgtggagaaggaagcggctaaaaggtttgggccggggagttccccattcgttctccggggagggagggactttacacctacccctcaccggaaagctagacccgcttcagggccaggagtggcgtttccgcacaggatttcctaagacgagagggatttagccaagagcacagacttggattccttctgtccctccccacctttctctcccaatgaagaaacgtttatatcctgtgattactctaggaaaggggcgtattaacggtcctttgcttccccgcaggggagaaaaagcttgacgaacttcacagaagagttcaagcttggaaataatggagtttatagagaaaagatatatttttaaaagctctaggtcagaagtactacacagtgcttttaaaaagtgtttaatgagagtttacagacagaagcccgaagtggaaagaccttatggttttgtagatatggtgactccagtctttgttgtataaaggttgggggagctgataaggtttttgtacagtattttctccttcgttgtattgatttttgtataaaaatgtaacttctacgtgtctaacacgtattaaatattttgaagcaacgt

SEQ ID NO: 14193 - DNA, 966 bp, Homo sapiens
  source 1..966: mol_type = unassigned DNA
gtttagcgaccggacccgaaacggggaagttgtcttgtttggagaggttagtagagcagcgcgcgcgtcaccagagtcgtttctcttcggagtcttaggtgatcgagggtgtgcccagggggcggacttgtttgcgcctcccgttccctcccaatttccaaacgtgtcaccccggcgccgacggccctgtgcaggggaagcagatggagttcaagctggaggctcatcgcatcgtcagcatctctctgggcaagatctacaactcgcgggtccagcgcggcggcatcaagctgcataagaacctcctggtctcgctggtgctgcgcagcgcccgccaagtctacctgagcgacccgtgccccggcctctacctggccggtcccgctgggaccccggcgccgccaccgcagcagcagcccggggagccggcggccgggccacccgccggctggggagagccgcccccgcccgccgctcgtgcctcttggccggagaccgagccgcagccggagcgctcctccgtctcagacgcgccgcgggtaggggacgaggtgccggtggccacggtgactggagtcggggacgtttttcagggcagatctgctgcgataagccggtgctgagagacatgaacccctggagcacagccatcgtggccttctgagcccttggcccccctgcggggaggaggtggagcagcgggcgtccccgaagtgagggccaggcccttcccggctgcgaggacgcccagagaccgcgggcgctgagcgcgttgggcagactggttgcctctgggcatcgcaaactgcccccgggcgcatctggcttatctggagacctgggagcttgaggctcattggaagaggacgatcgttaacttttgtgtttgtgtatgtctgtgtatgtaagtttgtcttgtggcattaagactattttgctcttctggaatgcaccactccttcccca

SEQ ID NO: 14194 - DNA, 1659 bp, Homo sapiens
  source 1..1659: mol_type = unassigned DNA
taacctgctcaggtccccttccatgctgtggaagctttgtttttttgcactttgcagtaaatcttgctgctgctcattctttgggtccacactgcctttatgagctgtaacactcaccgtgaaggtctgcagcatcactcctgaaacctgtgaaacaacgaaccccccggggagaaacgaacaactccagactcgccgcctgaagagctgtaactctcacttcgaaggtctgcagcttcgctcctgagtcagtgaaaccacgaacccaccggaaggaagaaactctgaacacatccaaacatcagaaggaacaaactccggacacgcagcctttaagaattgtaacactcaccgcgagggtccgtggcttcattcttgaagtcagtgagacgaagaacccaccaattccggtaggagtaggaaatcacatcaccttcttttaatcagtctcaaatacctggccccttgtggaacctgcaagagccaggtttggcgaatgcaatgataagcaattgtctaatcactgccttgaaaaagagcagagcatttgagtatgctgtctcctcctctccctcacttcagttgggcccaacatgacagtcttaatggaagctcgggggtcaaaggctggtggcttacttcacgtatattgcagcatttcagtactgctctgcacgtgtgctcccccgcctgatgagcttactccagtgcccacagatacgacagagtgtcccaagtgcccctcacactctattagctgcatccttaacctctttttgccacaccataagcattgggttttgtttgttttgagatggagtcttgctctgttgccaggctggagtgcaatggcgtgatctcagctcactgcaatatctgcgtccagggttcaagcgattcccctgcctcagcctcctgtattagctgggactacaggcgcacaccaccacgcgcagctaatttttttgtattttagtagagaaggtttcacgatgttggccaggatggtctcaatctcctgacctcgtgatctgctcgcctcggccttccaaagtgctgggattacaggcatgagccacggcgcctggccagcattggggtattttattgaagatggaagccatgaatgttgagaaagcctcagcagatgggaacttgccagaggtgatctctaacatcaaggagactctgaagatagtgtccaggacaccagttaacatcactatggcaggggactctggcaatgggatgtccaccttcatcagtgcccttcgaaacacaggacatgagggtaaggcctcacctcctactgagctggtaaaagctacccaaagatgtgcctcctatttctcttcccacttttcaaatgtggtgttgtgggacctgcctggcacagggtctgccaccacaaccctggagaactacctgatggaaatgcagttcaaccggtatgacttcatcatggttgcatctgcacaattcagcatgaatcatgtgatgcttgccaaaaccgctgaggacatgggaaagaagttctacattgtctggaccaagctagacatggacctcagcacaggtgccctcccagaagtgcagctactgcagatcagagaaaatgtcctggaaaatctccagaaggagcgggtatgtgaatactaa

SEQ ID NO: 14195 - DNA, 1862 bp, Homo sapiens
  source 1..1862: mol_type = unassigned DNA
acttcgcgctcaagcgaccggatcttcaaaccgtgggagtggtgcggcggctagagtccctggactcctcaacctagggagctactcgcgaggtaaggggcgcgccagactggctcctaaaacgcactcgctcgtccgcactcctcgcgctccgaattcagcctcgcctcacccgggcttcagagcccacagaacttctcagccccgtgtcggcgacgaggagctcatggtaaaacagcgcctagggttttgcttgtttgtttgcttttaacagatgcctacgacttgtaacgggctgcctggtaaaatgagtctatggaaacggttgccagggccggctaacagcggctcccggaagtcctttgatgctttgttaacagtgaagctactggaccaatgaggtgcttcttccggttttgtccgcgctcgcctaattcttctttatcaaggttgcctttgaccccggaaaagagatcttccgggttcctctctccccaagatggctgctgaggacgagttacagctgccgcggctccccgagctgttcgaaactggtagacagttactggacgaagtagaagtggcgactgaacccgccggttcccggatagtccaggagaaggtgttcaagggcttggacctccttgagaaggctgccgaaatgttatcgcagctcgacttgttcagccgaaatgaagatttggaagagattgcttccaccgacctgaagtaccttttggtgccagcgtttcaaggagccctcaccatgaaacaagtcaaccccagcaagcgtctagatcatttgcagcgggctcgagaacactttataaactacttaactcagtgccattgctatcatgtggcagagtttgagctgcccaaaaccatgaacaactctgctgaaaatcacactgccaattcctccatggcttatcctagtctcgttgctatggcatctcaaagacaggctaaaatacagagatacaagcagaagaaggagttggagcataggttgtctgcaatgaaatctgctgtggaaagtggtcaagcagatgatgagcgtgttcgtgaatattatcttcttcaccttcagaggtggattgatatcagcttagaagagattgagagcattgaccaggaaataaagatcctgagagaaagagactcttcaagagaggcatcaacttctaactcatctcgccaggagaggcctccagtgaaacccttcattctcactcggaacatggctcaagccaaagtatttggagctggttatccaagtctgccaactatgacggtgagtgactggtatgagcaacatcggaaatatggagcattaccggatcagggaatagccaaggcagcaccagaggaattcagaaaagcagctcagcaacaggaagaacaagaagaaaaggaggaagaggatgatgaacaaacactccacagagcccgggagtgggatgactggaaggacacccatcctaggggctatgggaaccgacagaacatgggctgatcttcccacaacaccacaggactgcagggtgcacaactcccctgccaaggaaaaccatgcagtcctcccctccctggtctcctgcttcagctctgtacaacgagggcaaagatgctaaatcttgctttgcattcagtaaagtgtcaagtgattaagtgtgtatttgtaccctagatgatatgaaccagcagtcttgttttggcatcatcctcatcatgttgtattccagcttcttaagtggaaggaaaagagtgctgagaaatggctctgtataatctatggctatccgaattctctgaaaaaataataaaagtcccctctattatatgagcctgtacagaaa

SEQ ID NO: 14196 - DNA, 1666 bp, Homo sapiens
  source 1..1666: mol_type = unassigned DNA
cgaccggatcttcaaaccgtgggagtggtgcggcggctagagtccctggactcctcaacctagggagctactcgcgagatgcctacgacttgtaacgggctgcctggtaaaatgagtctatggaaacggttgccagggccggctaacagcggctcccggaagtcctttgatgctttgttaacagtgaagctactggaccaatgaggtgcttcttccggttttgtccgcgctcgcctaattcttctttatcaaggttgcctttgaccccggaaaagagatcttccgggttcctctctccccaagatggctgctgaggacgagttacagctgccgcggctccccgagctgttcgaaactggtagacagttactggacgaagtagaagtggcgactgaacccgccggttcccggatagtccaggagaaggtgttcaagggcttggacctccttgagaaggctgccgaaatgttatcgcagctcgacttgttcagccgaaatgaagatttggaagagattgcttccaccgacctgaagtaccttttggtgccagcgtttcaaggagccctcaccatgaaacaagtcaaccccagcaagcgtctagatcatttgcagcgggctcgagaacactttataaactacttaactcagtgccattgctatcatgtggcagagtttgagctgcccaaaaccatgaacaactctgctgaaaatcacactgccaattcctccatggcttatcctagtctcgttgctatggcatctcaaagacaggctaaaatacagagatacaagcagaagaaggagttggagcataggttgtctgcaatgaaatctgctgtggaaagtggtcaagcagatgatgagcgtgttcgtgaatattatcttcttcaccttcagaggtggattgatatcagcttagaagagattgagagcattgaccaggaaataaagatcctgagagaaagagactcttcaagagaggcatcaacttctaactcatctcgccaggagaggcctccagtgaaacccttcattctcactcggaacatggctcaagccaaagtatttggagctggttatccaagtctgccaactatgacggtgagtgactggtatgagcaacatcggaaatatggagcattaccggatcagggaatagccaaggcagcaccagaggaattcagaaaagcagctcagcaacaggaagaacaagaagaaaaggaggaagaggatgatgaacaaacactccacagagcccgggagtgggatgactggaaggacacccatcctaggggctatgggaaccgacagaacatgggctgatcttcccacaacaccacaggactgcagggtgcacaactcccctgccaaggaaaaccatgcagtcctcccctccctggtctcctgcttcagctctgtacaacgagggcaaagatgctaaatcttgctttgcattcagtaaagtgtcaagtgattaagtgtgtatttgtaccctagatgatatgaaccagcagtcttgttttggcatcatcctcatcatgttgtattccagcttcttaagtggaaggaaaagagtgctgagaaatggctctgtataatctatggctatccgaattctctgaaaaaataataaaagtcccctctattatatgagcctgtacagaaa

SEQ ID NO: 14197 - DNA, 1438 bp, Homo sapiens
  source 1..1438: mol_type = unassigned DNA
agcatttaaacttcagacttcaaccacagttgtgattgtttttagtttgttagctgcctggagtgttattttaagaaagcagaagcaccatcatttgcacactccttatagatcacacaccttaaccctgactttttttgctccagtttttcagaagaagtgaagtcaagatgaagaaccatttgcttttctggggagtcctggcggtttttattaaggctgttcatgtgaaagcccaagaagatgaaaggattgttcttgttgacaacaaatgtaagtgtgcccggattacttccaggatcatccgttcttccgaagatcctaatgaggacattgtggagagaaacatccgaattattgttcctctgaacaacagggagaatatctctgatcccacctcaccattgagaaccagatttgtgtaccatttgtctgacctctgtaaaaaatgtgatcctacagaagtggagctggataatcagatagttactgctacccagagcaatatctgtgatgaagacagtgctacagagacctgctacacttatgacagaaacaagtgctacacagctgtggtcccactcgtatatggtggtgagaccaaaatggtggaaacagccttaaccccagatgcctgctatcctgactaatttaagtcattgctgactgcatagctctttttcttgagaggctctccattttgattcagaaagttagcatatttattaccaatgaatttgaaaccagggcttttttttttttttgggtgatgtaaaaccaactccctgccaccaaaataattaaaatagtcacattgttatctttattaggtaatcacttcttaattatatgttcatactctaagtatcaaaatcttccaattatcatgctcacctgaaagaggtatgctctcttaggaatacagtttctagcattaaacaaataaacaaggggagaaaataaaactcaaggactgaaaatcaggaggtgtaataaaatgttcctcgcattcccccccgcttttttttttttttttgactttgccttggagagccagagcttccgcattttctttactattctttttaaaaaaagtttcactgtgtagagaacatatatgcataaacataggtcaattatatgtctccattagaaaaataataattggaaaacatgttctagaactagttacaaaaataatttaaggtgaaatctctaatatttataaaagtagcaaaataaatgcataattaaaatatatttggacataacagacttggaagcagatgatacagacttctttttttcataatcaggttagtgtaagaaattgccatttgaaacaatccattttgtaactgaaccttatgaaatatatgtatttcatggtacgtattctctagcacagtctgagcaattaaatagattcataagcata

SEQ ID NO: 14198 - DNA, 275 bp, Homo sapiens
  source 1..275: mol_type = unassigned DNA
gacttggaagtaaaatatagagcttctactgaaatatttgtttttcagaagaagtgaagtcaagatgaagaaccatttgcttttctggggagtcctggcggtttttattaaggctgttcatgtgaaagcccaagaagatgaaaggattgttcttgttgacaacaaatgtaagtgtgcccggattacttccaggatcatccgttcttccgaagatcctaatgaggacattgtggagagaaacatccgaattattgttcctctgaacaacagggaga

SEQ ID NO: 14199 - DNA, 640 bp, Homo sapiens
  source 1..640: mol_type = unassigned DNA
gggaccttaaaggactttcatttctctccccttccttcatctctcctccttcacttaccttcatttattattctaggcatgacaagtgtcagatgtctgatttgaagactaatatgaatatatctagtttttcagaagaagtgaagtcaagatgaagaaccatttgcttttctggggagtcctggcggtttttattaaggctgttcatgtgaaagcccaagaagatgaaaggattgttcttgttgacaacaaatgtaagtgtgcccggattacttccaggatcatccgttcttccgaagatcctaatgaggacattgtggagagaaacatccgaattattgttcctctgaacaacagggagaatatctctgatcccacctcaccattgagaaccagatttgtgtaccatttgtctgacctctgtaaaaaatgtgatcctacagaagtggagctggataatcagatagttactgctacccagagcaatatctgtgatgaagacagtgctacagagacctgctacacttatgacagaaacaagtgctacacagctgtggtcccactcgtatatggtggtgagaccaaaatggtggaaacagccttaaccccagatgcctgctatcctgactaatttaagtca

SEQ ID NO: 14200 - DNA, 528 bp, Homo sapiens
  source 1..528: mol_type = unassigned DNA
atgaagaaccatttgcttttctggggagtcctggcggtttttattaaggctgttcatgtgaaaggttcaagagattcttctgcctcagcctcccgagtagctgggattacagcccaagaagatgaaaggattgttcttgttgacaacaaatgtaagtgtgcccggattacttccaggatcatccgttcttccgaagatcctaatgaggacattgtggagagaaacatccgaattattgttcctctgaacaacagggagaatatctctgatcccacctcaccattgagaaccagatttgtgtaccatttgtctgacctctgtaaaaaatgtgatcctacagaagtggagctggataatcagatagttactgctacccagagcaatatctgtgatgaagacagtgctacagagacctgctacacttatgacagaaacaagtgctacacagctgtggtcccactcgtatatggtggtgagaccaaaatggtggaaacagccttaaccccagatgcctgctatcctgactaa

SEQ ID NO: 14201 - DNA, 901 bp, Homo sapiens
  source 1..901: mol_type = unassigned DNA
ggccacatggactggggtgcaatgggacagctgctgccagcgagagggaccagggcaccactctctagggagcccacactgcaagtcaggccacaaggacctctgaccctgagggccgatgaggccagggacaggccaggggggccttgaggcccctggtgagccaggccccaacctcaggcagcgctggcccctgctgctgctgggtctggccgtggtaacccatggcctgctgcgcccaacagctgcatcgcagagcagggccctgggccctggagcccctggaggaagcagccggtccagcctgaggagccggtggggcaggttcctgctccagcgcggctcctggactggccccaggtgctggccccgggggtttcaatccaagcataactcagtgacgcatgtgtttggcagcgggacccagctcaccgttttaagtcagcccaaggccaccccctcggtcactctgttcccgccgtcctctgaggagctccaagccaacaaggctacactggtgtgtctcatgaatgacttttatccgggaatcttgacggtgacctggaaggcagatggtacccccatcacccagggcgtggagatgaccacgccctccaaacagagcaacaacaagtacgcggccagcagctacctgagcctgacgcccgagcagtggaggtcccgcagaagctacagctgccaggtcatgcacgaagggagcaccgtggagaagacggtggcccctgcagaatgttcataggttcccagccccgaccccacccaaaggggcctggagctgcaggatcccaggggaagggtctctctctgcatcccaagccatccagcccttctccctgtacccagtaaaccctaaataaataccctctttgtcaaccagaaa

SEQ ID NO: 14202 - DNA, 716 bp, Homo sapiens
  source 1..716: mol_type = unassigned DNA
gagcccacactgcaagtcaggccacaaggacctctgaccctgagggccgatgaggccagggacaggccaggggggccttgaggcccctggtgagccaggccccaacctcaggcagcgctggcccctgctgctgctgggtctggccgtggtaacccatggcctgctgcgcccaacagctgcatcgcagagcagggccctgggccctggagcccctggaggaagcagccggtccagcctgaggagccggtggggcaggtcagcccaaggccaccccctcggtcactctgttcccgccgtcctctgaggagctccaagccaacaaggctacactggtgtgtctcatgaatgacttttatccgggaatcttgacggtgacctggaaggcagatggtacccccatcacccagggcgtggagatgaccacgccctccaaacagagcaacaacaagtacgcggccagcagctacctgagcctgacgcccgagcagtggaggtcccgcagaagctacagctgccaggtcatgcacgaagggagcaccgtggagaagacggtggcccctgcagaatgttcataggttcccagccccgaccccacccaaaggggcctggagctgcaggatcccaggggaagggtctctctctgcatcccaagccatccagcccttctccctgtacccagtaaaccctaaataaataccctctttgtcaaccagaaa

SEQ ID NO: 14203 - DNA, 3961 bp, Homo sapiens
  source 1..3961: mol_type = unassigned DNA
gcgaaccgcgtgcgtaacgcacgggcccggcggggaacaccggtccgctgtaacaccggcccggcgcagaagcgggacgtcggcttctaggggcccaggccggcggcggcgatggcctcggcagctgtggagagcttcgtgaccaagcaactggacctgctggagcttgagagagacgcggaggtggaggagcgcaggtcctggcaggagaacatctctctgaaagagctccagagccgaggcgtgtgtttgctgaagctgcaggtatccagccagcgcactgggctgtacggacggctgctggtcacctttgagcccaggcgatacgggtccgcggcagctcttcccagtaacagctttacttctggtgatatcgtgggcctgtacgatgctgctaatgagggcagtcagctggccactgggatcttgacccgggtcacccagaagtcggtcacggtggcctttgatgagtcccacgatttccagttgagcttggaccgagagaattcctacagactgttaaaacttgccaatgatgtcacttacaggcgactgaaaaaagccctgattgctctaaagaagtatcattctggcccagcctcctcactcatagaagtgctctttggcagatctgctcccagtcctgccagtgaaatacacccgctgacattcttcaacacctgcctggacacctcccagaaagaagcggttttatttgcgctgtctcagaaagaacttgccatcatccatggacctcctggcactgggaaaaccacgactgtggttgagatcattcttcaagctgtgaaacaaggcttaaaggttctgtgctgcgccccctccaacatcgccgtggacaatctggtggagcgcctggctctgtgtaagcagcggattctgcgcctgggacaccctgcccgcctcctggagtccattcagcagcactccctggatgcggttttagcgcggagcgacagtgcccagattgttgcagatatcaggaaggacatcgaccaggtctttgtgaaaaacaaaaagacccaggataagagagagaaaagtaattttcgaaatgaaattaagctgttaagaaaagaactgaaggagagggaagaagcagctatgctcgagagcctcacttcggcaaacgtggtccttgcaacaaacacaggtgcgtctgccgatggccccctgaagttgctgcccgagagctacttcgacgtggtggtcattgacgagtgtgcccaggccctcgaggcgagctgctggatccccctgctgaaggccagaaagtgcatcctggcgggcgatcacaagcagctgccccccaccacagtctctcacaaggctgcgctggcaggactgtcactcagcctgatggaacgcctggctgaggagtacggcgcgagggtggtgcggacactgacggtgcagtaccgcatgcaccaggctatcatgcgctgggcctcagacaccatgtaccttgggcagctcacagcccactcttccgtggcaaggcacctcctgagggacctcccaggtgtggctgccacagaagagacgggtgtgcccctgctcttggtggacaccgccggctgcgggctgtttgagctggaggaggaggacgaacagtcgaaagggaaccctggcgaagtccgcctcgtcagtttgcacatccaggctctggtggacgctggtgttccagcccgtgacattgctgtggtctcgccatacaacctccaggtggacctgctcagacagagccttgtgcacaggcaccctgagcttgaaatcaagtctgtcgatggcttccaaggccgagagaaggaggccgtgatactgtccttcgtcagatccaacaggaaaggtgaagttggttttcttgctgaggaccggaggatcaacgtggctgtcacccgtgcccgacgccacgtggcggtcatctgtgactcccgtactgtcaacaaccatgcatttttgaagaccctggtggagtatttcacacagcatggggaagtacgcacggcctttgagtatcttgacgatattgtcccagaaaactattcccatgagaactcccagggttccagccacgctgccaccaagccccagggacctgctacgtccaccaggaccggaagccagcggcaggagggaggccaggaggctgcagcacctgccagacagggccggaagaagccggctgggaagtctctggcctctgaagctccatctcagcccagcctcaacggaggcagcccagagggagtggagagccaagatggcgtggaccacttccgggccatgatagtggagttcatggccagcaagaagatgcagttggagtttcctccttccctcaattcccacgacaggctgcgggtccaccaaatagccgaggagcacgggctgaggcacgacagttccggggaagggaagaggaggttcatcactgtgagcaagagggccccgcgaccccgagcagccctgggacccccagcagggaccggtggcccagcccctctccagccagtgccccctacccctgcgcagacagagcagcctcccagggagcagcgtggcccagaccagcctgatctgaggacgctgcacctggagagactgcagagggtcaggagcgcgcaggggcagcccgccagcaaggagcagcaggcctcagggcagcagaaacttccagaaaagaaaaagaaaaaagccaaaggacatccggccacagatctgcccacggaggaggactttgaggccctggtttctgccgccgttaaggctgataacacctgcggctttgccaagtgcacagccggcgtcacaaccctgggccagttctgccagctctgcagccgccgctactgcctcagccaccacctgcccgagatccatggctgcggtgagagggctcgcgcccatgcccggcagagaatcagccgggaaggggtcctctatgccggcagcgggaccaagaacggatccctggacccagccaagagggcccagctgcagaggaggctggataagaagctgagtgagctcagcaaccagaggaccagccggaggaaggagagggggacgtgaccggccgcatccttgcacgccccgcggagctctctccatggtagcccagggcgctggcagaccatgctccgcctccaccagggccacagaggagcggaggggcctatgggggaggagcggagggccctgttggggaaggttgggtttttggaccccagggataagcttttccgatgtcacaatgtggaggaaagcacctgggggacaacagtgctcgtgcaggtggggcttgggaaatgcacgtcccttccccttactccccgccaaaacccacatcccagcctctggatcctggggaaggttccagtccctggagaatacccagggcctcaaacttgaagtcactcctccaatgtctgggacttgccagctcagcccgttaggatgagggtgctgagaggaaacaggaaacaagactgcgaatggcgctcaggcagggagcagggagtggcgtttggcttgcacgttcccatgtggccagatgctggggccactttccttctgtctgctggtgactgcagtgttccccctcctcctcaccacggggctcctgtgagtctggggggcacctctttctggcctgtgcacctctctctggcttataaaggtgcctggcctgtgccagcccctccttgttgcgcctcaccgtggggaccaggtgagccggctctcccacgtggttgtcccgggaaagctgccccacagcctcagcatcttcagcacttaccgatccagagcctcccggccttctccggtgtcctgtaccaactcttctatttaagagaacctcagatgatgtacctgagcctcagggttttgtttcagagggatataaattatttaaaaattaaatgaaaacgttgcacac

SEQ ID NO: 14204 - DNA, 2371 bp, Homo sapiens
  source 1..2371: mol_type = unassigned DNA
aaaaaaatttggcatctcttcccccctcaagtttctggtgtcacttatgaaacacaggtccttgttgctgcagagaagcagttgttttgctggaaggagggagtgcgcgggctgccccgggctcctccctgccgcctcctctcagtggatggttccaggcaccctgtctggggcagggagggcacaggcctgcacatcgaaggtggggtgggaccaggctgcccctcgccccagcatccaagtcctcccttgggcgcccgtggccctgcagactctcagggctaaggtcctctgttgctttttggttccaccttagaagaggctccgcttgactaagagtagcttgaaggaggcaccatgcaggagctgcatctgctctggtgggcgcttctcctgggcctggctcaggcctgccctgagccctgcgactgtggggaaaagtatggcttccagatcgccgactgtgcctaccgcgacctagaatccgtgccgcctggcttcccggccaatgtgactacactgagcctgtcagccaaccggctgccaggcttgccggagggtgccttcagggaggtgcccctgctgcagtcgctgtggctggcacacaatgagatccgcacggtggccgccggagccctggcctctctgagccatctcaagagcctggacctcagccacaatctcatctctgactttgcctggagcgacctgcacaacctcagtgccctccaattgctcaagatggacagcaacgagctgaccttcatcccccgcgacgccttccgcagcctccgtgctctgcgctcgctgcaactcaaccacaaccgcttgcacacattggccgagggcaccttcaccccgctcaccgcgctgtcccacctgcagatcaacgagaaccccttcgactgcacctgcggcatcgtgtggctcaagacatgggccctgaccacggccgtgtccatcccggagcaggacaacatcgcctgcacctcaccccatgtgctcaagggtacgccgctgagccgcctgccgccactgccatgctcggcgccctcagtgcagctcagctaccaacccagccaggatggtgccgagctgcggcctggttttgtgctggcactgcactgtgatgtggacgggcagccggcccctcagcttcactggcacatccagatacccagtggcattgtggagatcaccagccccaacgtgggcactgatgggcgtgccctgcctggcacccctgtggccagctcccagccgcgcttccaggcctttgccaatggcagcctgcttatccccgactttggcaagctggaggaaggcacctacagctgcctggccaccaatgagctgggcagtgctgagagctcagtggacgtggcactggccacgcccggtgagggtggtgaggacacactggggcgcaggttccatggcaaagcggttgagggaaagggctgctatacggttgacaacgaggtgcagccatcagggccggaggacaatgtggtcatcatctacctcagccgtgctgggaaccctgaggctgcagtcgcagaaggggtccctgggcagctgcccccaggcctgctcctgctgggccaaagcctcctcctcttcttcttcctcacctccttctagccccacccagggcttccctaactcctccccttgcccctaccaatgcccctttaagtgctgcaggggtctggggttggcaactcctgaggcctgcatgggtgacttcacattttcctacctctccttctaatctcttctagagcacctgctatccccaacttctagacctgctccaaactagtgactaggatagaatttgatcccctaactcactgtctgcggtgctcattgctgctaacagcattgcctgtgctctcctctcaggggcagcatgctaacggggcgacgtcctaatccaactgggagaagcctcagtggtggaattccaggcactgtgactgtcaagctggcaagggccaggattgggggaatggagctggggcttagctgggaggtggtctgaagcagacagggaatgggagaggaggatgggaagtagacagtggctggtatggctctgaggctccctggggcctgctcaagctcctcctgctccttgctgttttctgatgatttgggggcttgggagtccctttgtcctcatctgagactgaaatgtggggatccaggatggccttccttcctcttacccttcctccctcagcctgcaacctctatcctggaacctgtcctccctttctccccaactatgcatctgttgtctgctcctctgcaaaggccagccagcttgggagcagcagagaaataaacagcatttctgatgccc

SEQ ID NO: 14205 - DNA, 2175 bp, Homo sapiens
  source 1..2175: mol_type = unassigned DNA
gcaaagtgctgggggaggggggtggctggaaaacagatttcaagtcataaagtcagctaggaacaggccgaggcagggagaactctccactcggaggaggagctggggtcctcttccatcccgtcttcatcctgcctggctgcgtgacctcgggaggcaccatgcaggagctgcatctgctctggtgggcgcttctcctgggcctggctcaggcctgccctgagccctgcgactgtggggaaaagtatggcttccagatcgccgactgtgcctaccgcgacctagaatccgtgccgcctggcttcccggccaatgtgactacactgagcctgtcagccaaccggctgccaggcttgccggagggtgccttcagggaggtgcccctgctgcagtcgctgtggctggcacacaatgagatccgcacggtggccgccggagccctggcctctctgagccatctcaagagcctggacctcagccacaatctcatctctgactttgcctggagcgacctgcacaacctcagtgccctccaattgctcaagatggacagcaacgagctgaccttcatcccccgcgacgccttccgcagcctccgtgctctgcgctcgctgcaactcaaccacaaccgcttgcacacattggccgagggcaccttcaccccgctcaccgcgctgtcccacctgcagatcaacgagaaccccttcgactgcacctgcggcatcgtgtggctcaagacatgggccctgaccacggccgtgtccatcccggagcaggacaacatcgcctgcacctcaccccatgtgctcaagggtacgccgctgagccgcctgccgccactgccatgctcggcgccctcagtgcagctcagctaccaacccagccaggatggtgccgagctgcggcctggttttgtgctggcactgcactgtgatgtggacgggcagccggcccctcagcttcactggcacatccagatacccagtggcattgtggagatcaccagccccaacgtgggcactgatgggcgtgccctgcctggcacccctgtggccagctcccagccgcgcttccaggcctttgccaatggcagcctgcttatccccgactttggcaagctggaggaaggcacctacagctgcctggccaccaatgagctgggcagtgctgagagctcagtggacgtggcactggccacgcccggtgagggtggtgaggacacactggggcgcaggttccatggcaaagcggttgagggaaagggctgctatacggttgacaacgaggtgcagccatcagggccggaggacaatgtggtcatcatctacctcagccgtgctgggaaccctgaggctgcagtcgcagaaggggtccctgggcagctgcccccaggcctgctcctgctgggccaaagcctcctcctcttcttcttcctcacctccttctagccccacccagggcttccctaactcctccccttgcccctaccaatgcccctttaagtgctgcaggggtctggggttggcaactcctgaggcctgcatgggtgacttcacattttcctacctctccttctaatctcttctagagcacctgctatccccaacttctagacctgctccaaactagtgactaggatagaatttgatcccctaactcactgtctgcggtgctcattgctgctaacagcattgcctgtgctctcctctcaggggcagcatgctaacggggcgacgtcctaatccaactgggagaagcctcagtggtggaattccaggcactgtgactgtcaagctggcaagggccaggattgggggaatggagctggggcttagctgggaggtggtctgaagcagacagggaatgggagaggaggatgggaagtagacagtggctggtatggctctgaggctccctggggcctgctcaagctcctcctgctccttgctgttttctgatgatttgggggcttgggagtccctttgtcctcatctgagactgaaatgtggggatccaggatggccttccttcctcttacccttcctccctcagcctgcaacctctatcctggaacctgtcctccctttctccccaactatgcatctgttgtctgctcctctgcaaaggccagccagcttgggagcagcagagaaataaacagcatttctgatgccc

SEQ ID NO: 14206 - DNA, 570 bp, Homo sapiens
  source 1..570: mol_type = unassigned DNA
acaatccctagcttggagccgtccagggggcatctgcttcttccacaacccacaactgaggccccagaaatcccagctgcgtttgggctgagcctctggcctcacccaagtcagctgagaggaggcaccatgcaggagctgcatctgctctggtgggcgcttctcctgggcctggctcaggcctgccctgagccctgcgactgtggggaaaagtatggcttccagatcgccgactgtgcctaccgcgacctagaatccgtgccgcctggcttcccggccaatgtgactacactgagcctgtcagccaaccggctgccaggcttgccggagggtgccttcagggaggtgcccctgctgcagtcgctgtggctggcacacaatgagatccgcacggtggccgccggagccctggcctctctgagccatctcaagagcctggacctcagccacaatctcatctctgactttgcctggagcgacctgcacaacctcagtgccctccaattgctcaagatggacagcaacgagctgaccttcatcccccgcgacgccttccgcagcctccgtgct

SEQ ID NO: 14207 - DNA, 585 bp, Homo sapiens
  source 1..585: mol_type = unassigned DNA
gcacaaggggcctcgtctgggccaaggaggcaccatgcaggagctgcatctgctctggtgggcgcttctcctgggcctggctcaggcctgccctgagccctgcgactgtggggaaaagtatggcttccagatcgccgactgtgcctaccgcgacctagaatccgtgccgcctggcttcccggccaatgtgactacactgagcctgtcagccaaccggctgccaggcttgccggagggtgccttcagggaggtgcccctgctgcagtcgctgtggctggcacacaatgagatccgcacggtggccgccggagccctggcctctctgagccatctcaagagcctggacctcagccacaatctcatctctgactttgcctggagcgacctgcacaacctcagtgccctccaattgctcaagatggacagcaacgagctgaccttcatcccccgcgacgccttccgcagcctccgtgctctgcgctcgctgcaactcaaccacaaccgcttgcacacattggccgagggcaccttcaccccgctcaccgcgctgtcccacctgcagatcaacgagaaccccttcgactg

SEQ ID NO: 14208 - DNA, 4817 bp, Homo sapiens
  source 1..4817: mol_type = unassigned DNA
ctcaaatcggggtattgatctccacggaagccccaaaccctcgccatcgagagacccccatggcccggggtgatggctgtggggcttggtgctcccagagagctcagtggctacagaatgggtggggattctgcgtgtctcccggagcctgaacccctttcctggttatggccggtagctgtctccagggctaacgtgggcagcgcaggggggcggaaaccgggttttagccaaatgcctcgacatcgccgcgcctccgcctcctcgtcgctgaaagaaatgtcggggtttcatcagagctagggagcgacagtcgggaacagcgagtctgccgaagccggctgttgtgtgagggtgtgagacggcggggcggtgaggggccaccgcggcttgggggatagtgcgtgtggggttgaccgtgtgtctgcttgagaggctgtgaagatatggggggcagatatgggagaaatgctcgggcctgaagtccccagcccaccgtgctcaagagtagcggacgttttgccaccatccttgtctgtgctactgtctgctgcagcttccgtgccccgttctcctggagcagggcgtaaaagcggcttgcattcaattagcagcgaagctcgcgggcgctggcgggacaggcgcgtgaggccacaacacatgcgtgtatcttgcttgggctatcttccctgctctgccacgccgggtctggagaaggggtttcagccccaggacatttactgagagtcggcgaatattgggagccgcgatgttcccccttcgggccctgtggttggtctgggcgcttctaggagtggccggatcatgcccggagccgtgcgcctgcgtggacaagtacgctcaccagttcgcggactgcgcttacaaagagttgcgtgaggtgccggaaggactgcctgccaacgtgacgacgcttagtctgtccgcgaacaagatcactgtgctgcggcgcggggccttcgccgacgtcacacaggtcacgtcgctgtggctggcgcacaatgaggtgcgcaccgtggagccaggcgcactggccgtgctgagtcagctcaagaacctcgatctgagccacaacttcatatccagctttccgtggagcgacctgcgcaacctgagcgcgctgcagctgctcaaaatgaaccacaaccgcctgggctctctgccccgggacgcactcggtgcgctacccgacctgcgttccctgcgcatcaacaacaaccggctgcgtacgctggcgcctggcaccttcgacgcgcttagcgcgctgtcacacttgcaactctatcacaatcccttccactgcggctgcggccttgtgtggctgcaggcctgggccgcgagcacccgggtgtccttacccgagcccgactccattgcttgtgcctcgcctcccgcgctgcagggggtgccggtgtaccgcctgcccgccctgccctgtgcaccgcccagcgtgcatctgagtgccgagccaccgcttgaagcacccggcaccccactgcgcgcaggactggcgttcgtgttacactgcatcgccgacggccaccctacgcctcgcctgcaatggcaacttcagatccccggtggcaccgtagtcttagagccaccggttctgagcggggaggacgacggggttggggcggaggaaggagagggagaaggagatggggatttgctgacgcagacccaagcccaaacgccgactccagcacccgcttggccggcgcccccagccacaccgcgcttcctggccctcgcaaatggctccctgttggtgcccctcctgagtgccaaggaggcgggcgtctacacttgccgtgcacacaatgagctgggcgccaactctacgtcaatacgcgtggcggtggcagcaaccgggcccccaaaacacgcgcctggcgccgggggagaacccgacggacaggccccgacctctgagcgcaagtccacagccaagggccggggcaacagcgtcctgccttccaaacccgagggcaaaatcaaaggccaaggcctggccaaggtcagcattctcggggagaccgagacggagccggaggaggacacaagtgagggagaggaggccgaagaccagatcctcgcggacccggcggaggagcagcgctgtggcaacggggacccctctcggtacgtttctaaccacgcgttcaaccagagcgcagagctcaagccgcacgtcttcgagctgggcgtcatcgcgctggatgtggcggagcgcgaggcgcgggtgcagctgactccgctggctgcgcgctggggccctgggcccggcggggctggcggagccccgcgacccgggcggcgacccctgcgcctactctatctgtgtccagcggggggcggcgcggcagtgcagtggtcccgcgtagaggaaggcgtcaacgcctactggttccgcggcctgcggccgggtaccaactactccgtgtgcctggcgctggcgggcgaagcctgccacgtgcaagtggtgttttccaccaagaaggagctcccatcgctgctggtcatagtggcagtgagcgtattcctcctggtgctggccacagtgccccttctgggcgccgcctgctgccatctgctggctaaacacccgggcaagccctaccgtctgatcctgcggcctcaggcccctgaccctatggagaagcgcatcgccgcagacttcgacccgcgtgcttcgtacctcgagtccgagaaaagctacccggcaggcggcgaggcgggcggcgaggagccagaggacgtgcagggggagggccttgatgaagacgcggagcagggagacccaagtggggacctgcagagagaggagagcctggcggcctgctcactggtggagtcccagtccaaggccaaccaagaggagttcgaggcgggctctgagtacagcgatcggctgcccctgggcgccgaggcggtcaacatcgcccaggagattaatggcaactacaggcagacggcaggctgaacctccgcccgtccggcccgcccattcccgacctccacctagggtgcctgggagcagcagtctagggctggcaggacttatgtcccccgtccccaaccttcacctactcctcccccttactactccccaaccttgactaccagggacttctattagggagtgggccgatttcaccagtccctgctacccacggctgccattctccctgcgggctgaatccccttccccgccaagcacagtgtttatcttaccccatgcaagactccacccgcagacggtgggcgatatctatgtccctccattcccgtcgcgattatctgcgaaatccaccccgcagcccgccccaccgtgggctctggagccagaggaaacgagcgaagactttggaaacctcgcggtaacgcggtggtttcgggggccagccaaggccagtggagtgctgtggggtcccacctcgacccctcctcctccctttctttctttcctttttttttattttttaattttatttatttatttatttattttttgacggagtcttggtctgtcgccaggctggagtgcagtggcgcgatctcggctcactgcatcttccgcctcccgggttcaagcgattctcctgcctcagcctgcctagtagctgggactacaggcgcgcgccaccacgaccagctaatttcttctatttttagtagagacggggtttcaccatgttggccaggatggtctggatctcttgacctcaggtgatccatctgcctcggcctctcaaagtgctgggattacaggcgtgaggcaccgcgcccggcccctcctccctttcaatccctactcccagaagccgggattcgtggcaacccctagtttttagttccaaagcctcctgccggcagggaaccaaatccttctgtcctcccacccccaccccacttctggccagttggagtccagcccggtgcctggggcgcctttcagctccgcgctcagattttcctgttttcgttgttttcaaagacagcgacatttcgggtctggtgctaacacccccttcccagcctctgggaaaatcgagtgtgtgtgtcggggggtagggagggaatgcgttttctgtcgtctctctcctaacttaaagcgccgcaggaccgcgcgccccttggcggctgagcctgtggacttggtcgcgggccaatttcgttgtccgtgtgttgggctttccggaggtctgtgcgcccaacagcgccgctcccgcggctccacccgacccagaccctagctggaaagcgccggaggcggaggaagctgactgtggcctcccgggccgcggctctctggagggctcgcgccctagttcgcacaaagcctgctcgtgactgtgcgactgtgcgacgggatccggatggagccgagcccctccgtcctcgcgtctcggtcctcgcgtcgccccgccccacccgcccctgcttcggcgggaatcgtgtttgcccggcgtgtagtccctgacaagcgtgccctgtaggagaaaagtctgtgtcctgtgaagtgtgaccgtgtagtgtaggggggcgggcgggggggcggatgggcggggagggagggaaggggaggggcgcggcgcggcgactcggggcggggttcttttttccattttgaaagaaagcgtcggggttggggtggggggagtttcagtcctcgggatcagccctctccgcgaagcgcagcacaagcgcgggcctgggacggagtagccccccggagcccgtgcccttttctaaacgcgtctgtatgcagtcaataaaacaatcgatttgaa

SEQ ID NO: 14209 - DNA, 2306 bp, Homo sapiens
  source 1..2306: mol_type = unassigned DNA
cttccctgctctgccacgccgggtctggagaaggggtttcagccccaggacatttactgagagtcggcgaatattgggagccgcgatgttcccccttcgggccctgtggttggtctgggcgcttctaggagtggccggatcatgcccggagccgtgcgcctgcgtggacaagtacgctcaccagttcgcggactgcgcttacaaagagttgcgtgaggtgccggaaggactgcctgccaacgtgacgacgcttagtctgtccgcgaacaagatcactgtgctgcggcgcggggccttcgccgacgtcacacaggtcacgtcgctgtggctggcgcacaatgaggtgcgcaccgtggagccaggcgcactggccgtgctgagtcagctcaagaacctcgatctgagccacaacttcatatccagctttccgtggagcgacctgcgcaacctgagcgcgctgcagctgctcaaaatgaaccacaaccgcctgggctctctgccccgggacgcactcggtgcgctacccgacctgcgttccctgcgcatcaacaacaaccggctggcgggcgaagcctgccacgtgcaagtggtgttttccaccaagaaggagctcccatcgctgctggtcatagtggcagtgagcgtattcctcctggtgctggccacagtgccccttctgggcgccgcctgctgccatctgctggctaaacacccgggcaagccctaccgtctgatcctgcggcctcaggcccctgaccctatggagaagcgcatcgccgcagacttcgacccgcgtgcttcgtacctcgagtccgagaaaagctacccggcaggcggcgaggcgggcggcgaggagccagaggacgtgcagggggagggccttgatgaagacgcggagcagggagacccaagtggggacctgcagagagaggagagcctggcggcctgctcactggtggagtcccagtccaaggccaaccaagaggagttcgaggcgggctctgagtacagcgatcggctgcccctgggcgccgaggcggtcaacatcgcccaggagattaatggcaactacaggcagacggcaggctgaacctccgcccgtccggcccgcccattcccgacctccacctagggtgcctgggagcagcagtctagggctggcaggacttatgtcccccgtccccaaccttcacctactcctcccccttactactccccaaccttgactaccagggacttctattagggagtgggccgatttcaccagtccctgctacccacggctgccattctccctgcgggctgaatccccttccccgccaagcacagtgtttatcttaccccatgcaagactccacccgcagacggtgggcgatatctatgtccctccattcccgtcgcgattatctgcgaaatccaccccgcagcccgccccaccgtgggctctggagccagaggaaacgagcgaagactttggaaacctcgcggtaacgcggtggtttcgggggccagccaaggccagtggagtgctgtggggtcccacctcgacccctcctcctccctttctttctttcctttttttttattttttaattttatttatttatttatttattttttgacggagtcttggtctgtcgccaggctggagtgcagtggcgcgatctcggctcactgcatcttccgcctcccgggttcaagcgattctcctgcctcagcctgcctagtagctgggactacaggcgcgcgccaccacgaccagctaatttcttctatttttagtagagacggggtttcaccatgttggccaggatggtctggatctcttgacctcaggtgatccatctgcctcggcctctcaaagtgctgggattacaggcgtgaggcaccgcgcccggcccctcctccctttcaatccctactcccagaagccgggattcgtggcaacccctagtttttagttccaaagcctcctgccggcagggaaccaaatccttctgtcctcccacccccaccccacttctggccagttggagtccagcccggtgcctggggcgcctttcagctccgcgctcagattttcctgttttcgttgttttcaaagacagcgacatttcgggtctggtgctaacacccccttcccagcctctgggaaaatcgagtgtgtgtgtcggggggtagggagggaatgcgttttctgtcgtctctctcctaacttaaagcgccgcaggaccgcgcgccccttggcggctgagcctgtggacttggtcgcgggccaatttcgttgtccgtgtgttgggctttcc

SEQ ID NO: 14210 - DNA, 2933 bp, Homo sapiens
  source 1..2933: mol_type = unassigned DNA
agatcccacatctcaagtcgtgcagtgcaggtcctcctattgcttctctgctgggtttcggtcacagtggagggctgtatgcacacacaggcacatgcctgtgttcttgagccgcgatgttcccccttcgggccctgtggttggtctgggcgcttctaggagtggccggatcatgcccggagccgtgcgcctgcgtggacaagtacgctcaccagttcgcggactgcgcttacaaagagttgcgtgaggtgccggaaggactgcctgccaacgtgacgacgcttagtctgtccgcgaacaagatcactgtgctgcggcgcggggccttcgccgacgtcacacaggtcacgtcgctgtggctggcgcacaatgaggtgcgcaccgtggagccaggcgcactggccgtgctgagtcagctcaagaacctcgatctgagccacaacttcatatccagctttccgtggagcgacctgcgcaacctgagcgcgctgcagctgctcaaaatgaaccacaaccgcctgggctctctgccccgggacgcactcggtgcgctacccgacctgcgttccctgcgcatcaacaacaaccggctgcgtacgctggcgcctggcaccttcgacgcgcttagcgcgctgtcacacttgcaactctatcacaatcccttccactgcggctgcggccttgtgtggctgcaggcctgggccgcgagcacccgggtgtccttacccgagcccgactccattgcttgtgcctcgcctcccgcgctgcagggggtgccggtgtaccgcctgcccgccctgccctgtgcaccgcccagcgtgcatctgagtgccgagccaccgcttgaagcacccggcaccccactgcgcgcaggactggcgttcgtgttacactgcatcgccgacggccaccctacgcctcgcctgcaatggcaacttcagatccccggtggcaccgtagtcttagagccaccggttctgagcggggaggacgacggggttggggcggaggaaggagagggagaaggagatggggatttgctgacgcagacccaagcccaaacgccgactccagcacccgcttggccggcgcccccagccacaccgcgcttcctggccctcgcaaatggctccctgttggtgcccctcctgagtgccaaggaggcgggcgtctacacttgccgtgcacacaatgagctgggcgccaactctacgtcaatacgcgtggcggtggcagcaaccgggcccccaaaacacgcgcctggcgccgggggagaacccgacggacaggccccgacctctgagcgcaagtccacagccaagggccggggcaacagcgtcctgccttccaaacccgagggcaaaatcaaaggccaaggcctggccaaggtcagcattctcggggagaccgagacggagccggaggaggacacaagtgagggagaggaggccgaagaccagatcctcgcggacccggcggaggagcagcgctgtggcaacggggacccctctcggtacgtttctaaccacgcgttcaaccagagcgcagagctcaagccgcacgtcttcgagctgggcgtcatcgcgctggatgtggcggagcgcgaggcgcgggtgcagctgactccgctggctgcgcgctggggccctgggcccggcggggctggcggagccccgcgacccgggcggcgacccctgcgcctactctatctgtgtccagcggggggcggcgcggcagtgcagtggtcccgcgtagaggaaggcgtcaacgcctactggttccgcggcctgcggccgggtaccaactactccgtgtgcctggcgctggcgggcgaagcctgccacgtgcaagtggtgttttccaccaagaaggagctcccatcgctgctggtcatagtggcagtgagcgtattcctcctggtgctggccacagtgccccttctgggcgccgcctgctgccatctgctggctaaacacccgggcaagccctaccgtctgatcctgcggcctcaggcccctgaccctatggagaagcgcatcgccgcagacttcgacccgcgtgcttcgtacctcgagtccgagaaaagctacccggcaggcggcgaggcgggcggcgaggagccagaggacgtgcagggggagggccttgatgaagacgcggagcagggagacccaagtggggacctgcagagagaggagagcctggcggcctgctcactggtggagtcccagtccaaggccaaccaagaggagttcgaggcgggctctgagtacagcgatcggctgcccctgggcgccgaggcggtcaacatcgcccaggagattaatggcaactacaggcagacggcaggctgaacctccgcccgtccggcccgcccattcccgacctccacctagggtgcctgggagcagcagtctagggctggcaggacttatgtcccccgtccccaaccttcacctactcctcccccttactactccccaaccttgactaccagggacttctattagggagtgggccgatttcaccagtccctgctacccacggctgccattctccctgcgggctgaatccccttccccgccaagcacagtgtttatcttaccccatgcaagactccacccgcagacggtgggcgatatctatgtccctccattcccgtcgcgattatctgcgaaatccaccccgcagcccgccccaccgtgggctctggagccagaggaaacgagcgaagactttggaaacctcgcggtaacgcggtggtttcgggggccagccaaggccagtgggttggggtggggggagtttcagtcctcgggatcagccctctccgcgaagcgcagcacaagcgcgggcctgggacggagtagccccccggagcccgtgcccttttctaaacgcgtctgtatgcagtcaataaaacaatcgatttg

SEQ ID NO: 14211 - DNA, 4259 bp, Homo sapiens
  source 1..4259: mol_type = unassigned DNA
atatcagcccagatccaggcaaaaatgggcgtaaaagcggcttgcattcaattagcagcgaagctcgcgggcgctggcgggacaggcgcgtgaggccacaacacatgcgtgtatcttgcttgggctatcttccctgctctgccacgccgggtctggagaaggggtttcagccccaggacatttactgagagtcggcgaatattgggagccgcgatgttcccccttcgggccctgtggttggtctgggcgcttctaggagtggccggatcatgcccggagccgtgcgcctgcgtggacaagtacgctcaccagttcgcggactgcgcttacaaagagttgcgtgaggtgccggaaggactgcctgccaacgtgacgacgcttagtctgtccgcgaacaagatcactgtgctgcggcgcggggccttcgccgacgtcacacaggtcacgtcgctgtggctggcgcacaatgaggtgcgcaccgtggagccaggcgcactggccgtgctgagtcagctcaagaacctcgatctgagccacaacttcatatccagctttccgtggagcgacctgcgcaacctgagcgcgctgcagctgctcaaaatgaaccacaaccgcctgggctctctgccccgggacgcactcggtgcgctacccgacctgcgttccctgcgcatcaacaacaaccggctgcgtacgctggcgcctggcaccttcgacgcgcttagcgcgctgtcacacttgcaactctatcacaatcccttccactgcggctgcggccttgtgtggctgcaggcctgggccgcgagcacccgggtgtccttacccgagcccgactccattgcttgtgcctcgcctcccgcgctgcagggggtgccggtgtaccgcctgcccgccctgccctgtgcaccgcccagcgtgcatctgagtgccgagccaccgcttgaagcacccggcaccccactgcgcgcaggactggcgttcgtgttacactgcatcgccgacggccaccctacgcctcgcctgcaatggcaacttcagatccccggtggcaccgtagtcttagagccaccggttctgagcggggaggacgacggggttggggcggaggaaggagagggagaaggagatggggatttgctgacgcagacccaagcccaaacgccgactccagcacccgcttggccggcgcccccagccacaccgcgcttcctggccctcgcaaatggctccctgttggtgcccctcctgagtgccaaggaggcgggcgtctacacttgccgtgcacacaatgagctgggcgccaactctacgtcaatacgcgtggcggtggcagcaaccgggcccccaaaacacgcgcctggcgccgggggagaacccgacggacaggccccgacctctgagcgcaagtccacagccaagggccggggcaacagcgtcctgccttccaaacccgagggcaaaatcaaaggccaaggcctggccaaggtcagcattctcggggagaccgagacggagccggaggaggacacaagtgagggagaggaggccgaagaccagatcctcgcggacccggcggaggagcagcgctgtggcaacggggacccctctcggtacgtttctaaccacgcgttcaaccagagcgcagagctcaagccgcacgtcttcgagctgggcgtcatcgcgctggatgtggcggagcgcgaggcgcgggtgcagctgactccgctggctgcgcgctggggccctgggcccggcggggctggcggagccccgcgacccgggcggcgacccctgcgcctactctatctgtgtccagcggggggcggcgcggcagtgcagtggtcccgcgtagaggaaggcgtcaacgcctactggttccgcggcctgcggccgggtaccaactactccgtgtgcctggcgctggcgggcgaagcctgccacgtgcaagtggtgttttccaccaagaaggagctcccatcgctgctggtcatagtggcagtgagcgtattcctcctggtgctggccacagtgccccttctgggcgccgcctgctgccatctgctggctaaacacccgggcaagccctaccgtctgatcctgcggcctcaggcccctgaccctatggagaagcgcatcgccgcagacttcgacccgcgtgcttcgtacctcgagtccgagaaaagctacccggcaggcggcgaggcgggcggcgaggagccagaggacgtgcagggggagggccttgatgaagacgcggagcagggagacccaagtggggacctgcagagagaggagagcctggcggcctgctcactggtggagtcccagtccaaggccaaccaagaggagttcgaggcgggctctgagtacagcgatcggctgcccctgggcgccgaggcggtcaacatcgcccaggagattaatggcaactacaggcagacggcaggctgaacctccgcccgtccggcccgcccattcccgacctccacctagggtgcctgggagcagcagtctagggctggcaggacttatgtcccccgtccccaaccttcacctactcctcccccttactactccccaaccttgactaccagggacttctattagggagtgggccgatttcaccagtccctgctacccacggctgccattctccctgcgggctgaatccccttccccgccaagcacagtgtttatcttaccccatgcaagactccacccgcagacggtgggcgatatctatgtccctccattcccgtcgcgattatctgcgaaatccaccccgcagcccgccccaccgtgggctctggagccagaggaaacgagcgaagactttggaaacctcgcggtaacgcggtggtttcgggggccagccaaggccagtggagtgctgtggggtcccacctcgacccctcctcctccctttctttctttcctttttttttattttttaattttatttatttatttatttattttttgacggagtcttggtctgtcgccaggctggagtgcagtggcgcgatctcggctcactgcatcttccgcctcccgggttcaagcgattctcctgcctcagcctgcctagtagctgggactacaggcgcgcgccaccacgaccagctaatttcttctatttttagtagagacggggtttcaccatgttggccaggatggtctggatctcttgacctcaggtgatccatctgcctcggcctctcaaagtgctgggattacaggcgtgaggcaccgcgcccggcccctcctccctttcaatccctactcccagaagccgggattcgtggcaacccctagtttttagttccaaagcctcctgccggcagggaaccaaatccttctgtcctcccacccccaccccacttctggccagttggagtccagcccggtgcctggggcgcctttcagctccgcgctcagattttcctgttttcgttgttttcaaagacagcgacatttcgggtctggtgctaacacccccttcccagcctctgggaaaatcgagtgtgtgtgtcggggggtagggagggaatgcgttttctgtcgtctctctcctaacttaaagcgccgcaggaccgcgcgccccttggcggctgagcctgtggacttggtcgcgggccaatttcgttgtccgtgtgttgggctttccggaggtctgtgcgcccaacagcgccgctcccgcggctccacccgacccagaccctagctggaaagcgccggaggcggaggaagctgactgtggcctcccgggccgcggctctctggagggctcgcgccctagttcgcacaaagcctgctcgtgactgtgcgactgtgcgacgggatccggatggagccgagcccctccgtcctcgcgtctcggtcctcgcgtcgccccgccccacccgcccctgcttcggcgggaatcgtgtttgcccggcgtgtagtccctgacaagcgtgccctgtaggagaaaagtctgtgtcctgtgaagtgtgaccgtgtagtgtaggggggcgggcgggggggcggatgggcggggagggagggaaggggaggggcgcggcgcggcgactcggggcggggttcttttttccattttgaaagaaagcgtcggggttggggtggggggagtttcagtcctcgggatcagccctctccgcgaagcgcagcacaagcgcgggcctgggacggagtagccccccggagcccgtgcccttttctaaacgcgtctgtatgcagtcaataaaacaatcgatttg

SEQ ID NO: 14212 - DNA, 3350 bp, Homo sapiens
  source 1..3350: mol_type = unassigned DNA
attaagatgctcaacactcaaatcggggtattgatctccacggaagccccaaaccctcgccatcgagagacccccatggcccggggtgatggctgtggggcttggtgctcccagagagctcagtggctacagaatgggtggggattctgcgtgtctcccggagcctgaacccctttcctggttatggccggtagctgtctccagggctaacgtgggcagcgcaggggggcggaaaccgggttttagccaaatgcctcgacatcgccgcgcctccgcctcctcgtcgctgaaagaaatgtcggggtttcatcagagctagggagcgacagtcgggaacagcgagtctgccgaagccggctgttgtgtgagggtgtgagacggcggggcggtgaggggccaccgcggcttgggggatagtgcgtgtggggttgaccgtgtgtctgcttgagaggctgtgaagatatggggggcagatatgggagaaatgctcgggcctgaagtccccagcccaccgtgctcaagagtagcggacgttttgccaccatccttgtctgtgctactgtctgctgcagcttccgtgccccgttctcctggagcagggcgtaaaagcggcttgcattcaattagcagcgaagctcgcgggcgctggcgggacaggcgcgtgaggccacaacacatgcgtgtatcttgcttgggctatcttccctgctctgccacgccgggtctggagaaggggtttcagccccaggacatttactgagagtcggcgaatattgggagccgcgatgttcccccttcgggccctgtggttggtctgggcgcttctaggagtggccggatcatgcccggagccgtgcgcctgcgtggacaagtacgctcaccagttcgcggactgcgcttacaaagagttgcgtgaggtgccggaaggactgcctgccaacgtgacgacgcttagtctgtccgcgaacaagatcactgtgctgcggcgcggggccttcgccgacgtcacacaggtcacgtcgctgtggctggcgcacaatgaggtgcgcaccgtggagccaggcgcactggccgtgctgagtcagctcaagaacctcgatctgagccacaacttcatatccagctttccgtggagcgacctgcgcaacctgagcgcgctgcagctgctcaaaatgaaccacaaccgcctgggctctctgccccgggacgcactcggtgcgctacccgacctgcgttccctgcgcatcaacaacaaccggctgcgtacgctggcgcctggcaccttcgacgcgcttagcgcgctgtcacacttgcaactctatcacaatcccttccactgcggctgcggccttgtgtggctgcaggcctgggccgcgagcacccgggtgtccttacccgagcccgactccattgcttgtgcctcgcctcccgcgctgcagggggtgccggtgtaccgcctgcccgccctgccctgtgcaccgcccagcgtgcatctgagtgccgagccaccgcttgaagcacccggcaccccactgcgcgcaggactggcgttcgtgttacactgcatcgccgacggccaccctacgcctcgcctgcaatggcaacttcagatccccggtggcaccgtagtcttagagccaccggttctgagcggggaggacgacggggttggggcggaggaaggagagggagaaggagatggggatttgctgacgcagacccaagcccaaacgccgactccagcacccgcttggccggcgcccccagccacaccgcgcttcctggccctcgcaaatggctccctgttggtgcccctcctgagtgccaaggaggcgggcgtctacacttgccgtgcacacaatgagctgggcgccaactctacgtcaatacgcgtggcggtggcagcaaccgggcccccaaaacacgcgcctggcgccgggggagaacccgacggacaggccccgacctctgagcgcaagtccacagccaagggccggggcaacagcgtcctgccttccaaacccgagggcaaaatcaaaggccaaggcctggccaaggtcagcattctcggggagaccgagacggagccggaggaggacacaagtgagggagaggaggccgaagaccagatcctcgcggacccggcggaggagcagcgctgtggcaacggggacccctctcggtacgtttctaaccacgcgttcaaccagagcgcagagctcaagccgcacgtcttcgagctgggcgtcatcgcgctggatgtggcggagcgcgaggcgcgggtgcagctgactccgctggctgcgcgctggggccctgggcccggcggggctggcggagccccgcgacccgggcggcgacccctgcgcctactctatctgtgtccagcggggggcggcgcggcagtgcagtggtcccgcgtagaggaaggcgtcaacgcctactggttccgcggcctgcggccgggtaccaactactccgtgtgcctggcgctggcgggcgaagcctgccacgtgcaagtggtgttttccaccaagaaggagctcccatcgctgctggtcatagtggcagtgagcgtattcctcctggtgctggccacagtgccccttctgggcgccgcctgctgccatctgctggctaaacacccgggcaagccctaccgtctgatcctgcggcctcaggcccctgaccctatggagaagcgcatcgccgcagacttcgacccgcgtgcttcgtacctcgagtccgagaaaagctacccggcaggcggcgaggcgggcggcgaggagccagaggacgtgcagggggagggccttgatgaagacgcggagcagggagacccaagtggggacctgcagagagaggagagcctggcggcctgctcactggtggagtcccagtccaaggccaaccaagaggagttcgaggcgggctctgagtacagcgatcggctgcccctgggcgccgaggcggtcaacatcgcccaggagattaatggcaactacaggcagacggcaggctgaacctccgcccgtccggcccgcccattcccgacctccacctagggtgcctgggagcagcagtctagggctggcaggacttatgtcccccgtccccaaccttcacctactcctcccccttactactccccaaccttgactaccagggacttctattagggagtgggccgatttcaccagtccctgctacccacggctgccattctccctgcgggctgaatccccttccccgccaagcacagtgtttatcttaccccatgcaagactccacccggagcccgtgcccttttctaaacgcgtctgtatgcagtcaataaaacaatcgatttg

SEQ ID NO: 14213 - DNA, 4384 bp, Homo sapiens
  source 1..4384: mol_type = unassigned DNA
agctcagcgggtcccgctcgaagtctgtcggtgccaccgcctgcatttgcaaaaagagtttaaaggcaaagacacgccttccccccccacttcagccgcgcgcctttccttcccccaaattcctcaaagatggtttgtctcacgtgttgcagggcgtaaaagcggcttgcattcaattagcagcgaagctcgcgggcgctggcgggacaggcgcgtgaggccacaacacatgcgtgtatcttgcttgggctatcttccctgctctgccacgccgggtctggagaaggggtttcagccccaggacatttactgagagtcggcgaatattgggagccgcgatgttcccccttcgggccctgtggttggtctgggcgcttctaggagtggccggatcatgcccggagccgtgcgcctgcgtggacaagtacgctcaccagttcgcggactgcgcttacaaagagttgcgtgaggtgccggaaggactgcctgccaacgtgacgacgcttagtctgtccgcgaacaagatcactgtgctgcggcgcggggccttcgccgacgtcacacaggtcacgtcgctgtggctggcgcacaatgaggtgcgcaccgtggagccaggcgcactggccgtgctgagtcagctcaagaacctcgatctgagccacaacttcatatccagctttccgtggagcgacctgcgcaacctgagcgcgctgcagctgctcaaaatgaaccacaaccgcctgggctctctgccccgggacgcactcggtgcgctacccgacctgcgttccctgcgcatcaacaacaaccggctgcgtacgctggcgcctggcaccttcgacgcgcttagcgcgctgtcacacttgcaactctatcacaatcccttccactgcggctgcggccttgtgtggctgcaggcctgggccgcgagcacccgggtgtccttacccgagcccgactccattgcttgtgcctcgcctcccgcgctgcagggggtgccggtgtaccgcctgcccgccctgccctgtgcaccgcccagcgtgcatctgagtgccgagccaccgcttgaagcacccggcaccccactgcgcgcaggactggcgttcgtgttacactgcatcgccgacggccaccctacgcctcgcctgcaatggcaacttcagatccccggtggcaccgtagtcttagagccaccggttctgagcggggaggacgacggggttggggcggaggaaggagagggagaaggagatggggatttgctgacgcagacccaagcccaaacgccgactccagcacccgcttggccggcgcccccagccacaccgcgcttcctggccctcgcaaatggctccctgttggtgcccctcctgagtgccaaggaggcgggcgtctacacttgccgtgcacacaatgagctgggcgccaactctacgtcaatacgcgtggcggtggcagcaaccgggcccccaaaacacgcgcctggcgccgggggagaacccgacggacaggccccgacctctgagcgcaagtccacagccaagggccggggcaacagcgtcctgccttccaaacccgagggcaaaatcaaaggccaaggcctggccaaggtcagcattctcggggagaccgagacggagccggaggaggacacaagtgagggagaggaggccgaagaccagatcctcgcggacccggcggaggagcagcgctgtggcaacggggacccctctcggtacgtttctaaccacgcgttcaaccagagcgcagagctcaagccgcacgtcttcgagctgggcgtcatcgcgctggatgtggcggagcgcgaggcgcgggtgcagctgactccgctggctgcgcgctggggccctgggcccggcggggctggcggagccccgcgacccgggcggcgacccctgcgcctactctatctgtgtccagcggggggcggcgcggcagtgcagtggtcccgcgtagaggaaggcgtcaacgcctactggttccgcggcctgcggccgggtaccaactactccgtgtgcctggcgctggcgggcgaagcctgccacgtgcaagtggtgttttccaccaagaaggagctcccatcgctgctggtcatagtggcagtgagcgtattcctcctggtgctggccacagtgccccttctgggcgccgcctgctgccatctgctggctaaacacccgggcaagccctaccgtctgatcctgcggcctcaggcccctgaccctatggagaagcgcatcgccgcagacttcgacccgcgtgcttcgtacctcgagtccgagaaaagctacccggcaggcggcgaggcgggcggcgaggagccagaggacgtgcagggggagggccttgatgaagacgcggagcagggagacccaagtggggacctgcagagagaggagagcctggcggcctgctcactggtggagtcccagtccaaggccaaccaagaggagttcgaggcgggctctgagtacagcgatcggctgcccctgggcgccgaggcggtcaacatcgcccaggagattaatggcaactacaggcagacggcaggctgaacctccgcccgtccggcccgcccattcccgacctccacctagggtgcctgggagcagcagtctagggctggcaggacttatgtcccccgtccccaaccttcacctactcctcccccttactactccccaaccttgactaccagggacttctattagggagtgggccgatttcaccagtccctgctacccacggctgccattctccctgcgggctgaatccccttccccgccaagcacagtgtttatcttaccccatgcaagactccacccgcagacggtgggcgatatctatgtccctccattcccgtcgcgattatctgcgaaatccaccccgcagcccgccccaccgtgggctctggagccagaggaaacgagcgaagactttggaaacctcgcggtaacgcggtggtttcgggggccagccaaggccagtggagtgctgtggggtcccacctcgacccctcctcctccctttctttctttcctttttttttattttttaattttatttatttatttatttattttttgacggagtcttggtctgtcgccaggctggagtgcagtggcgcgatctcggctcactgcatcttccgcctcccgggttcaagcgattctcctgcctcagcctgcctagtagctgggactacaggcgcgcgccaccacgaccagctaatttcttctatttttagtagagacggggtttcaccatgttggccaggatggtctggatctcttgacctcaggtgatccatctgcctcggcctctcaaagtgctgggattacaggcgtgaggcaccgcgcccggcccctcctccctttcaatccctactcccagaagccgggattcgtggcaacccctagtttttagttccaaagcctcctgccggcagggaaccaaatccttctgtcctcccacccccaccccacttctggccagttggagtccagcccggtgcctggggcgcctttcagctccgcgctcagattttcctgttttcgttgttttcaaagacagcgacatttcgggtctggtgctaacacccccttcccagcctctgggaaaatcgagtgtgtgtgtcggggggtagggagggaatgcgttttctgtcgtctctctcctaacttaaagcgccgcaggaccgcgcgccccttggcggctgagcctgtggacttggtcgcgggccaatttcgttgtccgtgtgttgggctttccggaggtctgtgcgcccaacagcgccgctcccgcggctccacccgacccagaccctagctggaaagcgccggaggcggaggaagctgactgtggcctcccgggccgcggctctctggagggctcgcgccctagttcgcacaaagcctgctcgtgactgtgcgactgtgcgacgggatccggatggagccgagcccctccgtcctcgcgtctcggtcctcgcgtcgccccgccccacccgcccctgcttcggcgggaatcgtgtttgcccggcgtgtagtccctgacaagcgtgccctgtaggagaaaagtctgtgtcctgtgaagtgtgaccgtgtagtgtaggggggcgggcgggggggcggatgggcggggagggagggaaggggaggggcgcggcgcggcgactcggggcggggttcttttttccattttgaaagaaagcgtcggggttggggtggggggagtttcagtcctcgggatcagccctctccgcgaagcgcagcacaagcgcgggcctgggacggagtagccccccggagcccgtgcccttttctaaacgcgtctgtatgcagtcaataaaacaatcgatttg

SEQ ID NO: 14214 - DNA, 4378 bp, Homo sapiens
  source 1..4378: mol_type = unassigned DNA
gccttcaactaccatcccaccacctgctgaggagaaaaattcttcaagactcagagcacacagccagcaccagaggccccatgaccctggacagaccaggggagggggccaccatgctgaagacattcactgttttgctcttttgcattcggatgagtctgggtatgacatcaatagtgatggaccctcaaccagagttgtggatagagtccaactacccccaggccccttgggagaacatcacgctttggtgccgaagcccctctcggatatcaagcaagttcctgctgctgaaggataagacacagatgacctggatccgcccttcccacaagaccttccaagtttcattccttataggtgcccttactgagtccaatgcaggtctttaccggtgctgctactggaaggagacaggctggtcaaagcccagtaaagttctagagttggaggcaccaggccaactgcccaagcccatcttctggattcaggctgagacccccgctcttcctgggtgtaatgttaacatcctctgccatggctggctgcaggatttggtattcatgctgtttaaagagggatatgcagagcctgtggattaccaagtcccaactgggacaatggccatattctccattgacaacctgacacctgaggatgaaggggtttacatctgccgcactcatatccagatgctccccaccctgtggtcagagcccagcaaccccctgaagctggttgtagcaggactctaccccaaaccaactttgacagcccatcctgggcccatcatggcacctggagaaagcctgaatctcaggtgccaagggccaatctatggaatgacctttgctctaatgagggttgaagacttggagaagtccttttaccacaagaagacaataaaaaatgaggcaaatttcttcttccagtctttgaagatccaagatactggacattacctctgtttttactatgacgcatcatatagaggttcactccttagtgatgtcctgaaaatctgggtgactgacactttccccaagacctggctacttgctcggcccagtgctgtggtccaaatgggtcagaatgtgagcctacggtgtcgaggaccagtggatggagtgggtcttgcactctataagaaaggagaagacaaaccacttcaatttttggatgccaccagcatcgatgacaacacatcattcttcctcaacaatgtaacctacagtgatactggcatctatagctgccactatcttctcacctggaagacctccattaggatgccatcacacaacactgtggagcttatggttgtagataagccccccaaaccctccctgtcagcttggccaagcactgtgttcaagctaggaaaggccatcacccttcagtgccgagtatctcatccagtactggaattttctctggaatgggaagaaagagaaacattccaaaaattctcagtaaacggagacttcatcatcagtaatgttgacgggaaaggcacagggacctacagttgcagctatcgcgtagagacacatcctaacatctggtcacatcgcagtgagcccctgaagctgatggggccagcaggctatctcacctggaattacgttctgaatgaagctatcaggttgtctctaatcatgcagcttgttgccttgctgttggtagtgctgtggataaggtggaagtgtcggagactcagaatcagagaagcctggttgctgggaacagctcaaggggtcaccatgctcttcatagtcacggcccttctctgctgtggactgtgcaatggggtattgatagaagagactgaaatagtcatgccaacccctaagcctgagctgtgggcagagaccaactttcctctggccccgtggaagaacttaaccctctggtgcagaagcccttctggctcaactaaggagtttgtgttgctgaaggatgggaccgggtggatcgccactcgcccggcctcagagcaggtccgggctgccttcccccttggcgccctgacccagagccacaccgggagctaccactgccattcatgggaggagatggctgtatcggagcccagtgaggcacttgagctggtggggacagacatcctccccaaacctgtcatttctgcttcccccacaatccggggccaggaactacaactccggtgcaaaggatggctggcaggcatggggtttgctctgtataaggagggagagcaagaacctgtccagcaacttggtgctgttggaagagaagccttctttacaatccagagaatggaggataaagacgaaggcaattacagctgccgcactcacactgaaaaacgccccttcaagtggtctgagcccagtgagccgctggagcttgtcataaaagaaatgtaccctaagcccttcttcaagacatgggccagccctgtggtcacccctggtgcccgagtgactttcaattgctccaccccccaccagcatatgagctttattctttacaaagatggaagtgaaatagcatccagtgacaggtcctgggcaagtccgggggccagtgcagctcactttctaatcatttcggtgggcattggtgatggagggaattacagctgccgatattatgacttttctatctggtctgagcccagcgaccctgtggagctcgtggtgacagaattctaccccaaacccactctcctggcacagccaggtcctgtggtgtttcctgggaagagtgtgatcctgcgctgccaagggactttccagggcatgaggttcgccctcttgcaggagggagcccatgttcccttacagtttcggagtgtctcagggaactcagctgacttccttctccacactgttggagcagaggactctgggaactatagctgtatctactatgagacaaccatgtcaaacagggggtcatatctcagtatgccccttatgatctgggtgactgacacattccctaagccatggttgtttgctgagcccagttctgtggttcccatggggcagaatgttactctctggtgccgagggccggtccatggagtaggatacattctgcacaaagaaggagaagccacttcaatgcagctctggggatccaccagtaatgacggggcattccccatcaccaatatatctggtactagcatggggcgttacagctgctgctaccaccctgactggaccagttctatcaagatacaacctagcaacaccctggaactcctagtcacaggcttactccccaaacccagcctattagcccagcctggtcccatggtggcccctggcgaaaatatgactcttcagtgtcaaggggaactgccagactcaacatttgtcctgttgaaggagggggctcaggagcctttagagcaacagaggccaagtgggtacagggctgacttctggatgccagcagtgagaggtgaagactctgggatctatagctgtgtttattatttggactctactccctttgcagcttcaaatcacagtgactccctggagatctgggtgactgataagccccctaaaccctctctgtcagcctggcccagcaccatgttcaagttagggaaggacatcacccttcagtgccgaggacccctgccaggtgttgaatttgtcctagaacatgatggagaagaagcacctcagcagttttcagaggatggagactttgtcatcaacaacgtagaaggaaaaggcattggaaactacagctgcagctaccgcctccaggcctaccctgatatctggtcagagcctagtgatcccctggagctggtgggggcagcagggcctgttgctcaggagtgcactgtagggaacattgtccgaagtagcctaatcgtggtggttgttgtagccttgggggtagtgctagccatagagtggaagaagtggcctcgactgcgaaccagaggctcagagacagacggaagagaccagaccattgcccttgaagagtgtaaccaagaaggagaaccaggcacccctgccaattctccttcatcaacctctcagagaatctctgtggaactgcccgttccaatataataatctcctcctttacaagagctttcctctcctctctcttgctctcagagacctataaatccaaccagttaccctgcaagtcagccccatctgctgttccttggtctctaatcacctgagctgggtaaaggggattctgggagttgagagctctgccagggtgagatgtttcctgaagagaggttccccacccctgtaactcctcactgtactgatttactggcgcatgaaattctattaaaaatgcattcttctgaataaaaagagtattcactatttaacttcaa

SEQ ID NO: 14215 - DNA, 1786 bp, Homo sapiens
  source 1..1786: mol_type = unassigned DNA
gcctttctcctttccttcccggatcccagacctgcctcgatcccaccacctgctgaggagaaaaattcttcaagactcagagcacacagccagcaccagaggccccatgaccctggacagaccaggggagggggccaccatgctgaagacattcactgttttgctcttttgcattcggatgagtctgggtatgacatcaatagtgatggaccctcaaccagagttgtggatagagtccaactacccccaggccccttgggagaacatcacgctttggtgccgaagcccctctcggatatcaagcaagttcctgctgctgaaggataagacacagatgacctggatccgcccttcccacaagaccttccaagtttcattccttataggtgcccttactgagtccaatgcaggtctttaccggtgctgctactggaaggagacaggctggtcaaagcccagtaaagttctagagttggaggcaccaggccaactgcccaagcccatcttctggattcaggctgagacccccgctcttcctgggtgtaatgttaacatcctctgccatggctggctgcaggatttggtattcatgctgtttaaagagggatatgcagagcctgtggattaccaagtcccaactgggacaatggccatattctccattgacaacctgacacctgaggatgaaggggtttacatctgccgcactcatatccagatgctccccaccctgtggtcagagcccagcaaccccctgaagctggttgtagcaggtgggtgtggctatggctgctggcatctggcaattgttgtcccaggtatcatggctggctgagctagggtttctgattttactttcctcagccagtttctaggccctgcaaggccccatgagctacagtcgtttgaagttttactgagatataaattagaatggcatgtgctgcaaggcagatgtatgggagccaatcatttggctagtaaaggagcccagccaactggccagcagcttcagctcatcacagctttgttgttctcaacttgttgaatatcatgcattcattcattaattcaaccagtatttattgagcacctaatatgtgccaggcactgccactgcaatcttataaatggagttttaaatttgcaaatgtattttatttgtaattgttatttttatgtgtggaaaacagaatggattgctagtgttggtgagtaaaaacaaaaaaaaacaaatgacaaagaatgtgatagctcatattttagaaatggctttataaatcaccttggttccctatcagtagagctagtaaggcagcaccaatctctaaatatagaagaaatttccccaaaatgtaaaatgccagacatgtcccagcccgaactcccccaccccatggcctggaggtttctagatggaattggccacatttgctttagtctctctatccagctaaataggcttggggaaagctgtggtgctacagaaagtaccctagacttagaagcagtaatactggtttctagttctatttctgacactgcctccctgtgtggtcttgagcaagtcacttcacttttctgtgctttggcttcctctactctaaaaatgggataacagtatctatctgatctactgtgtaatgcttctctctgtgcctcagcttcctgatctgcaaaattggtttaataataatgcctacctcacagggttgttgtgaggatttgcctaaatatatatgtacagtgcctggcatataagttctcaataaatggtagatattaa

SEQ ID NO: 14216 - DNA, 1820 bp, Homo sapiens
  source 1..1820: mol_type = unassigned DNA
atgccgggcagtttgctgcatctggaggagctcactggagaatctccaacatcggagcgggccttcaactaccatcccaccacctgctgaggagaaaaattcttcaagactcagagcacacagccagcaccagaggccccatgaccctggacagaccaggggagggggccaccatgctgaagacattcactgttttgctcttttgcattcggatgagtctgggtatgacatcaatagtgatggaccctcaaccagagttgtggatagagtccaactacccccaggccccttgggagaacatcacgctttggtgccgaagcccctctcggatatcaagcaagttcctgctgctgaaggataagacacagatgacctggatccgcccttcccacaagaccttccaagtttcattccttataggtgcccttactgagtccaatgcaggtctttaccggtgctgctactggaaggagacaggctggtcaaagcccagtaaagttctagagttggaggcaccaggccaactgcccaagcccatcttctggattcaggctgagacccccgctcttcctgggtgtaatgttaacatcctctgccatggctggctgcaggatttggtattcatgctgtttaaagagggatatgcagagcctgtggattaccaagtcccaactgggacaatggccatattctccattgacaacctgacacctgaggatgaaggggtttacatctgccgcactcatatccagatgctccccaccctgtggtcagagcccagcaaccccctgaagctggttgtagcaggtgggtgtggctatggctgctggcatctggcaattgttgtcccaggtatcatggctggctgagctagggtttctgattttactttcctcagccagtttctaggccctgcaaggccccatgagctacagtcgtttgaagttttactgagatataaattagaatggcatgtgctgcaaggcagatgtatgggagccaatcatttggctagtaaaggagcccagccaactggccagcagcttcagctcatcacagctttgttgttctcaacttgttgaatatcatgcattcattcattaattcaaccagtatttattgagcacctaatatgtgccaggcactgccactgcaatcttataaatggagttttaaatttgcaaatgtattttatttgtaattgttatttttatgtgtggaaaacagaatggattgctagtgttggtgagtaaaaacaaaaaaaaacaaatgacaaagaatgtgatagctcatattttagaaatggctttataaatcaccttggttccctatcagtagagctagtaaggcagcaccaatctctaaatatagaagaaatttccccaaaatgtaaaatgccagacatgtcccagcccgaactcccccaccccatggcctggaggtttctagatggaattggccacatttgctttagtctctctatccagctaaataggcttggggaaagctgtggtgctacagaaagtaccctagacttagaagcagtaatactggtttctagttctatttctgacactgcctccctgtgtggtcttgagcaagtcacttcacttttctgtgctttggcttcctctactctaaaaatgggataacagtatctatctgatctactgtgtaatgcttctctctgtgcctcagcttcctgatctgcaaaattggtttaataataatgcctacctcacagggttgttgtgaggatttgcctaaatatatatgtacagtgcctggcatataagttctcaataaatggtagatattaa

SEQ ID NO: 14217 - DNA, 4594 bp, Homo sapiens
  source 1..4594: mol_type = unassigned DNA
aggtgccaggcagagttggtgtaggtgggctccccgagcccggcgcagggaggggaggaggttggggcgggccggcaggcgggcgggggagagaggaaggcggggctcagagccgaagaggctgtccttagacagctcttctcatgccgggcagtttgctgcatctggaggagctcactggagaatctccaacatcggagcgggccttcaactaccatcccaccacctgctgaggagaaaaattcttcaagactcagagcacacagccagcaccagaggccccatgaccctggacagaccaggggagggggccaccatgctgaagacattcactgttttgctcttttgcattcggatgagtctgggtatgacatcaatagtgatggaccctcaaccagagttgtggatagagtccaactacccccaggccccttgggagaacatcacgctttggtgccgaagcccctctcggatatcaagcaagttcctgctgctgaaggataagacacagatgacctggatccgcccttcccacaagaccttccaagtttcattccttataggtgcccttactgagtccaatgcaggtctttaccggtgctgctactggaaggagacaggctggtcaaagcccagtaaagttctagagttggaggcaccaggccaactgcccaagcccatcttctggattcaggctgagacccccgctcttcctgggtgtaatgttaacatcctctgccatggctggctgcaggatttggtattcatgctgtttaaagagggatatgcagagcctgtggattaccaagtcccaactgggacaatggccatattctccattgacaacctgacacctgaggatgaaggggtttacatctgccgcactcatatccagatgctccccaccctgtggtcagagcccagcaaccccctgaagctggttgtagcaggactctaccccaaaccaactttgacagcccatcctgggcccatcatggcacctggagaaagcctgaatctcaggtgccaagggccaatctatggaatgacctttgctctaatgagggttgaagacttggagaagtccttttaccacaagaagacaataaaaaatgaggcaaatttcttcttccagtctttgaagatccaagatactggacattacctctgtttttactatgacgcatcatatagaggttcactccttagtgatgtcctgaaaatctgggtgactgacactttccccaagacctggctacttgctcggcccagtgctgtggtccaaatgggtcagaatgtgagcctacggtgtcgaggaccagtggatggagtgggtcttgcactctataagaaaggagaagacaaaccacttcaatttttggatgccaccagcatcgatgacaacacatcattcttcctcaacaatgtaacctacagtgatactggcatctatagctgccactatcttctcacctggaagacctccattaggatgccatcacacaacactgtggagcttatggttgtagataagccccccaaaccctccctgtcagcttggccaagcactgtgttcaagctaggaaaggccatcacccttcagtgccgagtatctcatccagtactggaattttctctggaatgggaagaaagagaaacattccaaaaattctcagtaaacggagacttcatcatcagtaatgttgacgggaaaggcacagggacctacagttgcagctatcgcgtagagacacatcctaacatctggtcacatcgcagtgagcccctgaagctgatggggccagcaggctatctcacctggaattacgttctgaatgaagctatcaggttgtctctaatcatgcagcttgttgccttgctgttggtagtgctgtggataaggtggaagtgtcggagactcagaatcagagaagcctggttgctgggaacagctcaaggggtcaccatgctcttcatagtcacggcccttctctgctgtgcaatttcttttgcaggactgtgcaatggggtattgatagaagagactgaaatagtcatgccaacccctaagcctgagctgtgggcagagaccaactttcctctggccccgtggaagaacttaaccctctggtgcagaagcccttctggctcaactaaggagtttgtgttgctgaaggatgggaccgggtggatcgccactcgcccggcctcagagcaggtccgggctgccttcccccttggcgccctgacccagagccacaccgggagctaccactgccattcatgggaggagatggctgtatcggagcccagtgaggcacttgagctggtggggacagacatcctccccaaacctgtcatttctgcttcccccacaatccggggccaggaactacaactccggtgcaaaggatggctggcaggcatggggtttgctctgtataaggagggagagcaagaacctgtccagcaacttggtgctgttggaagagaagccttctttacaatccagagaatggaggataaagacgaaggcaattacagctgccgcactcacactgaaaaacgccccttcaagtggtctgagcccagtgagccgctggagcttgtcataaaagaaatgtaccctaagcccttcttcaagacatgggccagccctgtggtcacccctggtgcccgagtgactttcaattgctccaccccccaccagcatatgagctttattctttacaaagatggaagtgaaatagcatccagtgacaggtcctgggcaagtccgggggccagtgcagctcactttctaatcatttcggtgggcattggtgatggagggaattacagctgccgatattatgacttttctatctggtctgagcccagcgaccctgtggagctcgtggtgacagaattctaccccaaacccactctcctggcacagccaggtcctgtggtgtttcctgggaagagtgtgatcctgcgctgccaagggactttccagggcatgaggttcgccctcttgcaggagggagcccatgttcccttacagtttcggagtgtctcagggaactcagctgacttccttctccacactgttggagcagaggactctgggaactatagctgtatctactatgagacaaccatgtcaaacagggggtcatatctcagtatgccccttatgatctgggtgactgacacattccctaagccatggttgtttgctgagcccagttctgtggttcccatggggcagaatgttactctctggtgccgagggccggtccatggagtaggatacattctgcacaaagaaggagaagccacttcaatgcagctctggggatccaccagtaatgacggggcattccccatcaccaatatatctggtactagcatggggcgttacagctgctgctaccaccctgactggaccagttctatcaagatacaacctagcaacaccctggaactcctagtcacaggcttactccccaaacccagcctattagcccagcctggtcccatggtggcccctggcgaaaatatgactcttcagtgtcaaggggaactgccagactcaacatttgtcctgttgaaggagggggctcaggagcctttagagcaacagaggccaagtgggtacagggctgacttctggatgccagcagtgagaggtgaagactctgggatctatagctgtgtttattatttggactctactccctttgcagcttcaaatcacagtgactccctggagatctgggtgactgataagccccctaaaccctctctgtcagcctggcccagcaccatgttcaagttagggaaggacatcacccttcagtgccgaggacccctgccaggtgttgaatttgtcctagaacatgatggagaagaagcacctcagcagttttcagaggatggagactttgtcatcaacaacgtagaaggaaaaggcattggaaactacagctgcagctaccgcctccaggcctaccctgatatctggtcagagcctagtgatcccctggagctggtgggggcagcagggcctgttgctcaggagtgcactgtagggaacattgtccgaagtagcctaatcgtggtggttgttgtagccttgggggtagtgctagccatagagtggaagaagtggcctcgactgcgaaccagaggctcagagacagacggaagagaccagaccattgcccttgaagagtgtaaccaagaaggagaaccaggcacccctgccaattctccttcatcaacctctcagagaatctctgtggaactgcccgttccaatataataatctcctcctttacaagagctttcctctcctctctcttgctctcagagacctataaatccaaccagttaccctgcaagtcagccccatctgctgttccttggtctctaatcacctgagctgggtaaaggggattctgggagttgagagctctgccagggtgagatgtttcctgaagagaggttccccacccctgtaactcctcactgtactgatttactggcgcatgaaattctattaaaaatgcattcttctgaataaaaagagtattcactatttaacttc

SEQ ID NO: 14218 - DNA, 5180 bp, Homo sapiens
  source 1..5180: mol_type = unassigned DNA
atacaagtgatgccttcaaatttgagctcagtttcttatggtcgtttaggagcatgagggtttctgcaataatctaccagtgaaatgatgatcaagatcttggaaagcactctactggtcaagcagaatagttcctgtcatctccattaagaatcagcttattggccgggcgcagtggctcatgcctgtaatcccagcactttgggaggctgaggcgggtggatcacgaggtcaggagatcgagaccatcctgtctaacaaggaatcctttctggcactcaagagttttcaattcaatcctgatgaatgaatcattatttgataccagcctaagtgaagactctgcctggtgacttttgcaaggtggtttctggctgcaacatgggaagatttgggatcagtgagatggaagagatttttctggctactagcgttcctaagaaagagctttagtgtttatccagctattggtatgcagacaactatacccttatgagaaacactagcagagaagaagagttcttgactgggtctgggccatgaaactgaccggataaaagtgggagaagaagagatgttgaaggaggagtttgctgttttctcagtctcctgagaaattccagatatcttctttctacacacatcctggagaggggaaagaaagcctctctctgtcacccaggctggaatgcactggtgccatctccactcactgcagcttcaacctcctgggttcaagtgatcctcctgcctctcagccttccgagtagctgggactacagtttgctgcatctggaggagctcactggagaatctccaacatcggagcgggccttcaactaccatcccaccacctgctgaggagaaaaattcttcaagactcagagcacacagccagcaccagaggccccatgaccctggacagaccaggggagggggccaccatgctgaagacattcactgttttgctcttttgcattctgatggaccctcaaccagagttgtggatagagtccaactacccccaggccccttgggagaacatcacgctttggtgccgaagcccctctcggatatcaagcaagttcctgctgctgaaggataagacacagatgacctggatccgcccttcccacaagaccttccaagtttcattccttataggtgcccttactgagtccaatgcaggtctttaccggtgctgctactggaaggagacaggctggtcaaagcccagtaaagttctagagttggaggcaccaggccaactgcccaagcccatcttctggattcaggctgagacccccgctcttcctgggtgtaatgttaacatcctctgccatggctggctgcaggatttggtattcatgctgtttaaagagggatatgcagagcctgtggattaccaagtcccaactgggacaatggccatattctccattgacaacctgacacctgaggatgaaggggtttacatctgccgcactcatatccagatgctccccaccctgtggtcagagcccagcaaccccctgaagctggttgtagcaggactctaccccaaaccaactttgacagcccatcctgggcccatcatggcacctggagaaagcctgaatctcaggtgccaagggccaatctatggaatgacctttgctctaatgagggttgaagacttggagaagtccttttaccacaagaagacaataaaaaatgaggcaaatttcttcttccagtctttgaagatccaagatactggacattacctctgtttttactatgacgcatcatatagaggttcactccttagtgatgtcctgaaaatctgggtgactgacactttccccaagacctggctacttgctcggcccagtgctgtggtccaaatgggtcagaatgtgagcctacggtgtcgaggaccagtggatggagtgggtcttgcactctataagaaaggagaagacaaaccacttcaatttttggatgccaccagcatcgatgacaacacatcattcttcctcaacaatgtaacctacagtgatactggcatctatagctgccactatcttctcacctggaagacctccattaggatgccatcacacaacactgtggagcttatggttgtagataagccccccaaaccctccctgtcagcttggccaagcactgtgttcaagctaggaaaggccatcacccttcagtgccgagtatctcatccagtactggaattttctctggaatgggaagaaagagaaacattccaaaaattctcagtaaacggagacttcatcatcagtaatgttgacgggaaaggcacagggacctacagttgcagctatcgcgtagagacacatcctaacatctggtcacatcgcagtgagcccctgaagctgatggggccagcaggctatctcacctggaattacgttctgaatgaagctatcaggttgtctctaatcatgcagcttgttgccttgctgttggtagtgctgtggataaggtggaagtgtcggagactcagaatcagagaagcctggttgctgggaacagctcaaggggtcaccatgctcttcatagtcacggcccttctctgctgtggactgtgcaatggggtattgatagaagagactgaaatagtcatgccaacccctaagcctgagctgtgggcagagaccaactttcctctggccccgtggaagaacttaaccctctggtgcagaagcccttctggctcaactaaggagtttgtgttgctgaaggatgggaccgggtggatcgccactcgcccggcctcagagcaggtccgggctgccttcccccttggcgccctgacccagagccacaccgggagctaccactgccattcatgggaggagatggctgtatcggagcccagtgaggcacttgagctggtggggacagacatcctccccaaacctgtcatttctgcttcccccacaatccggggccaggaactacaactccggtgcaaaggatggctggcaggcatggggtttgctctgtataaggagggagagcaagaacctgtccagcaacttggtgctgttggaagagaagccttctttacaatccagagaatggaggataaagacgaaggcaattacagctgccgcactcacactgaaaaacgccccttcaagtggtctgagcccagtgagccgctggagcttgtcataaaagaaatgtaccctaagcccttcttcaagacatgggccagccctgtggtcacccctggtgcccgagtgactttcaattgctccaccccccaccagcatatgagctttattctttacaaagatggaagtgaaatagcatccagtgacaggtcctgggcaagtccgggggccagtgcagctcactttctaatcatttcggtgggcattggtgatggagggaattacagctgccgatattatgacttttctatctggtctgagcccagcgaccctgtggagctcgtggtgacagaattctaccccaaacccactctcctggcacagccaggtcctgtggtgtttcctgggaagagtgtgatcctgcgctgccaagggactttccagggcatgaggttcgccctcttgcaggagggagcccatgttcccttacagtttcggagtgtctcagggaactcagctgacttccttctccacactgttggagcagaggactctgggaactatagctgtatctactatgagacaaccatgtcaaacagggggtcatatctcagtatgccccttatgatctgggtgactgacacattccctaagccatggttgtttgctgagcccagttctgtggttcccatggggcagaatgttactctctggtgccgagggccggtccatggagtaggatacattctgcacaaagaaggagaagccacttcaatgcagctctggggatccaccagtaatgacggggcattccccatcaccaatatatctggtactagcatggggcgttacagctgctgctaccaccctgactggaccagttctatcaagatacaacctagcaacaccctggaactcctagtcacaggcttactccccaaacccagcctattagcccagcctggtcccatggtggcccctggcgaaaatatgactcttcagtgtcaaggggaactgccagactcaacatttgtcctgttgaaggagggggctcaggagcctttagagcaacagaggccaagtgggtacagggctgacttctggatgccagcagtgagaggtgaagactctgggatctatagctgtgtttattatttggactctactccctttgcagcttcaaatcacagtgactccctggagatctgggtgactgataagccccctaaaccctctctgtcagcctggcccagcaccatgttcaagttagggaaggacatcacccttcagtgccgaggacccctgccaggtgttgaatttgtcctagaacatgatggagaagaagcacctcagcagttttcagaggatggagactttgtcatcaacaacgtagaaggaaaaggcattggaaactacagctgcagctaccgcctccaggcctaccctgatatctggtcagagcctagtgatcccctggagctggtgggggcagcagggcctgttgctcaggagtgcactgtagggaacattgtccgaagtagcctaatcgtggtggttgttgtagccttgggggtagtgctagccatagagtggaagaagtggcctcgactgcgaaccagaggctcagagacagacggaagagaccagaccattgcccttgaagagtgtaaccaagaaggagaaccaggcacccctgccaattctccttcatcaacctctcagagaatctctgtggaactgcccgttccaatataataatctcctcctttacaagagctttcctctcctctctcttgctctcagagacctataaatccaaccagttaccctgcaagtcagccccatctgctgttccttggtctctaatcacctgagctgggtaaaggggattctgggagttgagagctctgccagggtgagatgtttcctgaagagaggttccccacccctgtaactcctcactgtactgatttactggcgcatgaaattctattaaaaatgcattcttctgaataaaaagagtattcactatttaacttc

SEQ ID NO: 14219 - DNA, 4406 bp, Homo sapiens
  source 1..4406: mol_type = unassigned DNA
cagtttgctgcatctggaggagctcactggagaatctccaacatcggagcgggccttcaactaccatcccaccacctgctgaggagaaaaattcttcaagactcagagcacacagccagcaccagaggccccatgaccctggacagaccaggggagggggccaccatgctgaagacattcactgttttgctcttttgcattctgatggaccctcaaccagagttgtggatagagtccaactacccccaggccccttgggagaacatcacgctttggtgccgaagcccctctcggatatcaagcaagttcctgctgctgaaggataagacacagatgacctggatccgcccttcccacaagaccttccaagtttcattccttataggtgcccttactgagtccaatgcaggtctttaccggtgctgctactggaaggagacaggctggtcaaagcccagtaaagttctagagttggaggcaccaggccaactgcccaagcccatcttctggattcaggctgagacccccgctcttcctgggtgtaatgttaacatcctctgccatggctggctgcaggatttggtattcatgctgtttaaagagggatatgcagagcctgtggattaccaagtcccaactgggacaatggccatattctccattgacaacctgacacctgaggatgaaggggtttacatctgccgcactcatatccagatgctccccaccctgtggtcagagcccagcaaccccctgaagctggttgtagcaggactctaccccaaaccaactttgacagcccatcctgggcccatcatggcacctggagaaagcctgaatctcaggtgccaagggccaatctatggaatgacctttgctctaatgagggttgaagacttggagaagtccttttaccacaagaagacaataaaaaatgaggcaaatttcttcttccagtctttgaagatccaagatactggacattacctctgtttttactatgacgcatcatatagaggttcactccttagtgatgtcctgaaaatctgggtgactgacactttccccaagacctggctacttgctcggcccagtgctgtggtccaaatgggtcagaatgtgagcctacggtgtcgaggaccagtggatggagtgggtcttgcactctataagaaaggagaagacaaaccacttcaatttttggatgccaccagcatcgatgacaacacatcattcttcctcaacaatgtaacctacagtgatactggcatctatagctgccactatcttctcacctggaagacctccattaggatgccatcacacaacactgtggagcttatggttgtagataagccccccaaaccctccctgtcagcttggccaagcactgtgttcaagctaggaaaggccatcacccttcagtgccgagtatctcatccagtactggaattttctctggaatgggaagaaagagaaacattccaaaaattctcagtaaacggagacttcatcatcagtaatgttgacgggaaaggcacagggacctacagttgcagctatcgcgtagagacacatcctaacatctggtcacatcgcagtgagcccctgaagctgatggggccagcaggctatctcacctggaattacgttctgaatgaagctatcaggttgtctctaatcatgcagcttgttgccttgctgttggtagtgctgtggataaggtggaagtgtcggagactcagaatcagagaagcctggttgctgggaacagctcaaggggtcaccatgctcttcatagtcacggcccttctctgctgtggactgtgcaatggggtattgatagaagagactgaaatagtcatgccaacccctaagcctgagctgtgggcagagaccaactttcctctggccccgtggaagaacttaaccctctggtgcagaagcccttctggctcaactaaggagtttgtgttgctgaaggatgggaccgggtggatcgccactcgcccggcctcagagcaggtccgggctgccttcccccttggcgccctgacccagagccacaccgggagctaccactgccattcatgggaggagatggctgtatcggagcccagtgaggcacttgagctggtggggacagacatcctccccaaacctgtcatttctgcttcccccacaatccggggccaggaactacaactccggtgcaaaggatggctggcaggcatggggtttgctctgtataaggagggagagcaagaacctgtccagcaacttggtgctgttggaagagaagccttctttacaatccagagaatggaggataaagacgaaggcaattacagctgccgcactcacactgaaaaacgccccttcaagtggtctgagcccagtgagccgctggagcttgtcataaaagaaatgtaccctaagcccttcttcaagacatgggccagccctgtggtcacccctggtgcccgagtgactttcaattgctccaccccccaccagcatatgagctttattctttacaaagatggaagtgaaatagcatccagtgacaggtcctgggcaagtccgggggccagtgcagctcactttctaatcatttcggtgggcattggtgatggagggaattacagctgccgatattatgacttttctatctggtctgagcccagcgaccctgtggagctcgtggtgacagaattctaccccaaacccactctcctggcacagccaggtcctgtggtgtttcctgggaagagtgtgatcctgcgctgccaagggactttccagggcatgaggttcgccctcttgcaggagggagcccatgttcccttacagtttcggagtgtctcagggaactcagctgacttccttctccacactgttggagcagaggactctgggaactatagctgtatctactatgagacaaccatgtcaaacagggggtcatatctcagtatgccccttatgatctgggtgactgacacattccctaagccatggttgtttgctgagcccagttctgtggttcccatggggcagaatgttactctctggtgccgagggccggtccatggagtaggatacattctgcacaaagaaggagaagccacttcaatgcagctctggggatccaccagtaatgacggggcattccccatcaccaatatatctggtactagcatggggcgttacagctgctgctaccaccctgactggaccagttctatcaagatacaacctagcaacaccctggaactcctagtcacaggcttactccccaaacccagcctattagcccagcctggtcccatggtggcccctggcgaaaatatgactcttcagtgtcaaggggaactgccagactcaacatttgtcctgttgaaggagggggctcaggagcctttagagcaacagaggccaagtgggtacagggctgacttctggatgccagcagtgagaggtgaagactctgggatctatagctgtgtttattatttggactctactccctttgcagcttcaaatcacagtgactccctggagatctgggtgactgataagccccctaaaccctctctgtcagcctggcccagcaccatgttcaagttagggaaggacatcacccttcagtgccgaggacccctgccaggtgttgaatttgtcctagaacatgatggagaagaagcacctcagcagttttcagaggatggagactttgtcatcaacaacgtagaaggaaaaggcattggaaactacagctgcagctaccgcctccaggcctaccctgatatctggtcagagcctagtgatcccctggagctggtgggggcagcagggcctgttgctcaggagtgcactgtagggaacattgtccgaagtagcctaatcgtggtggttgttgtagccttgggggtagtgctagccatagagtggaagaagtggcctcgactgcgaaccagaggctcagagacagacggaagagaccagaccattgcccttgaagagtgtaaccaagaaggagaaccaggcacccctgccaattctccttcatcaacctctcagagaatctctgtggaactgcccgttccaatataataatctcctcctttacaagagctttcctctcctctctcttgctctcagagacctataaatccaaccagttaccctgcaagtcagccccatctgctgttccttggtctctaatcacctgagctgggtaaaggggattctgggagttgagagctctgccagggtgagatgtttcctgaagagaggttccccacccctgtaactcctcactgtactgatttactggcgcatgaaattctattaaaaatgcattcttctgaataaaaagagtattcactatttaacttcaaaaa

SEQ ID NO: 14220 - DNA, 3842 bp, Homo sapiens
  source 1..3842: mol_type = unassigned DNA
ttccaaaactgttctctggagctataagtggattgccagaaatgagagattaggagctgggagaagaggaagcgccttgtgttgtgtctcctggaggctgccgacatgaagtgctttttcccggtgctgagctgtctggctgtgctgggtgtggtgtcagcacagcggcaggtcaccgttcaggaaggacccttgtaccgcacggagggctcccacatcactatctggtgcaatgtgagtggctaccagggaccttctgagcagaatttccagtggtccatttacctgccttcgtcgccagagcgagaggtgcagatcgtcagcaccatggactcttccttcccctatgccatctacacccagcgcgtccgcggagggaagatcttcatagaaagagtccaggggaactcaaccctattgcacatcacagatcttcaggcccgggatgccggggagtatgaatgccacacacccagcactgataagcaatactttgggagttacagtgcaaagatgaacctagtggtgatcccagactccctgcagaccactgccatgccccagactctgcacagagtggagcaggacccgctggagctcacttgtgaggtggcctcagagaccattcagcacagccacctgtctgtggcctggctccggcagaaagttggcgagaagcccgtggaggtcatctccctgagccgagatttcatgcttcactccagcagcgaatatgcccagaggcagagcctgggggaggtgcggctggacaagctggggaggaccaccttccgcctcaccatcttccacctgcagccttctgaccagggcgaattctactgcgaggccgccgagtggatccaggatccggatgggtcgtggtatgctatgacccgaaagcgttccgagggagccgtggtcaacgtccagccaactgacaaagaattcactgttcggctggagacagagaagcggctgcacacggtgggcgagccggtggagttcagatgcatcctggaggctcagaatgttcccgaccgttactttgctgtctcctgggccttcaacagctcgctcatcgccaccatgggtcctaacgctgtgcctgtcctcaacagcgaatttgctcaccgggaagccaggggacagcttaaggtggccaaagagagcgacagtgtctttgtgctgaagatctaccacctccgccaggaagatagcgggaaatacaactgccgggtgactgagcgagagaaaaccgtgaccggggaattcattgataaggagagcaagcgtcccaagaacatccccatcatagtcctccccctcacagataactgggtagttaaagtcccccagcaccaccagctcctgtcccaaggccacttggagagcagcatctccgtggaggtggccagcaatgccagcgtcatccttgagggcgaggacctgcgcttctcctgcagtgtccgcacggcaggcaggccgcagggtcgcttctctgtcatctggcagcttgtggacaggcagaaccgccgcagcaatatcatgtggctagaccgggatggcaccgtgcagccaggctcgtcctactgggagcgcagcagctttgggggcgtccagatggagcaggtgcagcccaactcgttcagcctgggcatcttcaacagcaggaaggaggacgagggccagtatgaatgccatgtgactgaatgggtgcgggcagtggatggcgagtggcagattgttggggagcgccgggccagcactcccatctccatcacagctcttgaaatgggcttcgcagtcacagccatctcccggacaccgggggtgacctacagcgactcctttgacttgcagtgtatcatcaaaccccactaccctgcctgggtccccgtgtcggtgacatggcggttccagccggtgggcacggtggagttccatgacttggtgaccttcacccgggacggaggggtccagtggggggacaggtcctccagcttccgaacccgaactgccatcgagaaggctgagtccagcaacaacgtccgcctaagcatcagccgagccagtgacacggaagcaggcaagtaccagtgtgtggcagagctgtggcggaagaactacaacaacacctggacgcgactggcggagaggacctccaacctgctggagatcagggtgctgcagccagtgacaaagctgcaggtgagcaaatcgaagaggaccctcaccctggtggaaaacaagcccattcagttgaactgctcagtcaagtctcagactagccagaactcccactttgcggtgctctggtatgtccacaagccctcggatgccgatggcaagcttatcctgaagaccacccacaactccgcctttgaatacggtacttacgccgaggaggagggcctgagagccaggctccagtttgagaggcatgtgtcggggggcctgttcagcctcaccgtccagagagccgaggtcagcgacagcggcagctactactgccacgtggaggagtggctgctgagccccaactacgcctggtacaagctggcagaggaggtttctgggcgcacagaagtcactgtgaaacagccagacagccgcctgaggctcagccaagcccaggggaacctgtcggttctggagacccggcaggtacagctggagtgtgtggttctcaaccgcaccagcataacctcccagctcatggtggaatggtttgtatggaagcccaaccaccctgagcgggagactgtggcccgcttgagccgtgacgccaccttccactatggagagcaggcagccaagaacaatctgaaggggcggctgcatttggagagtccttcccccggcgtgtaccgtctcttcatccagaacgtggctgtgcaggacagcgggacctacagctgccatgtggaggagtggctgcccagccccagtggcatgtggtataagcgggcagaggacaccgctgggcagacagctctgacagtcatgcgaccagatgcttccctgcaggtggacacagtggtccccaatgccacggtctctgagaaggcagctttccagctggactgtagcatcgtgtcccgctccagccaggactcccgcttcgctgtggcctggtattccctgaggactaaagctggggggaaaaggagcagccctggcctggaagaacaggaagaggaaagggaggaggaggaggaggaggacgacgacgacgacgacgacccaacagagcggacggccctgctgagcgtgggcccagatgctgtctttggcccagagggcagtccttgggagggcaggcttcgcttccagaggctctccccggtgctctaccggctcacagtgctgcaggcaagcccccaagatacaggcaattactcctgccatgtggaggagtggctgcccagccctcagaaggaatggtaccggctgacggaggaggagtcagcccccatcggcatccgtgttctagatacaagtcccaccctccagtccatcatctgctccaacgacgcactcttctacttcgtcttcttctaccctttccccatctttggcattcttatcatcaccatccttctggtgcgtttcaagagccggaactccagcaagaactctgatgggaagaatggggtgcctctgctgtggatcaaagagccacacctcaactactcccctacttgcctggagccccctgttctcagtatccatccaggggccatagactaagcgggtgatgccccagcggatgttggccacggaggagctgaggctctccctttctctgtgattggacagttgacagcacccaaactctgggg

SEQ ID NO: 14221 - DNA, 7253 bp, Homo sapiens
  source 1..7253: mol_type = unassigned DNA
gcgtcccctgaggcgtgcgcctggatggactgaaggacggtccgacgcgcgcggagggagagggccaggggcgagaaatctgctcgcgctggggtaccgcttcagggctgccgaacgccaacttgcttcgtgtgccctaggcaggcgtggggcaggtggcgcctccgtgacctaccaccatggatggaaacggactttttggtgaagaaacccaaacggttgatgccaggcagggtgatttggccgtcaaaggttttgacgaaacctgccctgttctctctggggaatccgaatgagggagatcacagacaccttcactgagaagccaaggacatttctgtataatcagtggatgaaaggattttctcagacccttttttccgtgcttctggaggattaatccactacagtctgcaatttcagtggaaactgcaaggcacacgatgtggcaggagccgggagcgacttccgaattgttgtggacccttcctgtagcataggggagttttcacacttgcctccactcctccccttccccccaactccctccttctgatctcttctttttaatctgttcccattttccgagttaagttctatttccaaaactgttctctggagctataagtggattgccagaaatgagagattaggagctgggagaagaggaagcgccttgtgttgtgtctcctggaggctgccgacatgaagtgctttttcccggtgctgagctgtctggctgtgctgggtgtggtgtcagcacagcggcaggtcaccgttcaggaaggacccttgtaccgcacggagggctcccacatcactatctggtgcaatgtgagtggctaccagggaccttctgagcagaatttccagtggtccatttacctgccttcgtcgccagagcgagaggtgcagatcgtcagcaccatggactcttccttcccctatgccatctacacccagcgcgtccgcggagggaagatcttcatagaaagagtccaggggaactcaaccctattgcacatcacagatcttcaggcccgggatgccggggagtatgaatgccacacacccagcactgataagcaatactttgggagttacagtgcaaagatgaacctagtggtgatcccagactccctgcagaccactgccatgccccagactctgcacagagtggagcaggacccgctggagctcacttgtgaggtggcctcagagaccattcagcacagccacctgtctgtggcctggctccggcagaaagttggcgagaagcccgtggaggtcatctccctgagccgagatttcatgcttcactccagcagcgaatatgcccagaggcagagcctgggggaggtgcggctggacaagctggggaggaccaccttccgcctcaccatcttccacctgcagccttctgaccagggcgaattctactgcgaggccgccgagtggatccaggatccggatgggtcgtggtatgctatgacccgaaagcgttccgagggagccgtggtcaacgtccagccaactgacaaagaattcactgttcggctggagacagagaagcggctgcacacggtgggcgagccggtggagttcagatgcatcctggaggctcagaatgttcccgaccgttactttgctgtctcctgggccttcaacagctcgctcatcgccaccatgggtcctaacgctgtgcctgtcctcaacagcgaatttgctcaccgggaagccaggggacagcttaaggtggccaaagagagcgacagtgtctttgtgctgaagatctaccacctccgccaggaagatagcgggaaatacaactgccgggtgactgagcgagagaaaaccgtgaccggggaattcattgataaggagagcaagcgtcccaagaacatccccatcatagtcctccccctcacagataactgggtagttaaagtcccccagcaccaccagctcctgtcccaaggccacttggagagcagcatctccgtggaggtggccagcaatgccagcgtcatccttgagggcgaggacctgcgcttctcctgcagtgtccgcacggcaggcaggccgcagggtcgcttctctgtcatctggcagcttgtggacaggcagaaccgccgcagcaatatcatgtggctagaccgggatggcaccgtgcagccaggctcgtcctactgggagcgcagcagctttgggggcgtccagatggagcaggtgcagcccaactcgttcagcctgggcatcttcaacagcaggaaggaggacgagggccagtatgaatgccatgtgactgaatgggtgcgggcagtggatggcgagtggcagattgttggggagcgccgggccagcactcccatctccatcacagctcttgaaatgggcttcgcagtcacagccatctcccggacaccgggggtgacctacagcgactcctttgacttgcagtgtatcatcaaaccccactaccctgcctgggtccccgtgtcggtgacatggcggttccagccggtgggcacggtggagttccatgacttggtgaccttcacccgggacggaggggtccagtggggggacaggtcctccagcttccgaacccgaactgccatcgagaaggctgagtccagcaacaacgtccgcctaagcatcagccgagccagtgacacggaagcaggcaagtaccagtgtgtggcagagctgtggcggaagaactacaacaacacctggacgcgactggcggagaggacctccaacctgctggagatcagggtgctgcagccagtgacaaagctgcaggtgagcaaatcgaagaggaccctcaccctggtggaaaacaagcccattcagttgaactgctcagtcaagtctcagactagccagaactcccactttgcggtgctctggtatgtccacaagccctcggatgccgatggcaagcttatcctgaagaccacccacaactccgcctttgaatacggtacttacgccgaggaggagggcctgagagccaggctccagtttgagaggcatgtgtcggggggcctgttcagcctcaccgtccagagagccgaggtcagcgacagcggcagctactactgccacgtggaggagtggctgctgagccccaactacgcctggtacaagctggcagaggaggtttctgggcgcacagaagtcactgtgaaacagccagacagccgcctgaggctcagccaagcccaggggaacctgtcggttctggagacccggcaggtacagctggagtgtgtggttctcaaccgcaccagcataacctcccagctcatggtggaatggtttgtatggaagcccaaccaccctgagcgggagactgtggcccgcttgagccgtgacgccaccttccactatggagagcaggcagccaagaacaatctgaaggggcggctgcatttggagagtccttcccccggcgtgtaccgtctcttcatccagaacgtggctgtgcaggacagcgggacctacagctgccatgtggaggagtggctgcccagccccagtggcatgtggtataagcgggcagaggacaccgctgggcagacagctctgacagtcatgcgaccagatgcttccctgcaggtggacacagtggtccccaatgccacggtctctgagaaggcagctttccagctggactgtagcatcgtgtcccgctccagccaggactcccgcttcgctgtggcctggtattccctgaggactaaagctggggggaaaaggagcagccctggcctggaagaacaggaagaggaaagggaggaggaggaggaggaggacgacgacgacgacgacgacccaacagagcggacggccctgctgagcgtgggcccagatgctgtctttggcccagagggcagtccttgggagggcaggcttcgcttccagaggctctccccggtgctctaccggctcacagtgctgcaggcaagcccccaagatacaggcaattactcctgccatgtggaggagtggctgcccagccctcagaaggaatggtaccggctgacggaggaggagtcagcccccatcggcatccgtgttctagatacaagtcccaccctccagtccatcatctgctccaacgacgcactcttctacttcgtcttcttctaccctttccccatctttggcattcttatcatcaccatccttctggtgcgtttcaagagccggaactccagcaagaactctgatgggaagaatggggtgcctctgctgtggatcaaagagccacacctcaactactcccctacttgcctggagccccctgttctcagtatccatccaggggccatagactaagcgggtgatgccccagcggatgttggccacggaggagctgaggctctccctttctctgtgattggacagttgacagcacccaaactctggggtgcatgtgtgtggaaagttgtcagacttgaaaagtgttccaagttcccagtcagtcacagagacagactgcctctcggtggcagtcttggttggttagctatttgcgcgcaaatgttgtgatcctgccattatagatttcttgtttctgtttttagtaatgtagtgagtagctccaggtgccacatctactcacagatttatctagtattctcagatagatgttacagggcttcttattctttgtaatgtactctttttaaatccctttagtttaccctttttggattccttaatgtggacgaatttctcttacgtacaactgacagcaaaaggaagggcgaactttctagtgacaaggaatctcttccaagactttgtttttgcacatttgaaaatgccacccatggatcaaaatatacccaaacgttttttactttcttaacaagacttaagaattgtgtgtagtgtgggcaaaatttgtatgttgtcttttccctcagctggagttattggaaccactttgtagtcaagacgaaagcactgaattttgcttcaaagaactgtgtatgtacaagagaaatcctgcataaccccattaggagtagatggtgcccggcctatctgtcagggaggcaaaaaaggcttcatcccatccttgccaaaaaataagaaaactgtcttggagaatgggtcagaagccccaaacggcacacactttccaaattaaagtgggcaggggctgcttttagcagctgctgacctgcagatttgtcaaagccagtgactagagaaggaagggagaaaggctggctgttggcttgctctgagctgcaaggatggtctctaactgattaactgtgagcaggtgggcctgtgtcttcaggtgctttgccaaactcttaaaagaaagtgtccagtgaacttggaagtgggcccctgagctgagcacagggccaaagcagccatggcagacacctgacggagggcacggggctggctgacactaagtttggtgggacagtgaggggtgggaggggggtttccagggcctggtgttggagagtgcagagaaatatctacctccctggaggtgtgaagactaggtttttcttcttccttccaattagattttccttaattatagtgatgtcttccttattcatttttctctccctgcctctcactgccataagaatatcagcctgggggcagtccagacgcagccctttgtcatcctttctgtttgcctagtctcagcagactgtgatcacaaggcattgtctgtgggatttttcctttccctttcttgatctctcttgtggttctaggttgtttggttgttcattgttatggtggctttttattttaacgccccttgagccccatgatggctggtgtcaccctgttcttttacactgttgggccaggtgctgcttgtccttcttagggcatcatcaattgcaaatatttccttttgctccctttatgaagatgttcttatacccttgctttcccatatttttctggccaagcatgccatctcctttactctgggaacttacatcctgaatcccaagagggggtcacagtttggaaaaagtcatcagggattctggaactaagtctgataaaagattccagtgaagccctgttctgagaacgagcagactgcaggggaggccatgggattccccaggccagtgtctgtgctgatccttcaagggtctgcaggtatgcaggtggcctgggctgctcggcagatactttgctgattcccagctgaggggagcatggtggcgattgctcagccattttctgacagacacacagacctgccttttctcccccaagtataccgtaccctcctgtgagacagtgtgtgcaggcaccaccaccttaatcctgctgttgcctgacatgctgattctcatttattatgctgcatcaacacattagaggtacaggagcggctcagtcatgaaaaaagaaggtcttttgccccatttctttatttcagagatgtgggctttcagtgggaatttgctgactcctactttataggctgagtcaatgagggaagatgactggcgtttcctctgtctaaatgggaggttgccagagcgctggctgggactaggatgtgtaactaagatttcagtttgaaatcttagatttcagttcacggcgataaagaagtaggtgctgcacacaaatatgtaaagcaattgtaggaaatttgaaaggaaaaaaagaaaccgaagccagtattttaataattgctttttctgtgtattttgtattgggctgggggatagcatcaaaggttgaactttttgagctttctatgaaaaaccccaggaccttctttctttggccatttctatggaaatgcgatgtcagatggatggtaatggtgccctccagtggctgtgagacctcattgcgcattgtctactggagctttagtcttctgagacggaggaaaactgctgaatactctggattcatctatgtctacaatgttgcatttatgaaaaactacactgtgctaggcgcattctaggacatgaatatgaccacaccctctttcaccgggtgtttctgtagcaagttttcatattcttttcaaacaatggtttctctgcgttaattattgaggaaaaaaaaagatggggtaagaaaactacccatgcatgatgtagagagctgttgatttgtttctgtttttttaaaggaaaactatttgtaagatgttgcactaaaacattttatatacacttcagagacctgtagtaaattatgttgaaaat

SEQ ID NO: 14222 - DNA, 7254 bp, Homo sapiens
  source 1..7254: mol_type = unassigned DNA
ggggactcgggaggggccgcagcgcggctgctggtgccgttgcgggagaagaggaagcggcgcgtcccctgaggcgtgcgcctggatggactgaaggacggtccgacgcgcgcggagggagagggccaggggcgagaaatctgctcgcgctggggtaccgcttcagggctgccgaacgccaacttgcttcgtgtgccctaggcaggcgtggggcaggtggcgcctccgtgacctaccaccatggatggaaacggactttttggtgaagaaacccaaacggttgatgccaggcagggtgatttggccgtcaaaggttttgacgaaacctgccctgttctctctggggaatccgaatgagggagatcacagacaccttcactgagaagccaaggacatttctgtataatcagtggatgaaaggattttctcagacccttttttccgtgcttctggaggattaatccactacagtctgcaatttcagtggaaactgcaaggcacacgatgtggcaggagccgggagcgacttccgaattgttgtggacccttcctgtagcataggggagttttcacacttgcctccactcctccccttccccccaactccctccttctgatctcttctttttaatctgttcccattttccgagttaagttctatttccaaaactgttctctggagctataagtggattgccagaaatgagagattaggagctgggagaagaggaagcgccttgtgttgtgtctcctggaggctgccgacatgaagtgctttttcccggtgctgagctgtctggctgtgctgggtgtggtgtcagcacagcggcaggtcaccgttcaggaaggacccttgtaccgcacggagggctcccacatcactatctggtgcaatgtgagtggctaccagggaccttctgagcagaatttccagtggtccatttacctgccttcgtcgccagagcgagaggtgcagatcgtcagcaccatggactcttccttcccctatgccatctacacccagcgcgtccgcggagggaagatcttcatagaaagagtccaggggaactcaaccctattgcacatcacagatcttcaggcccgggatgccggggagtatgaatgccacacacccagcactgataagcaatactttgggagttacagtgcaaagatgaacctagtggtgatcccagactccctgcagaccactgccatgccccagactctgcacagagtggagcaggacccgctggagctcacttgtgaggtggcctcagagaccattcagcacagccacctgtctgtggcctggctccggcagaaagttggcgagaagcccgtggaggtcatctccctgagccgagatttcatgcttcactccagcagcgaatatgcccagaggcagagcctgggggaggtgcggctggacaagctggggaggaccaccttccgcctcaccatcttccacctgcagccttctgaccagggcgaattctactgcgaggccgccgagtggatccaggatccggatgggtcgtggtatgctatgacccgaaagcgttccgagggagccgtggtcaacgtccagccaactgacaaagaattcactgttcggctggagacagagaagcggctgcacacggtgggcgagccggtggagttcagatgcatcctggaggctcagaatgttcccgaccgttactttgctgtctcctgggccttcaacagctcgctcatcgccaccatgggtcctaacgctgtgcctgtcctcaacagcgaatttgctcaccgggaagccaggggacagcttaaggtggccaaagagagcgacagtgtctttgtgctgaagatctaccacctccgccaggaagatagcgggaaatacaactgccgggtgactgagcgagagaaaaccgtgaccggggaattcattgataaggagagcaagcgtcccaagaacatccccatcatagtcctccccctcaagagcagcatctccgtggaggtggccagcaatgccagcgtcatccttgagggcgaggacctgcgcttctcctgcagtgtccgcacggcaggcaggccgcagggtcgcttctctgtcatctggcagcttgtggacaggcagaaccgccgcagcaatatcatgtggctagaccgggatggcaccgtgcagccaggctcgtcctactgggagcgcagcagctttgggggcgtccagatggagcaggtgcagcccaactcgttcagcctgggcatcttcaacagcaggaaggaggacgagggccagtatgaatgccatgtgactgaatgggtgcgggcagtggatggcgagtggcagattgttggggagcgccgggccagcactcccatctccatcacagctcttgaaatgggcttcgcagtcacagccatctcccggacaccgggggtgacctacagcgactcctttgacttgcagtgtatcatcaaaccccactaccctgcctgggtccccgtgtcggtgacatggcggttccagccggtgggcacggtggagttccatgacttggtgaccttcacccgggacggaggggtccagtggggggacaggtcctccagcttccgaacccgaactgccatcgagaaggctgagtccagcaacaacgtccgcctaagcatcagccgagccagtgacacggaagcaggcaagtaccagtgtgtggcagagctgtggcggaagaactacaacaacacctggacgcgactggcggagaggacctccaacctgctggagatcagggtgctgcagccagtgacaaagctgcaggtgagcaaatcgaagaggaccctcaccctggtggaaaacaagcccattcagttgaactgctcagtcaagtctcagactagccagaactcccactttgcggtgctctggtatgtccacaagccctcggatgccgatggcaagcttatcctgaagaccacccacaactccgcctttgaatacggtacttacgccgaggaggagggcctgagagccaggctccagtttgagaggcatgtgtcggggggcctgttcagcctcaccgtccagagagccgaggtcagcgacagcggcagctactactgccacgtggaggagtggctgctgagccccaactacgcctggtacaagctggcagaggaggtttctgggcgcacagaagtcactgtgaaacagccagacagccgcctgaggctcagccaagcccaggggaacctgtcggttctggagacccggcaggtacagctggagtgtgtggttctcaaccgcaccagcataacctcccagctcatggtggaatggtttgtatggaagcccaaccaccctgagcgggagactgtggcccgcttgagccgtgacgccaccttccactatggagagcaggcagccaagaacaatctgaaggggcggctgcatttggagagtccttcccccggcgtgtaccgtctcttcatccagaacgtggctgtgcaggacagcgggacctacagctgccatgtggaggagtggctgcccagccccagtggcatgtggtataagcgggcagaggacaccgctgggcagacagctctgacagtcatgcgaccagatgcttccctgcaggtggacacagtggtccccaatgccacggtctctgagaaggcagctttccagctggactgtagcatcgtgtcccgctccagccaggactcccgcttcgctgtggcctggtattccctgaggactaaagctggggggaaaaggagcagccctggcctggaagaacaggaagaggaaagggaggaggaggaggaggaggacgacgacgacgacgacgacccaacagagcggacggccctgctgagcgtgggcccagatgctgtctttggcccagagggcagtccttgggagggcaggcttcgcttccagaggctctccccggtgctctaccggctcacagtgctgcaggcaagcccccaagatacaggcaattactcctgccatgtggaggagtggctgcccagccctcagaaggaatggtaccggctgacggaggaggagtcagcccccatcggcatccgtgttctagatacaagtcccaccctccagtccatcatctgctccaacgacgcactcttctacttcgtcttcttctaccctttccccatctttggcattcttatcatcaccatccttctggtgcgtttcaagagccggaactccagcaagaactctgatgggaagaatggggtgcctctgctgtggatcaaagagccacacctcaactactcccctacttgcctggagccccctgttctcagtatccatccaggggccatagactaagcgggtgatgccccagcggatgttggccacggaggagctgaggctctccctttctctgtgattggacagttgacagcacccaaactctggggtgcatgtgtgtggaaagttgtcagacttgaaaagtgttccaagttcccagtcagtcacagagacagactgcctctcggtggcagtcttggttggttagctatttgcgcgcaaatgttgtgatcctgccattatagatttcttgtttctgtttttagtaatgtagtgagtagctccaggtgccacatctactcacagatttatctagtattctcagatagatgttacagggcttcttattctttgtaatgtactctttttaaatccctttagtttaccctttttggattccttaatgtggacgaatttctcttacgtacaactgacagcaaaaggaagggcgaactttctagtgacaaggaatctcttccaagactttgtttttgcacatttgaaaatgccacccatggatcaaaatatacccaaacgttttttactttcttaacaagacttaagaattgtgtgtagtgtgggcaaaatttgtatgttgtcttttccctcagctggagttattggaaccactttgtagtcaagacgaaagcactgaattttgcttcaaagaactgtgtatgtacaagagaaatcctgcataaccccattaggagtagatggtgcccggcctatctgtcagggaggcaaaaaaggcttcatcccatccttgccaaaaaataagaaaactgtcttggagaatgggtcagaagccccaaacggcacacactttccaaattaaagtgggcaggggctgcttttagcagctgctgacctgcagatttgtcaaagccagtgactagagaaggaagggagaaaggctggctgttggcttgctctgagctgcaaggatggtctctaactgattaactgtgagcaggtgggcctgtgtcttcaggtgctttgccaaactcttaaaagaaagtgtccagtgaacttggaagtgggcccctgagctgagcacagggccaaagcagccatggcagacacctgacggagggcacggggctggctgacactaagtttggtgggacagtgaggggtgggaggggggtttccagggcctggtgttggagagtgcagagaaatatctacctccctggaggtgtgaagactaggtttttcttcttccttccaattagattttccttaattatagtgatgtcttccttattcatttttctctccctgcctctcactgccataagaatatcagcctgggggcagtccagacgcagccctttgtcatcctttctgtttgcctagtctcagcagactgtgatcacaaggcattgtctgtgggatttttcctttccctttcttgatctctcttgtggttctaggttgtttggttgttcattgttatggtggctttttattttaacgccccttgagccccatgatggctggtgtcaccctgttcttttacactgttgggccaggtgctgcttgtccttcttagggcatcatcaattgcaaatatttccttttgctccctttatgaagatgttcttatacccttgctttcccatatttttctggccaagcatgccatctcctttactctgggaacttacatcctgaatcccaagagggggtcacagtttggaaaaagtcatcagggattctggaactaagtctgataaaagattccagtgaagccctgttctgagaacgagcagactgcaggggaggccatgggattccccaggccagtgtctgtgctgatccttcaagggtctgcaggtatgcaggtggcctgggctgctcggcagatactttgctgattcccagctgaggggagcatggtggcgattgctcagccattttctgacagacacacagacctgccttttctcccccaagtataccgtaccctcctgtgagacagtgtgtgcaggcaccaccaccttaatcctgctgttgcctgacatgctgattctcatttattatgctgcatcaacacattagaggtacaggagcggctcagtcatgaaaaaagaaggtcttttgccccatttctttatttcagagatgtgggctttcagtgggaatttgctgactcctactttataggctgagtcaatgagggaagatgactggcgtttcctctgtctaaatgggaggttgccagagcgctggctgggactaggatgtgtaactaagatttcagtttgaaatcttagatttcagttcacggcgataaagaagtaggtgctgcacacaaatatgtaaagcaattgtaggaaatttgaaaggaaaaaaagaaaccgaagccagtattttaataattgctttttctgtgtattttgtattgggctgggggatagcatcaaaggttgaactttttgagctttctatgaaaaaccccaggaccttctttctttggccatttctatggaaatgcgatgtcagatggatggtaatggtgccctccagtggctgtgagacctcattgcgcattgtctactggagctttagtcttctgagacggaggaaaactgctgaatactctggattcatctatgtctacaatgttgcatttatgaaaaactacactgtgctaggcgcattctaggacatgaatatgaccacaccctctttcaccgggtgtttctgtagcaagttttcatattcttttcaaacaatggtttctctgcgttaattattgaggaaaaaaaaagatggggtaagaaaactacccatgcatgatgtagagagctgttgatttgtttctgtttttttaaaggaaaactatttgtaagatgttgcactaaaacattttatatacacttcagagacctgtagtaaattatgttgaaaat

SEQ ID NO: 14223 - DNA, 1034 bp, Homo sapiens
  source 1..1034: mol_type = unassigned DNA
gaaaaaagaaagccaactttcctttcaaatacacaccccaacccgccccggcatacacagaaatggggactgcgagcagaagcaacatcgctcgccatctgcaaaccaatctcattctattttgtgtcggtgctgtgggcgcctgtactctctctgtcacacaaccgtggtacctagaagtggactacactcatgaggccgtcaccataaagtgtaccttctccgcaaccggatgcccttctgagcaaccaacatgcctgtggtttcgctacggtgctcaccagcctgagaacctgtgcttggacgggtgcaaaagtgaggcagacaagttcacagtgagggaggccctcaaagaaaaccaagtttccctcactgtaaacagagtgacttcaaatgacagtgcaatttacatctgtggaatagcattccccagtgtgccggaagcgagagctaaacagacaggaggagggaccacactggtggtaagagaaattaagctgctcagcaaggaactgcggagcttcctgacagctcttgtatcactgctctctgtctatgtgaccggtgtgtgcgtggccttcatactcctctccaaatcaaaatccaaccctctaagaaacaaagaaataaaagaagactcacaaaagaagaagagtgctcggcgtatttttcaggaaattgctcaagaactataccataagagacatgtggaaacaaatcagcaatctgagaaagataacaacacttatgaaaacagaagagtactttccaactatgaaaggccatagaaacgttttaattttcaatgaagtcactgaaaatccaactccaggagctatggcagtgttaatgaacatatatcatcaggtcttaaaaaaaaataaaggtaaactgaaaagacaactggctacaaagaaggatgtcagaatgtaaggaaactataactaatagtcattaccaaaatactaaaacccaacaaaatgcaactgaaaaataccttccaaatttgccaagaaaaaaaattctattttaaa

SEQ ID NO: 14224 - DNA, 2343 bp, Homo sapiens
  source 1..2343: mol_type = unassigned DNA
gccggggcgagaatggtttcagaactgccgagggctggagggaaagcagcgggaggggcggagggaggggattcggcagctccagttcagctcgctcggcgcacccacgcctcgctgccccgcttcctgccctcaacctgggcatgcgccccccacccttccggccccccagaacccgcgccatcccccggagcctccccagagctggccgcgcaggatgggcgccctcaggcccacgctgctgccgccttcgctgccgctgctgctgctgctaatgctaggaatgggatgctgggcccgggaggtgctggtccccgaggggcccttgtaccgcgtggctggcacagctgtctccatctcctgcaatgtgaccggctatgagggccctgcccagcagaacttcgagtggttcctgtataggcccgaggccccagatactgcactgggcattgtcagtaccaaggatacccagttctcctatgctgtcttcaagtcccgagtggtggcgggtgaggtgcaggtgcagcgcctacaaggtgatgccgtggtgctcaagattgcccgcctgcaggcccaggatgccggcatttatgagtgccacaccccctccactgatacccgctacctgggcagctacagcggcaaggtggagctgagagttcttccagatgtcctccaggtgtctgctgcccccccagggccccgaggccgccaggccccaacctcacccccacgcatgacggtgcatgaggggcaggagctggcactgggctgcctggcgaggacaagcacacagaagcacacacacctggcagtgtcctttgggcgatctgtgcccgaggcaccagttgggcggtcaactctgcaggaagtggtgggaatccggtcagacttggccgtggaggctggagctccctatgctgagcgattggctgcaggggagcttcgtctgggcaaggaagggaccgatcggtaccgcatggtagtagggggtgcccaggcaggggacgcaggcacctaccactgcactgccgctgagtggattcaggatcctgatggcagctgggcccagattgcagagaaaagggccgtcctggcccacgtggatgtgcagacgctgtccagccagctggcagtgacagtggggcctggtgaacgtcggatcggcccaggggagcccttggaactgctgtgcaatgtgtcaggggcacttcccccagcaggccgtcatgctgcatactctgtaggttgggagatggcacctgcgggggcacctgggcccggccgcctggtagcccagctggacacagagggtgtgggcagcctgggccctggctatgagggccgacacattgccatggagaaggtggcatccagaacataccggctacggctagaggctgccaggcctggtgatgcgggcacctaccgctgcctcgccaaagcctatgttcgagggtctgggacccggcttcgtgaagcagccagtgcccgttcccggcctctccctgtacatgtgcgggaggaaggtgtggtgctggaggctgtggcatggctagcaggaggcacagtgtaccgcggggagactgcctccctgctgtgcaacatctctgtgcggggtggccccccaggactgcggctggccgccagctggtgggtggagcgaccagaggacggagagctcagctctgtccctgcccagctggtgggtggcgtaggccaggatggtgtggcagagctgggagtccggcctggaggaggccctgtcagcgtagagctggtggggccccgaagccatcggctgagactacacagcttggggcccgaggatgaaggcgtgtaccactgtgcccccagcgcctgggtgcagcatgccgactacagctggtaccaggcgggcagtgcccgctcagggcctgttacagtctacccctacatgcatgccctggacaccctatttgtgcctctgctggtgggtacaggggtggccctagtcactggtgccactgtccttggtaccatcacttgctgcttcatgaagaggcttcgaaaacggtgatcccttactccccaggtcttgcaggtgtcgactgtcttccggcccagctccaagccctcctctggttgcctggacaccctctccctctgtccactcttcctttaatttatttgacctcccactacccagaatgggagacgtgcctccccttccccactccttccctcccaagcccctccctctggccttctgttcttgatctcttagggatcctatagggaggccatttcctgtcctggaattagtttttctaaaatgtgaataaacttgttttataaaaagca

SEQ ID NO: 14225 - DNA, 2004 bp, Homo sapiens
  source 1..2004: mol_type = unassigned DNA
attcggcagctccagttcagctcgctcggcgcacccacgcctcgctgccccgcttcctgccctcaacctgggcatgcgccccccacccttccggccccccagaacccgcgccatcccccggagcctccccagagctggccgcgcaggatgggcgccctcaggcccacgctgctgccgccttcgctgccgctgctgctgctgctaatgctaggaatgggatgctgggcccgggaggtgctggtccccgaggggcccttgtaccgcgtggctggcacagctgtctccatctcctgcaatgtgaccggctatgagggccctgcccagcagaacttcgagtggttcctgtataggcccgaggccccagatactgcactgggcattgtcagtaccaaggatacccagttctcctatgctgtcttcaagtcccgagtggtggcgggtgaggtgcaggtgcagcgcctacaaggtgatgccgtggtgctcaagattgcccgcctgcaggcccaggatgccggcatttatgagtgccacaccccctccactgatacccgctacctgggcagctacagcggcaaggtggagctgagagttcttccagatgtcctccaggtgtctgctgcccccccagggccccgaggccgccaggccccaacctcacccccacgcatgacggtgcatgaggggcaggagctggcactgggctgcctggcgaggacaagcacacagaagcacacacacctggcagtgtcctttgggcgatctgtgcccgaggcaccagttgggcggtcaactctgcaggaagtggtgggaatccggtcagacttggccgtggaggctggagctccctatgctgagcgattggctgcaggggagcttcgtctgggcaaggaagggaccgatcggtaccgcatggtagtagggggtgcccaggcaggggacgcaggcacctaccactgcactgccgctgagtggattcaggatcctgatggcagctgggcccagattgcagagaaaagggccgtcctggcccacgtggatgtgcagacgctgtccagccagctggcagtgacagtggggcctggtgaacgtcggatcggcccaggggagcccttggaactgctgtgcaatgtgtcaggggcacttcccccagcaggccgtcatgctgcatactctgtaggttgggagatggcacctgcgggggcacctgggcccggccgcctggtagcccagctggacacagagggtgtgggcagcctgggccctggctatgagggccgacacattgccatggagaaggtggcatccagaacataccggctacggctagaggctgccaggcctggtgatgcgggcacctaccgctgcctcgccaaagcctatgttcgagggtctgggacccggcttcgtgaagcagccagtgcccgttcccggcctctccctgtacatgtgcgggaggaaggtgtggtgctggaggctgtggcatggctagcaggaggcacagtgtaccgcggggagactgcctccctgctgtgcaacatctctgtgcggggtggccccccaggactgcggagtgcccgctcagggcctgttacagtctacccctacatgcatgccctggacaccctatttgtgcctctgctggtgggtacaggggtggccctagtcactggtgccactgtccttggtaccatcacttgctgcttcatgaagaggcttcgaaaacggtgatcccttactccccaggtcttgcaggtgtcgactgtcttccggcccagctccaagccctcctctggttgcctggacaccctctccctctgtccactcttcctttaatttatttgacctcccactacccagaatgggagacgtgcctccccttccccactccttccctcccaagcccctccctctggccttctgttcttgatctcttagggatcctatagggaggccatttcctgtcctggaattagtttttctaaaatgtgaataaacttgttttat

SEQ ID NO: 14226 - DNA, 2366 bp, Homo sapiens
  source 1..2366: mol_type = unassigned DNA
gccggggcgagaatggtttcagaactgccgagggctggagggaaagcagcgggaggggcggagggaggggattcggcagctccagttcagctcgctcggcgcacccacgcctcgctgccccgcttcctgccctcaacctgggcatgcgccccccacccttccggccccccagaacccgcgccatcccccggagcctccccagagctggccgcgcaggatgggcgccctcaggcccacgctgctgccgccttcgctgccgctgctgctgctgctaatgctaggaatgggatgctgggcccgggaggtgctggtccccgaggggcccttgtaccgcgtggctggcacagctgtctccatctcctgcaatgtgaccggctatgagggccctgcccagcagaacttcgagtggttcctgtataggcccgaggccccagatactgcactgggcattgtcagtaccaaggatacccagttctcctatgctgtcttcaagtcccgagtggtggcgggtgaggtgcaggtgcagcgcctacaaggtgatgccgtggtgctcaagattgcccgcctgcaggcccaggatgccggcatttatgagtgccacaccccctccactgatacccgctacctgggcagctacagcggcaaggtggagctgagagttcttccagatgtcctccaggtgtctgctgcccccccagggccccgaggccgccaggccccaacctcacccccacgcatgacggtgcatgaggggcaggagctggcactgggctgcctggcgaggacaagcacacagaagcacacacacctggcagtgtcctttgggcgatctgtgcccgaggcaccagttgggcggtcaactctgcaggaagtggtgggaatccggtcagacttggccgtggaggctggagctccctatgctgagcgattggctgcaggggagcttcgtctgggcaaggaagggaccgatcggtaccgcatggtagtagggggtgcccaggcaggggacgcaggcacctaccactgcactgccgctgagtggattcaggatcctgatggcagctgggcccagattgcagagaaaagggccgtcctggcccacgtggatgtgcagacgctgtccagccagctggcagtgacagtggggcctggtgaacgtcggatcggcccaggggagcccttggaactgctgtgcaatgtgtcaggggcacttcccccagcaggccgtcatgctgcatactctgtaggttgggagatggcacctgcgggggcacctgggcccggccgcctggtagcccagctggacacagagggtgtgggcagcctgggccctggctatgagggccgacacattgccatggagaaggtggcatccagaacataccggctacggctagaggctgccaggcctggtgatgcgggcacctaccgctgcctcgccaaagcctatgttcgagggtctgggacccggcttcgtgaagcagccagtgcccgttcccggcctctccctgtacatgtgcgggaggaaggtgtggtgctggaggctgtggcatggctagcaggaggcacagtgtaccgcggggagactgcctccctgctgtgcaacatctctgtgcggggtggccccccaggactgcggctggccgccagctggtgggtggagcgaccagaggacggagagctcagctctgtccctgcccagctggtgggtggcgtaggccaggatggtgtggcagagctgggagtccggcctggaggaggccctgtcagcgtagagctggtggggccccgaagccatcggctgagactacacagcttggggcccgaggatgaaggcgtgtaccactgtgcccccagcgcctgggtgcagcatgccgactacagctggtaccaggcgggcagtgcccgctcagggcctgttacagtctacccctacatgcatgccctggacaccctatttgtgcctctgctggtgggtacaggggtggccctagtcactggtgccactgtccttggtaccatcacttgctgcttcatgaagaggcttcgaaaacggtgatcccttactccccagcccacaccgggcacccttttcaggtcttgcaggtgtcgactgtcttccggcccagctccaagccctcctctggttgcctggacaccctctccctctgtccactcttcctttaatttatttgacctcccactacccagaatgggagacgtgcctccccttccccactccttccctcccaagcccctccctctggccttctgttcttgatctcttagggatcctatagggaggccatttcctgtcctggaattagtttttctaaaatgtgaataaacttgttttataaaaagca

SEQ ID NO: 14227 - DNA, 1059 bp, Homo sapiens
  source 1..1059: mol_type = unassigned DNA
ggaactggggctgggccgaggcccggggcggatccagggctggagtcttggcggggcggggcggggaggggcggggccggggcggggctgggactcgatgcgactcaaagaacccgcgccatcccccggagcctccccagagctggccgcgcaggatgggcgccctcaggcccacgctgctgccgccttcgctgccgctgctgctgctgctaatgctaggaatgggatgctgggcccgggaggtgctggtccccgaggggcccttgtaccgcgtggctggcacagctgtctccatctcctgcaatgtgaccggctatgagggccctgcccagcagaacttcgagtggttcctgtataggcccgaggccccagatactgcactgggcattgtcagtaccaaggatacccagttctcctatgctgtcttcaagtcccgagtggtggcgggtgaggtgcaggtgcagcgcctacaaggtgatgccgtggtgctcaagattgcccgcctgcaggcccaggatgccggcatttatgagtgccacaccccctccactgatacccgctacctgggcagctacagcggcaaggtggagctgagagttcttccagatgtcctccaggtgtctgctgcccccccagggccccgaggccgccaggccccaacctcacccccacgcatgacggtgcatgaggggcaggagctggcactgggctgcctggcgaggacaagcacacagaagcacacacacctggcagtgtcctttgggcgatctgtgcccgaggcaccagttgggcggtcaactctgcaggaagtggtgggaatccggtcagacttggccgtggaggctggagctccctatgctgagcgattggctgcaggggagcttcgtctgggcaaggaagggaccgatcggtaccgcatggtagtagggggtgcccaggcaggggacgcaggcacctaccactgcactgccgctgagtggattcaggatcctgatggcagctgggcccagattgcagagaaaagggccgtcctggcccacgtggatgtgcagacgctgt

SEQ ID NO: 14228 - DNA, 2663 bp, Homo sapiens
  source 1..2663: mol_type = unassigned DNA
cggcgagagtggagccgagcggtgcggagcagatctggtggttctccggagagcagcttcctcgggtgttacatgagccaagccctcactgtacagaagagtgagagctgaaacctgttccctgagctgatcagaaggacatcccttggcccctccatctgggctcctgtggataggaggggctgggtgagcaggccagctgggctatggtgtggtgcctcggcctggccgtcctcagcctggtcatcagccagggggctgacggtcgagggaagcctgaggtggtatcggtggtgggccgggctggggagagtgtggtgctgggctgtgacctgctgcccccggccggccggccccccctgcatgtcatcgagtggctgcgctttggattcctgcttcccatcttcatccagttcggcctctactctccccgaattgaccctgattacgtgggacgagtccggctgcagaagggggcctctctccagattgagggtctccgggtggaagaccagggctggtacgagtgccgcgtgttcttcctggaccagcacatccctgaagacgattttgctaacggctcctgggtgcatctgacagtcaattcaccccctcaattccaggagacacctcctgctgtgttggaagtgcaggaactggagcctgtgaccctgcgttgtgtggcccgtggcagccccctgcctcatgtgacgtggaagctccgaggaaaggaccttggccagggccagggccaggtgcaagtgcagaacgggacgctgcggatccgccgggtagagcgaggcagctctggggtctacacctgccaagcctccagcactgagggcagcgccacccacgccacccagctgctagtgctaggacccccagtcatcgtggtgccccccaagaacagcacagtcaatgcctcccaggatgtttcattggcctgccatgctgaggcataccctgctaacctcacctacagctggttccaggacaacatcaatgtcttccacattagccgcctgcagccccgggtgcggatcctggtggacgggagcctgcggctgctggccacccagcctgatgatgccggctgctacacctgtgtgcccagcaatggcctcctgcatccaccctcagcctctgcctacctcactgtgctctacccagcccaggtgacagctatgcctcctgagacacccctgcccataggcatgccgggggtgatccgctgcccggttcgtgccaaccccccactgctctttgtcagctggaccaaggatggaaaggccctgcagctggacaagttccctggctggtcccagggcacagaaggctcactgatcatcgccctggggaacgaggatgccctgggagaatactcctgcaccccctacaacagtcttggtaccgccgggccctctcctgtgacccgcgtgctgctcaaggctcccccagcttttatagagcggcccaaggaagaatatttccaagaagtagggcgggagctgctcatcccctgctccgcccaaggggaccctcctcctgcagccccacccagtcccttgccaggtcctggacccctgctccagtacctgagcctgcccttcttccgagagatgaatgtggatggggactggcccccgcttgaggagcccagccctgctgcacccccagattacatggatacccggcgctgtcccacctcatctttccttcgttctccagaaacccctcctgtatcccccagggaatcacttcctggggctgtggtaggggctggggccactgcagagcccccttacacagccctggctgactggacactgagggagcggctgctgccaggccttctccctgctgcccctcgaggcagcctcaccagccagagcagtgggcgaggcagcgcttcgttcctgcggcccccctccacagccccctctgcaggaggcagctacctcagccctgctccaggagacaccagcagctgggccagtggccctgagagatggccccgaagggagcatgtggtgacagtcagcaagaggaggaacacatctgtggacgagaactatgagtgggactcagaattccctggggacatggaattgctggagactttgcacctgggcttggccagctcccggctcagacctgaagctgagccagagctaggtgtgaagactccagaggagggctgcctcctgaacactgcccatgttactggccctgaggcccgctgtgctgcccttcgggaggaattcctggccttccgccgccgccgagatgctactagggctcggctaccagcctatcgacagccagtcccccaccccgaacaggccactctgctgtgaacatccctgatgtgaggctgtgaaaaggcatatggacctgcaaaggaggcccccaaccagacagacctagtttcaaacgagggcactgcccctgcctgcccctttggtgcccaggcacagaccctgatagtgggtttgggtcaccttggtatggaatgtatgtgctgaccccctaggtgagtctggggattggaacagggatcttaggtctgcctctctctctctctctctctctctctctctctctgtgtgtgtgtgtgtgtgtgtgaagttttttacaggtgaataaacaaagtttgaaag

SEQ ID NO: 14229 - DNA, 3996 bp, Homo sapiens
  source 1..3996: mol_type = unassigned DNA
gtggagccgagcggtgcggagcagatctggtggttctccggagagcagcttcctcgggtgttacatgagccaagccctcactgtacagaagagtgagagctgaaacctgttccctgagctgatcagaaggacatcccttggcccctccatctgggctcctgtggataggaggggctgggtgagcaggccagctgggctatggtgtggtgcctcggcctggccgtcctcagcctggtcatcagccagggggctgacggtcgagggaagcctgaggtggtatcggtggtgggccgggctggggagagtgtggtgctgggctgtgacctgctgcccccggccggccggccccccctgcatgtcatcgagtggctgcgctttggattcctgcttcccatcttcatccagttcggcctctactctccccgaattgaccctgattacgtgggacgagtccggctgcagaagggggcctctctccagattgagggtctccgggtggaagaccagggctggtacgagtgccgcgtgttcttcctggaccagcacatccctgaagacgattttgctaacggctcctgggtgcatctgacagtcaattcaccccctcaattccaggagacacctcctgctgtgttggaagtgcaggaactggagcctgtgaccctgcgttgtgtggcccgtggcagccccctgcctcatgtgacgtggaagctccgaggaaaggaccttggccagggccagggccaggtgcaagtgcagaacgggacgctgcggatccgccgggtagagcgaggcagctctggggtctacacctgccaagcctccagcactgagggcagcgccacccacgccacccagctgctagtgctaggacccccagtcatcgtggtgccccccaagaacagcacagtcaatgcctcccaggatgtttcattggcctgccatgctgaggcataccctgctaacctcacctacagctggttccaggacaacatcaatgtcttccacattagccgcctgcagccccgggtgcggatcctggtggacgggagcctgcggctgctggccacccagcctgatgatgccggctgctacacctgtgtgcccagcaatggcctcctgcatccaccctcagcctctgcctacctcactgtgctctgcatgccgggggtgatccgctgcccggttcgtgccaaccccccactgctctttgtcagctggaccaaggatggaaaggccctgcagctggacaagttccctggctggtcccagggcacagaaggctcactgatcatcgccctggggaacgaggatgccctgggagaatactcctgcaccccctacaacagtcttggtaccgccgggccctctcctgtgacccgcgtgctgctcaaggctcccccagcttttatagagcggcccaaggaagaatatttccaagaagtagggcgggagctgctcatcccctgctccgcccaaggggaccctcctcctgttgtctcttggaccaaggtgggccgggggctgcaaggccaggcccaggtggacagcaacagcagcctcatcctgcgaccattgaccaaggaggcccacgggcactgggaatgcagtgccagcaatgctgtggcccgagtggccacctccacgaacgtctacgtgctgggcactagccctcatgttgtcaccaatgtgtccgtggtggctttgcccaagggtgccaatgtctcctgggagcctggctttgatggtggttatctgcagagattcagtgtctggtacaccccactggccaagcgtcctgaccgaatgcaccatgactgggtgtccttggcagtgcctgtgggggctgctcacctcctagtgccagggctgcagccccacacccagtaccagttcagcgtgctagctcagaacaagctggggagtggtcccttcagcgaaatcgtcttgtctgctccggaagggcttcctaccacgccagctgcacccgggcttcccccaacagagataccgcctcccctgtcccctccgcggggtctggtggcagtgaggacaccccggggggtactcctgcattgggatcccccagagctggtccctaagagactggatggctacgtcttggaaggccggcaaggctcccagggctgggaggtgctggacccggctgtggcaggcacagaaacagagctgctggtgccaggcctcatcaaggatgttctctacgagttccgcctcgtggccttcgcgggcagcttcgtcagcgaccccagcaacacggccaacgtctccacttccggtctggaggtctacccttcgcgcacgcagctgccgggcctcctgcctcagcccgtgctggccggcgtggtgggcggagtctgctttctgggagtggccgtccttgtgagcatcctggccggctgcctcctgaaccggcgcagggctgcccgccgccgccgcaagcgcctccgccaagatccacctcttatcttctctccgaccgggaagtcagctgcaccctctgctctgggctcaggcagtcctgacagcgtggcgaagctgaagctccagggatccccagtccccagcctgcgccagagtctgctctggggggatcctgccggaactcccagcccccacccggatcctccatctagccggggacccttacctctggagcccatttgccggggcccagacgggcgctttgtgatggggcccactgtggcggccccccaggaaaggtcaggccgggagcaggcagaacctcggactccagcccagcgtctggcccggtcctttgactgtagcagcagcagccccagtggggcaccccagcccctctgcattgaagacatcagccctgtggcaccccctccagcagccccacccagtcccttgccaggtcctggacccctgctccagtacctgagcctgcccttcttccgagagatgaatgtggatggggactggcccccgcttgaggagcccagccctgctgcacccccagattacatggatacccggcgctgtcccacctcatctttccttcgttctccagaaacccctcctgtatcccccagggaatcacttcctggggctgtggtaggggctggggccactgcagagcccccttacacagccctggctgactggacactgagggagcggctgctgccaggccttctccctgctgcccctcgaggcagcctcaccagccagagcagtgggcgaggcagcgcttcgttcctgcggcccccctccacagccccctctgcaggaggcagctacctcagccctgctccaggagacaccagcagctgggccagtggccctgagagatggccccgaagggagcatgtggtgacagtcagcaagaggaggaacacatctgtggacgagaactatgagtgggactcagaattccctggggacatggaattgctggagactttgcacctgggcttggccagctcccggctcagacctgaagctgagccagagctaggtgtgaagactccagaggagggctgcctcctgaacactgcccatgttactggccctgaggcccgctgtgctgcccttcgggaggaattcctggccttccgccgccgccgagatgctactagggctcggctaccagcctatcgacagccagtcccccaccccgaacaggccactctgctgtgaacatccctgatgtgaggctgtgaaaaggcatatggacctgcaaaggaggcccccaaccagacagacctagtttcaaacgagggcactgcccctgcctgcccctttggtgcccaggcacagaccctgatagtgggtttgggtcaccttggtatggaatgtatgtgctgaccccctaggtgagtctggggattggaacagggatcttaggtctgcctctctctctctctctctctctctctctctctctgtgtgtgtgtgtgtgtgtgtgaagttttttacaggtgaataaacaaagtttgaaagatg

SEQ ID NO: 14230 - DNA, 4044 bp, Homo sapiens
  source 1..4044: mol_type = unassigned DNA
gtggagccgagcggtgcggagcagatctggtggttctccggagagcagcttcctcgggtgttacatgagccaagccctcactgtacagaagagtgagagctgaaacctgttccctgagctgatcagaaggacatcccttggcccctccatctgggctcctgtggataggaggggctgggtgagcaggccagctgggctatggtgtggtgcctcggcctggccgtcctcagcctggtcatcagccagggggctgacggtcgagggaagcctgaggtggtatcggtggtgggccgggctggggagagtgtggtgctgggctgtgacctgctgcccccggccggccggccccccctgcatgtcatcgagtggctgcgctttggattcctgcttcccatcttcatccagttcggcctctactctccccgaattgaccctgattacgtgggacgagtccggctgcagaagggggcctctctccagattgagggtctccgggtggaagaccagggctggtacgagtgccgcgtgttcttcctggaccagcacatccctgaagacgattttgctaacggctcctgggtgcatctgacagtcaattcaccccctcaattccaggagacacctcctgctgtgttggaagtgcaggaactggagcctgtgaccctgcgttgtgtggcccgtggcagccccctgcctcatgtgacgtggaagctccgaggaaaggaccttggccagggccagggccaggtgcaagtgcagaacgggacgctgcggatccgccgggtagagcgaggcagctctggggtctacacctgccaagcctccagcactgagggcagcgccacccacgccacccagctgctagtgctaggacccccagtcatcgtggtgccccccaagaacagcacagtcaatgcctcccaggatgtttcattggcctgccatgctgaggcataccctgctaacctcacctacagctggttccaggacaacatcaatgtcttccacattagccgcctgcagccccgggtgcggatcctggtggacgggagcctgcggctgctggccacccagcctgatgatgccggctgctacacctgtgtgcccagcaatggcctcctgcatccaccctcagcctctgcctacctcactgtgctctacccagcccaggtgacagctatgcctcctgagacacccctgcccataggcatgccgggggtgatccgctgcccggttcgtgccaaccccccactgctctttgtcagctggaccaaggatggaaaggccctgcagctggacaagttccctggctggtcccagggcacagaaggctcactgatcatcgccctggggaacgaggatgccctgggagaatactcctgcaccccctacaacagtcttggtaccgccgggccctctcctgtgacccgcgtgctgctcaaggctcccccagcttttatagagcggcccaaggaagaatatttccaagaagtagggcgggagctgctcatcccctgctccgcccaaggggaccctcctcctgttgtctcttggaccaaggtgggccgggggctgcaaggccaggcccaggtggacagcaacagcagcctcatcctgcgaccattgaccaaggaggcccacgggcactgggaatgcagtgccagcaatgctgtggcccgagtggccacctccacgaacgtctacgtgctgggcactagccctcatgttgtcaccaatgtgtccgtggtggctttgcccaagggtgccaatgtctcctgggagcctggctttgatggtggttatctgcagagattcagtgtctggtacaccccactggccaagcgtcctgaccgaatgcaccatgactgggtgtccttggcagtgcctgtgggggctgctcacctcctagtgccagggctgcagccccacacccagtaccagttcagcgtgctagctcagaacaagctggggagtggtcccttcagcgaaatcgtcttgtctgctccggaagggcttcctaccacgccagctgcacccgggcttcccccaacagagataccgcctcccctgtcccctccgcggggtctggtggcagtgaggacaccccggggggtactcctgcattgggatcccccagagctggtccctaagagactggatggctacgtcttggaaggccggcaaggctcccagggctgggaggtgctggacccggctgtggcaggcacagaaacagagctgctggtgccaggcctcatcaaggatgttctctacgagttccgcctcgtggccttcgcgggcagcttcgtcagcgaccccagcaacacggccaacgtctccacttccggtctggaggtctacccttcgcgcacgcagctgccgggcctcctgcctcagcccgtgctggccggcgtggtgggcggagtctgctttctgggagtggccgtccttgtgagcatcctggccggctgcctcctgaaccggcgcagggctgcccgccgccgccgcaagcgcctccgccaagatccacctcttatcttctctccgaccgggaagtcagctgcaccctctgctctgggctcaggcagtcctgacagcgtggcgaagctgaagctccagggatccccagtccccagcctgcgccagagtctgctctggggggatcctgccggaactcccagcccccacccggatcctccatctagccggggacccttacctctggagcccatttgccggggcccagacgggcgctttgtgatggggcccactgtggcggccccccaggaaaggtcaggccgggagcaggcagaacctcggactccagcccagcgtctggcccggtcctttgactgtagcagcagcagccccagtggggcaccccagcccctctgcattgaagacatcagccctgtggcaccccctccagcagccccacccagtcccttgccaggtcctggacccctgctccagtacctgagcctgcccttcttccgagagatgaatgtggatggggactggcccccgcttgaggagcccagccctgctgcacccccagattacatggatacccggcgctgtcccacctcatctttccttcgttctccagaaacccctcctgtatcccccagggaatcacttcctggggctgtggtaggggctggggccactgcagagcccccttacacagccctggctgactggacactgagggagcggctgctgccaggccttctccctgctgcccctcgaggcagcctcaccagccagagcagtgggcgaggcagcgcttcgttcctgcggcccccctccacagccccctctgcaggaggcagctacctcagccctgctccaggagacaccagcagctgggccagtggccctgagagatggccccgaagggagcatgtggtgacagtcagcaagaggaggaacacatctgtggacgagaactatgagtgggactcagaattccctggggacatggaattgctggagactttgcacctgggcttggccagctcccggctcagacctgaagctgagccagagctaggtgtgaagactccagaggagggctgcctcctgaacactgcccatgttactggccctgaggcccgctgtgctgcccttcgggaggaattcctggccttccgccgccgccgagatgctactagggctcggctaccagcctatcgacagccagtcccccaccccgaacaggccactctgctgtgaacatccctgatgtgaggctgtgaaaaggcatatggacctgcaaaggaggcccccaaccagacagacctagtttcaaacgagggcactgcccctgcctgcccctttggtgcccaggcacagaccctgatagtgggtttgggtcaccttggtatggaatgtatgtgctgaccccctaggtgagtctggggattggaacagggatcttaggtctgcctctctctctctctctctctctctctctctctctgtgtgtgtgtgtgtgtgtgtgaagttttttacaggtgaataaacaaagtttgaaagatg

SEQ ID NO: 14231 - DNA, 7309 bp, Homo sapiens
  source 1..7309: mol_type = unassigned DNA
gctccgcccgggcgagtagtgcaggtgccgctgcgccggggccggggaggcgcgcgccgagccgagcggagcctaggagggatggagagctggccacccgggctgcaggagcaccggcgcggggcgtaggcggcgcgaggcgggcgcgaggcgggcgctcgggcgcgaggcgcgtgcgggcgcgggagcactttgcgataggatgaggctccgggctggcgcggtagtactatgatttggtatgtggccactttcatagcaagtgtgatcggcacccgagggcttgcggctgaaggcgcccacggcctgcgagaggagcccgagtttgtgacggcaagagctggggagagcgtggtcctgcgatgcgacgtgatccacccagtgacgggacagcccccaccctatgtcgtagagtggttcaagttcggggtccccatccctatcttcatcaagtttggctactacccgccgcacgtggaccctgagtatgcaggccgggccagtcttcatgataaggcatctctgcggctggaacaagttcgctctgaggaccagggctggtatgagtgcaaagtgctcatgctggaccagcagtatgacaccttccacaatggcagctgggtccacctcaccatcaacgcccctcccacctttacagaaacacccccccagtacatcgaggccaaggagggtggtagtatcaccatgacctgcacagcttttgggaaccccaagcccattgtcacctggctcaaggaggggacgctcctcggtgctagtgggaaataccaggtgagtgacggcagcctgacagtgacatcggtcagtcgggaggacagaggtgcctacacctgccgagcgtacagcattcagggggaggctgtccacacgactcacctgcttgtccaagggccccctttcatcgtctcccctcctgagaacatcaccgtcaacatctcccaggatgctctgctcacctgccgggcagaggcgtatccgggcaacctcacctacacctggtactggcaggacgagaacgtctactttcagaacgacctgaagctgagggtgcgcatcctaatcgatgggaccctgatcatcttccgggtgaagccggaggactcggggaagtacacctgtgtgcccagcaacagcctggggcgctccccctccgcctcggcgtacctgaccgtgcagtacccagcgcgtgtcctcaacatgccccctgtgatttacgtgcccgtggggatccatggctacatccgctgccctgtggacgcagaaccaccggccaccgtggtcaagtggaacaaggacggccgtcccctgcaggttgagaagaacctcggttggaccctgatggaggatggctccattcgaattgaggaggccacagaggaggctcttggcacttatacctgtgtgccttacaacactctggggaccatgggccagtctgcccctgcgaggcttgtcctgaaggaccccccctatttcacggtgctaccaggctgggagtacaggcaggaggccggccgggagctacttatcccctgtgctgccgcaggggacccctttcctgtcatcacttggagaaaggtagggaagcccagcagaagcaagcacagtgccctgcccagtgggagcctgcagttccgtgccctgagtaaggaggaccacggggagtgggaatgtgtcgccaccaacgtggtcacgagcatcactgccagcacccacctcaccgtcatcggcaccagcccccatgccccgggcagtgtccgggtccaggtctccatgacaactgccaacgtgtcctgggaaccaggctatgatggaggctacgagcagacattctcagtttggatgaagcgggcacagtttgggccccatgactggctgtccttgccagtgccgccaggacccagctggctgctggtggacaccctggagcctgagacagcgtaccagttcagcgtcctggcccagaacaagctgggaaccagcgccttcagtgaggtggtcactgtgaacactttagcattccctattacaactccagaacccctggtgctggtcaccccaccgaggtgcctcatagccaatcggactcagcagggtgtgctcctgtcctggcttccgcctgccaaccacagctttcccatcgaccgctacatcatggagttccgtgtcgcagagcgctgggagttgctcgacgatggcatccccggcaccgaaggagagttctttgccaaggatctgtcacaggacacgtggtatgagttccgggttctggccgtcatgcaggatctgatcagcgagcccagcaacatcgccggcgtctccagcacagacatcttcccgcagccggacctgaccgaggatgggctggcgcggcctgtgctggcgggaatcgtagctaccatctgcttcttggcagctgccatcctgttcagcaccctggctgcctgctttgtcaacaagcagcgcaagcgtaagctcaagcgcaaaaaagaccctccactctccatcacccactgcaggaagagcctggagtctcccttgtcctctggcaaggtgagccccgagagcatccgcacgctccgagcgccgtcagaatcctccgacgaccagggccagcccgcggccaagaggatgctgagccccacccgtgagaaggagctgtcgctgtacaagaagaccaagcgggccatcagcagcaagaagtacagcgtggccaaggcagaggccgaggcagaggccaccacgcccatcgagctcatcagcagaggccctgacggccgcttcgtgatggaccctgccgagatggagccctcgctgaagagcaggcgcatcgagggcttccccttcgccgaggagacggacatgtaccccgagttccgccagtcggacgaggagaacgaggacccactggtgcccacatctgtggccgccctgaagtcccagctcacccctctgtcatccagccaggagtcctacctgccaccaccagcatacagccctcggttccagccccgcgggctggagggccccggtggcctggaaggtcggcttcaggccacaggccaggcccggccccctgccccccggcccttccaccatggccagtattatgggtacctcagcagcagcagccctggggaggtggagccgcccccgttctacgtgccagaagtgggcagccccctgagctccgtcatgtcgtccccgcccctgcccaccgaggggccctttggccaccccaccatccccgaggagaatggagagaatgcatccaacagcacgctgcccttgactcagacacctacaggagggcgctcccctgagccctggggccggccagaattccccttcggggggctggagaccccagcgatgatgttcccccaccagctgccaccctgtgatgtgcccgagagtctgcagcccaaggccggcctcccccgaggactgccccccacctccctgcaggtgcccgcggcctacccgggcatcctgtctctggaggcaccgaagggttgggcaggcaagtcgcccggcaggggccctgtcccagcgccccccgccgccaagtggcaggacagacctatgcaacctctggtaagccaagggcagctgcgacatacaagccaaggcatgggcatacctgtgctgccttaccccgagccggctgagccgggggcgcacggcggccccagcacatttggcctggacacccggtggtatgagccccagccccggccccggcctagccctcggcaggccaggcgcgccgagcccagtttacatcaagtggtgctacagccctcccggctctcacctctgacccaaagccccctcagctcccgcaccggctcccctgagctcgccgcccgtgcccggcctcgcccgggcctcctgcagcaggcagagatgtcagagatcaccctgcagccgccggctgcagtcagcttttctcgaaagtctacgccgtccacaggctccccctcccagagcagccgcagtgggagtcccagctaccggcccgccatgggcttcaccactctggccaccggctacccttcccctccacccggccccgcccctgctgggcctggggacagcttggacgtgtttggacagacgccttcccctcgaaggacgggggaggaattgctccgaccggagaccccaccacccacgttacctacttcagggaagctgcagagagacagaccagctcccgcgaccagcccgcctgagagagcactctctaaactgtagcagctggtattccagctatctgggcagtgttgtcgagacaagcctctcctcagctcaataggtaagggagctcctcggctgggcgggcgggggcgggcaggcggacggggcttcggccgggccattgcttcctggacaggggatccaaaccatgtcccctcaccgccccgtggggtggccgctgccgctcctcgatccccacggcttctgggttccccacatcgagccacgctcggcaccgcctagctgcagcttctgccccccaccccccgtccccatgtccggcccctctagagccccctgcggctctcctcactcctcgccagcctcgccagcctgctgccagtacacccagggcctcccacagaagccctggggccctgcatgcaccccgaaggggcccagaacacccgagatctgctttgcatctctgcacccttggggacctctctggggcccctctggtatccaggaagagcccccccgcaccctattctcccagcagccccaggcatagcatcccttctcctggggtggctggcccctcaccagcttcttgagatcttcgtggtattaggctctctcgaggagtacaaggttgggatgagccccacttcttccttgacagtggggtcctctgcagggtcaggtccctgcagtcctatggggctttgtagcgaaatgtcatcactcccctgtgctccttgccttctgcagcctgaccttggtagtcacaggactgaaatgtgacctagcccttgggtccacattgctttcaaggtccctgttgtagccttgtcgtcctccctgggtcatgctgtagggaaagggtcttaggaggacctccccgaggggagggggcaggcttcccctgggcagacaggcattgagctggcaggaagtgaaacccccagggaccagcactgtgtccctccccctgcccccgcagtcagcctctccttgagtgtccttccaggtggaagctaaaggaacttgggcattcagggagcctctgagtccctcacagagactcagggccacccgaagctcgctccctctcacagtagcctgacaaggtgctgccgctcgccacggaccctctgccctgtgcctgggcacacacaggcatcgggcacctgcatgggagacggcgagcctcccgtccaggtgcttctggctttccaggcgagaaggagacaggtgccttccccccctagagatgtcaagggaggttcactttcctaaccagggctataaatctcattcattcctaagagtggcctccataaagaggactgccctgacatttctttaccatctgtagctataaaattgtcagcagcccagaggccctggaattgtgggtgaggctgtctggcatagggtgagtgtgagggctgtcaggcagcgtttatgagctcacctgctctggggccctcctgcgcccagagacccactggtcttccaccttccccagctccctccctgtcccagctgtgactcctccacagcccccggaggtgtgggagccctagactagctctcaccccagctcctggaaattcctagactctgctctcatgtgttattcctcaccccttcactcaactccattgaccctctcctttcccagtgtccccactgtgccagatccaagagaagcccgctctcctttcactgctgtggcaaacccagaaaccaggggcagcgatgagggaccatcgtttctctcccgggcctggccagcatccccagcctaggagaaggagaccctccccatcctgagtcagcccctcggtgctggcctctcctgcctgctgggagcctccccggtacggctgctgggtcctggggagatgcaggctctgttcagatgctgtctccatgctgcacctttgcatgtgtgccctcttggtcttgcttggagaagttgtgacagctcttgtccacgtgcgttctcactgtttcttttcccttcagttcctctcctgttcctttggtccatatgtagttgttgcccctgcctctcctcctttctctctccctttttttctcctcttcccaactcccttctcaacatggggagttgtattgcgtggacctgtcctttctgtggactgtggggaggccgagccaattcttagctcctgtctgagcctagtgatgccctgtcctcacctctgcttccactccctttcccattcaggctgactgtcaccgcagggaggcaggtgggtctggagcatggagtggcccctgtcctgggtcagctgtaggaaggggcccctttgtaaacaagcttctgccaggttctgaggcagagcactggtctgagtccggccccacagaagggttccatcttgtggtcagcggggtgggctcagacctgcagactcccgcagtgggcccaccctttcccttgctatggcccgtctatgagtggctttcccctgcctccatcggtgtataatcaggcaggtggtgtttgctcttaggtgattagaagaggaggaaaatgcccatcaagccactgcttcagcctgttggccagggaacacctgaacagggtcaaaatggtcagctcctgggcgctgagctaaggaaatatgcagggggttttgactttccctgtcctgaggcttgcctccactttgacctggctgcatctttcctcagctcttctgggtaagctgagagctaagcaaataagacctcctgggctacctggtcatgatttgggttttgtatggattttttgaaaagagagaaaaagagtgtgggctgggtgccgtggcccagagggcagatctcttgagtccaggagttcaaggccagcctgggcaacatagtgaagccccatctctgcaaaaaaatacaaaaaaatagctgggcatggtggcacatgcctatagtcccagctccttggggggctgaggtgggaagatcatctgagctggggaggtcgaggcagcagtgagccgagattgcgccacttcactccagcctgggtgacagagaccctgtctca

SEQ ID NO: 14232 - DNA, 2659 bp, Homo sapiens
  source 1..2659: mol_type = unassigned DNA
ccgaggggttccttggagaaggtggtgcgtcctggggcggcagctgaggaagaaagacgcagtgccccgaagcccctgagctgaaaagggccagaaagggggcggcatggcatggcccaaactgcccgcaccttggctgctgctctgcacctggctcccagcagggtgcctgtccttgcttgtgacggtccagcacacagaacgctatgtcaccctgtttgcctctatcatcctcaaatgtgactacaccacctctgcccagctccaggacgtggtggtgacatggcgcttcaagtccttctgcaaggaccctatctttgactactactcagcgtcataccaggcagctttatccctgggccaggacccatccaatgactgcaacgacaaccagcgggaagttcgcatagtggcccagcggcgggggcagaatgagcccgtgctgggggtagattaccggcagcgcaagatcaccatccagaaccgagcagatctcgtgataaatgaagtgatgtggtgggaccatggagtgtattactgcaccattgaggctccaggggacacatcaggagaccccgataaggaagtaaagctcatcgtcctacactggctgacagtgatcttcatcatcctgggagccctcctcctcctgctgctgattggagtgtgctggtgccagtgctgtcctcagtattgctgctgctatatccgctgtccctgctgtcctgcccactgctgctgtcctgaggaagatttgtccctgccgtccagcctcccgcagatgccaatgacccagaccaccaatcagcctcccatcgccaatggtgtcctggagtatttggagaaagaactgcggaacctcaacctggcccagcctctgccccctgacctcaaaggcagatttggccatccctgcagcatgctgtcctccctgggctctgaggtcgtggaacgcagaatcatccacctgcccccactgatcagagacctgtcatcctcaaggaggaccagtgactccctgcaccagcagtggctcaccccaattccctccaggccctgggatctgagggaggggagaagccaccaccattaccctgatttccaccaggagctccaggaccgggggccaaagtcttgggcattggaaagaagggagttggacccatcgtggagtggaaggcaccgtagctctaggctgaatgggtcacccatacactggtcagacagggacagcctaagcgatgtcccctcatccagtgaggcacgctggcggccgagccaccctcctttcaggagccgctgtcaggagaggccccgcaggcccagcccccgggagagcactcagaggcacgggagacgacgcaggcaccgcagctactctcctcccttgccctccggcctcagttcctggagctctgaagaggacaaggagaggcagccccagagctggcgggcccaccgccgcggctcgcactccccacactggcccgaggagaagccgcctagctaccgctcacttgatatcactccaggcaagaatagcaggaaaaaagggagtgtggagaggcgctcggagaaagacagctctcatagtggaaggagtgtggtcatttagtcaccaagcacagcacaacttctgtggctacttctcggctcctgtgtgtcatcagcatcacctaggtttccagctgacttgggaactgcaagtctgagtctaacagtttttggcttagattctgagaatcaaatagaagaattttaaatacaagagtttgagattgggtatagtggctcacacctgtaatcacagcactttgggaggctaagaatcacttgagactaggagttcaagatcagcctgggaaacatagtgagaccccgtctctacaaaaaatataaaaattagttaggtgtggtggcatgcacttgtagtcccagctactcaagaggctgaggcagaaggatcccttgagcccaggagtgcaaggctgcaatgagccaggatcccatgatcacacatctgtattccagcctgggcaatagagcaagtccccattactaaaaaacccaaaaggccaaaaaacaaaaaagttagagttcgaggaattaccaactgtagttttagccttggttcatgctctcttgcatatttatataatctctgacttgtaatggaccctgactggaatgtgatccctcaggaacttagtagcctgagtctttcagtagactacactgcccagaaccctggccattctcaaaatgagaacttgggaatgtttaagaagaaatcaaacatgtttcaggaaaaggaaatctatggagtattatagggacattcccatgggaatgtatcttcctccatggcatgtcttgagggtcctttcttgttaggagtttatcctgccagcccataaatggactatttattgtaagtgtagaaaatcacagagaagcagttttgcaccagccttattcctgtgccttgttttcctcttgctctttttttacctgtatatctaatttatattttcatatatattgtgtattgattgaagtcactttaaatccttcttgggaatgacacagtatataaataaggaagaaagaaaacatgccaagctgagcatgctgctccaaataaatatctgctttccta

SEQ ID NO: 14233 - DNA, 2226 bp, Homo sapiens
  source 1..2226: mol_type = unassigned DNA
ctgcgccgagggaggggaaacccgaggggttccttggagaaggtggtgcgtcctggggcggcagctgaggaagaaagacgcagtgccccgaagcccctgagctgaaaagggccagaaagggggcggcatggcatggcccaaactgcccgcaccttggctgctgctctgcacctggctcccagcagggtgcctgtccttgcttgtgacggtccagcacacagaacgctatgtcaccctgtttgcctctatcatcctcaaatgtgactacaccacctctgcccagctccaggacgtggtggtgacatggcgcttcaagtccttctgcaaggaccctatctttgactactactcagcgtcataccaggcagctttatccctgggccaggacccatccaatgactgcaacgacaaccagcgggaagttcgcatagtggcccagcggcgggggcagaatgagcccgtgctgggggtagattaccggcagcgcaagatcaccatccagaaccgagcagatctcgtgataaatgaagtgatgtggtgggaccatggagtgtattactgcaccattgaggctccaggggacacatcaggagaccccgataaggaagtaaagctcatcgtcctacactggctgacagtgatcttcatcatcctgggagccctcctcctcctgctgctgattggagtgtgctggtgccagtgctgtcctcagtattgctgctgctatatccgctgtccctgctgtcctgcccactgctgctgtcctgaggaagccctggcccgccaccgctacatgaagcaggcccaggccctaggtcctcagatgatgggaaaacccctgtactggggggcggacaggagctcccaggtttcatcttatccaatgcacccgctgctgcagcgagatttgtccctgccgtccagcctcccgcagatgccaatgacccagaccaccaatcagcctcccatcgccaatggtgtcctggagtatttggagaaagaactgcggaacctcaacctggcccagcctctgccccctgacctcaaaggcagatttggccatccctgcagcatgctgtcctccctgggctctgaggtcgtggaacgcagaatcatccacctgcccccactgatcagagacctgtcatcctcaaggaggaccagtgactccctgcaccagcagtggctcaccccaattccctccaggccctgggatctgagggaggggagaagccaccaccattaccctgatttccaccaggagctccaggaccgggggccaaagtcttgggcattggaaagaagggagttggacccatcgtggagtggaaggcaccgtagctctaggctgaatgggtcacccatacactggtcagacagggacagcctaagcgatgtcccctcatccagtgaggcacgctggcggccgagccaccctcctttcaggagccgctgtcaggagaggccccgcaggcccagcccccgggagagcactcagaggcacgggagacgacgcaggcaccgcagctactctcctcccttgccctccggcctcagttcctggagctctgaagaggacaaggagaggcagccccagagctggcgggcccaccgccgcggctcgcactccccacactggcccgaggagaagccgcctagctaccgctcacttgatatcactccaggcaagaatagcaggaaaaaagggagtgtggagaggcgctcggagaaagacagctctcatagtggaaggagtgtggtcatttagtcaccaagcacagcacaacttctgtggctacttctcggctcctgtgtgtcatcagcatcacctaggtttccagctgacttgggaactgcaagtctgagtctaacagtttttggcttagattctgagaatcaaatagaagaattttaaatacaagagtttgagattgggtatagtggctcacacctgtaatcacagcactttgggaggctaagaatcacttgagactaggagttcaagatcagcctgggaaacatagtgagaccccgtctctacaaaaaatataaaaattagttaggtgtggtggcatgcacttgtagtcccagctactcaagaggctgaggcagaaggatcccttgagcccaggagtgcaaggctgcaatgagccaggatcccatgatcacacatctgtattccagcctgggcaatagagcaagtccccattactaaaaaacccaaaa

SEQ ID NO: 14234 - DNA, 684 bp, Homo sapiens
  source 1..684: mol_type = unassigned DNA
gtgccccgaagcccctgagctgaaaagggccagaaagggggcggcatggcatggcccaaactgcccgcaccttggctgctgctctgcacctggctcccagcagggtgcctgtccttgcttgtgacggtccagcacacagaacgctatgtcaccctgtttgcctctatcatcctcaaatgtgactacaccacctctgcccagctccaggacgtggtggtgacatggcgcttcaagtccttctgcaaggaccctatctttgactactactcagcgtcataccaggcagctttatccctgggccaggacccatccaatgactgctgctgctgtcctgaggaagccctggcccgccaccgctacatgaagcaggcccaggccctaggtcctcagatgatgggaaaacccctgtactggggggcggacaggagctcccaggtttcatcttatccaatgcacccgctgctgcagcgagatttgtccctgccgtccagcctcccgcagatgccaatgacccagaccaccaatcagcctcccatcgccaatggtgtcctggagtatttggagaaagaactgcggaacctcaacctggcccagcctctgccccctgacctcaaaggcagatttggccatccctgcagcatgctgtcctccctgggctctgagaatcaaatagaagaattttaa

SEQ ID NO: 14235 - DNA, 1456 bp, Homo sapiens
  source 1..1456: mol_type = unassigned DNA
gtgccccgaagcccctgagctgaaaagggccagaaagggggcggcatggcatggcccaaactgcccgcaccttggctgctgctctgcacctggctcccagcagggtgcctgtccttgcttgtgacggtccagcacacagaacgctatgtcaccctgtttgcctctatcatcctcaaatgtgactacaccacctctgcccagctccaggacgtggtggtgacatggcgcttcaagtccttctgcaaggaccctatctttgactactactcagcgtcataccaggcagctttatccctgggccaggacccatccaatgactgcaacgacaaccagcgggaagttcgcatagtggcccagcggcgggggcagaatgagcccgtgctgggggtagattaccggcagcgcaagatcaccatccagaaccccctggcccgccaccgctacatgaagcaggcccaggccctaggtcctcagatgatgggaaaacccctgtactggggggcggacaggagctcccaggtttcatcttatccaatgcacccgctgctgcagcgagatttgtccctgccgtccagcctcccgcagatgccaatgacccagaccaccaatcagcctcccatcgccaatggtgtcctggagtatttggagaaagaactgcggaacctcaacctggcccagcctctgccccctgacctcaaaggcagatttggccatccctgcagcatgctgtcctccctgggctctgaggtcgtggaacgcagaatcatccacctgcccccactgatcagagacctgtcatcctcaaggaggaccagtgactccctgcaccagcagtggctcaccccaattccctccaggccctgggatctgagggaggggagaagccaccaccattaccctgatttccaccaggagctccaggaccgggggccaaagtcttgggcattggaaagaagggagttggacccatcgtggagtggaaggcaccgtagctctaggctgaatgggtcacccatacactggtcagacagggacagcctaagcgatgtcccctcatccagtgaggcacgctggcggccgagccaccctcctttcaggagccgctgtcaggagaggccccgcaggcccagcccccgggagagcactcagaggcacgggagacgacgcaggcaccgcagctactctcctcccttgccctccggcctcagttcctggagctctgaagaggacaaggagaggcagccccagagctggcgggcccaccgccgcggctcgcactccccacactggcccgaggagaagccgcctagctaccgctcacttgatatcactccaggcaagaatagcaggaaaaaagggagtgtggagaggcgctcggagaaagacagctctcatagtggaaggagtgtggtcatttagtcaccaagcacagcacaacttctgtggctacttctcg

SEQ ID NO: 14236 - DNA, 1612 bp, Homo sapiens
  source 1..1612: mol_type = unassigned DNA
taagaacccagactctgtctgtgagctcctagccaggtcaggcaggatggcaggcaatatcttttgcccatttgcattgtttttcttacccatgagcagagtaggtcaccttcagcattttctcctgctcttggctttagggtgcctgtccttgcttgtgacggtccagcacacagaacgctatgtcaccctgtttgcctctatcatcctcaaatgtgactacaccacctctgcccagctccaggacgtggtggtgacatggcgcttcaagtccttctgcaaggaccctatctttgactactactcagcgtcataccaggcagctttatccctgggccaggacccatccaatgactgcaacgacaaccagcgggaagttcgcatagtggcccagcggcgggggcagaatgagcccgtgctgggggtagattaccggcagcgcaagatcaccatccagaaccgagcagatctcgtgataaatgaagtgatgtggtgggaccatggagtgtattactgcaccattgaggctccaggggacacatcaggagaccccgataaggaagtaaagctcatcgtcctacactggctgacagtgatcttcatcatcctgggagccctcctcctcctgctgctgattggagtgtgctggtgccagtgctgtcctcagtattgctgctgctatatccgctgtccctgctgtcctgcccactgctgctgtcctgaggaagatttgtccctgccgtccagcctcccgcagatgccaatgacccagaccaccaatcagcctcccatcgccaatggtgtcctggagtatttggagaaagaactgcggaacctcaacctggcccagcctctgccccctgacctcaaaggcagatttggccatccctgcagcatgctgtcctccctgggctctgaggtcgtggaacgcagaatcatccacctgcccccactgatcagagacctgtcatcctcaaggaggaccagtgactccctgcaccagcagtggctcaccccaattccctccaggccctgggatctgagggaggggagaagccaccaccattaccctgatttccaccaggagctccaggaccgggggccaaagtcttgggcattggaaagaagggagttggacccatcgtggagtggaaggcaccgtagctctaggctgaatgggtcacccatacactggtcagacagggacagcctaagcgatgtcccctcatccagtgaggcacgctggcggccgagccaccctcctttcaggagccgctgtcaggagaggccccgcaggcccagcccccgggagagcactcagaggcacgggagacgacgcaggcaccgcagctactctcctcccttgccctccggcctcagttcctggagctctgaagaggacaaggagaggcagccccagagctggcgggcccaccgccgcggctcgcactccccacactggcccgaggagaagccgcctagctaccgctcacttgatatcactccaggcaagaatagcaggaaaaaagggagtgtggagaggcgctcggagaaagacagctctcatagtggaaggagtgtggtcatttagtcaccaagcacagcacaactt

SEQ ID NO: 14237 - DNA, 2881 bp, Homo sapiens
  source 1..2881: mol_type = unassigned DNA
tcggaaggggccaggagacactggaaggtccggacggcagggaaggggacggggttctttccagtcccacccgtgtagggacacctctccccctcatcccccgatgtaccctcgctgaatctgggatgggagagacgaaccgagtctaggcatctgcgtagcagcgccggggagagcggggagcccagggcggagcccagtcgactcccggattcccctgccccgcccccggcacgaggccccgccccggcggccccgcccctcctcgggactcgaccgggctgcgctcactgcccagccggggccccgggagcctccaggctcccgcccgccctgagctgcggcctccgcatggaggggccactcactccaccaccgctgcagggaggcggagccgccgctgttccggagcccggagcccggcaacacccgggacacgagacggcggcgcagcggtacagcgcccgactgctgcaggccggctacgagcccgagagccctagattggacctcgctacacacccgacgacaccccgttcagaactatcttcagtggtcttactggcaggtgttggtgtccagatggatcgccttcgcagggctagcatggcggactacctgatcagcggcggcaccggctacgtgcccgaggatgggctcaccgcgcagcagctcttcgccagcgccgacggcctcacctacaacgacttcctgattctcccaggattcatagacttcatagctgatgaggtggacctgacctcagccctgacccggaagatcacgctgaagacgccactgatctcctcccccatggacactgtgacagaggctgacatggccattgccatggctctgatgggaggtattggtttcattcaccacaactgcaccccagagttccaggccaacgaggtgcggaaggtcaagaagtttgaacagggcttcatcacggaccctgtggtgctgagcccctcgcacactgtgggcgatgtgctggaggccaagatgcggcatggcttctctggcatccccatcactgagacgggcaccatgggcagcaagctggtgggcatcgtcacctcccgagacatcgactttcttgctgagaaggaccacaccaccctcctcagtgaggtgatgacgccaaggattgaactggtggtggctccagcaggtgtgacgttgaaagaggcaaatgagatcctgcagcgtagcaagaaagggaagctgcctatcgtcaatgattgcgatgagctggtggccatcatcgcccgcaccgacctgaagaagaaccgagactaccctctggcctccaaggattcccagaagcagctgctctgtggggcagctgtgggcacccgtgaggatgacaaataccgtctggacctgctcacccaggcgggcgtcgacgtcatagtcttggactcgtcccaagggaattcggtgtatcagatcgccatggtgcattacatcaaacagaagtacccccacctccaggtgattggggggaacgtggtgacagcagcccaggccaagaacctgattgatgctggtgtggacgggctgcgcgtgggcatgggctgcggctccatctgcatcacccaggaagtgatggcctgtggtcggccccagggcactgctgtgtacaaggtggctgagtatgcccggcgctttggtgtgcccatcatagccgatggcggcatccagaccgtgggacacgtggtcaaggccctggcccttggagcctccacagtgatgatgggctccctgctggccgccactacggaggcccctggcgagtacttcttctcagacggggtgcggctcaagaagtaccggggcatgggctcactggatgccatggagaagagcagcagcagccagaaacgatacttcagcgagggggataaagtgaagatcgcgcagggtgtctcgggctccatccaggacaaaggatccattcagaagttcgtgccctacctcatagcaggcatccaacacggctgccaggatatcggggcccgcagcctgtctgtccttcggtccatgatgtactcaggagagctcaagtttgagaagcggaccatgtcggcccagattgagggtggtgtccatggcctgcactcttacgaaaagcggctgtactgaggacagcggtggaggccgaggtggtggaggggatgcaccccagtgtccacttttgggcacagcctccctccataactgagtggtccacagatttgcactacgggttctccagctcctttccaggcagagaggaggggaggtcctgaggggactgctgcccctcactcggcatcccctgcagagtcaggactgctcccggggccaggctgccctgggagcccccctccgagcccagccagccaggctctcaggccctgcgcctgcctcaggtctttcttgctgcagcctgctccagcctggcccccaccccaggggcaggcggcccctcctggcttctcctgtagggcacctccctgcccctagcctcccaggaaatggtgctctcctggccctgcctctggcccttcccgggccgctgcccctcagccatgtggcacttctgagctcctgacctaggccaaggggaggtctctgcccccttccccggccctgggctacccttgggtcctgctcctcaggccgctcccctgtccctggccatgggtaggagactgccctggtcatggccgcctgcctgtcattcctgactcaccaccgtccccaggtgaaccattcctcccttctcctcagctgcagtcgaaggctttaactttgcacacttgggatcacagttgcgtcattgtgtattaaatacttggaataaatcaagcaggtctcaacgcctccacta

SEQ ID NO: 14238 - DNA, 2395 bp, Homo sapiens
  source 1..2395: mol_type = unassigned DNA
ggctgcgctcactgcccagccggggccccgggagcctccaggctcccgcccgccctgagctgcggcctccgcatggaggggccactcactccaccaccgctgcagggaggcggagccgccgctgttccggagcccggagcccggcaacacccgggacacgagacggcggcgcagcggtacagcgcccgactgctgcaggccggctacgagcccgagagcatggcggactacctgatcagcggcggcaccggctacgtgcccgaggatgggctcaccgcgcagcagctcttcgccagcgccgacggcctcacctacaacgacttcctgattctcccaggattcatagacttcatagctgatgaggtggacctgacctcagccctgacccggaagatcacgctgaagacgccactgatctcctcccccatggacactgtgacagaggctgacatggccattgccatggctaagtttgaacagggcttcatcacggaccctgtggtgctgagcccctcgcacactgtgggcgatgtgctggaggccaagatgcggcatggcttctctggcatccccatcactgagacgggcaccatgggcagcaagctggtgggcatcgtcacctcccgagacatcgactttcttgctgagaaggaccacaccaccctcctcagtgaggtgatgacgccaaggattgaactggtggtggctccagcaggtgtgacgttgaaagaggcaaatgagatcctgcagcgtagcaagaaagggaagctgcctatcgtcaatgattgcgatgagctggtggccatcatcgcccgcaccgacctgaagaagaaccgagactaccctctggcctccaaggattcccagaagcagctgctctgtggggcagctgtgggcacccgtgaggatgacaaataccgtctggacctgctcacccaggcgggcgtcgacgtcatagtcttggactcgtcccaagggaattcggtgtatcagatcgccatggtgcattacatcaaacagaagtacccccacctccaggtgattggggggaacgtggtgacagcagcccaggccaagaacctgattgatgctggtgtggacgggctgcgcgtgggcatgggctgcggctccatctgcatcacccaggaagtgatggcctgtggtcggccccagggcactgctgtgtacaaggtggctgagtatgcccggcgctttggtgtgcccatcatagccgatggcggcatccagaccgtgggacacgtggtcaaggccctggcccttggagcctccacagtgatgatgggctccctgctggccgccactacggaggcccctggcgagtacttcttctcagacggggtgcggctcaagaagtaccggggcatgggctcactggatgccatggagaagagcagcagcagccagaaacgatacttcagcgagggggataaagtgaagatcgcgcagggtgtctcgggctccatccaggacaaaggatccattcagaagttcgtgccctacctcatagcaggcatccaacacggctgccaggatatcggggcccgcagcctgtctgtccttcggtccatgatgtactcaggagagctcaagtttgagaagcggaccatgtcggcccagattgagggtggtgtccatggcctgcactcttacgaaaagcggctgtactgaggacagcggtggaggccgaggtggtggaggggatgcaccccagtgtccacttttgggcacagcctccctccataactgagtggtccacagatttgcactacgggttctccagctcctttccaggcagagaggaggggaggtcctgaggggactgctgcccctcactcggcatcccctgcagagtcaggactgctcccggggccaggctgccctgggagcccccctccgagcccagccagccaggctctcaggccctgcgcctgcctcaggtctttcttgctgcagcctgctccagcctggcccccaccccaggggcaggcggcccctcctggcttctcctgtagggcacctccctgcccctagcctcccaggaaatggtgctctcctggccctgcctctggcccttcccgggccgctgcccctcagccatgtggcacttctgagctcctgacctaggccaaggggaggtctctgcccccttccccggccctgggctacccttgggtcctgctcctcaggccgctcccctgtccctggccatgggtaggagactgccctggtcatggccgcctgcctgtcattcctgactcaccaccgtccccaggtgaaccattcctcccttctcctcagctgcagtcgaaggctttaactttgcacacttgggatcacagttgcgtcattgtgtattaaatacttggaataaatc

SEQ ID NO: 14239 - DNA, 2479 bp, Homo sapiens
  source 1..2479: mol_type = unassigned DNA
actcgaccgggctgcgctcactgcccagccggggccccgggagcctccaggctcccgcccgccctgagctgcggcctccgcatggaggggccactcactccaccaccgctgcagggaggcggagccgccgctgttccggagcccggagcccggcaacacccgggacacgagacggcggcgcagcggtacagcgcccgactgctgcaggccggctacgagcccgagagcatggcggactacctgatcagcggcggcaccggctacgtgcccgaggatgggctcaccgcgcagcagctcttcgccagcgccgacggcctcacctacaacgacttcctgattctcccaggattcatagacttcatagctgatgaggtggacctgacctcagccctgacccggaagatcacgctgaagacgccactgatctcctcccccatggacactgtgacagaggctgacatggccattgccatggctctgatgggaggtattggtttcattcaccacaactgcaccccagagttccaggccaacgaggtgcggaaggtcaagaagtttgaacagggcttcatcacggaccctgtggtgctgagcccctcgcacactgtgggcgatgtgctggaggccaagatgcggcatggcttctctggcatccccatcactgagacgggcaccatgggcagcaagctggtgggcatcgtcacctcccgagacatcgactttcttgctgagaaggaccacaccaccctcctcagtgaggtgatgacgccaaggattgaactggtggtggctccagcaggtgtgacgttgaaagaggcaaatgagatcctgcagcgtagcaagaaagggaagctgcctatcgtcaatgattgcgatgagctggtggccatcatcgcccgcaccgacctgaagaagaaccgagactaccctctggcctccaaggattcccagaagcagctgctctgtggggcagctgtgggcacccgtgaggatgacaaataccgtctggacctgctcacccaggcgggcgtcgacgtcatagtcttggactcgtcccaagggaattcggtgtatcagatcgccatggtgcattacatcaaacagaagtacccccacctccaggtgattggggggaacgtggtgacagcagcccaggccaagaacctgattgatgctggtgtggacgggctgcgcgtgggcatgggctgcggctccatctgcatcacccaggaagtgatggcctgtggtcggccccagggcactgctgtgtacaaggtggctgagtatgcccggcgctttggtgtgcccatcatagccgatggcggcatccagaccgtgggacacgtggtcaaggccctggcccttggagcctccacagtgatgatgggctccctgctggccgccactacggaggcccctggcgagtacttcttctcagacggggtgcggctcaagaagtaccggggcatgggctcactggatgccatggagaagagcagcagcagccagaaacgatacttcagcgagggggataaagtgaagatcgcgcagggtgtctcgggctccatccaggacaaaggatccattcagaagttcgtgccctacctcatagcaggcatccaacacggctgccaggatatcggggcccgcagcctgtctgtccttcggtccatgatgtactcaggagagctcaagtttgagaagcggaccatgtcggcccagattgagggtggtgtccatggcctgcactcttacgaaaagcggctgtactgaggacagcggtggaggccgaggtggtggaggggatgcaccccagtgtccacttttgggcacagcctccctccataactgagtggtccacagatttgcactacgggttctccagctcctttccaggcagagaggaggggaggtcctgaggggactgctgcccctcactcggcatcccctgcagagtcaggactgctcccggggccaggctgccctgggagcccccctccgagcccagccagccaggctctcaggccctgcgcctgcctcaggtctttcttgctgcagcctgctccagcctggcccccaccccaggggcaggcggcccctcctggcttctcctgtagggcacctccctgcccctagcctcccaggaaatggtgctctcctggccctgcctctggcccttcccgggccgctgcccctcagccatgtggcacttctgagctcctgacctaggccaaggggaggtctctgcccccttccccggccctgggctacccttgggtcctgctcctcaggccgctcccctgtccctggccatgggtaggagactgccctggtcatggccgcctgcctgtcattcctgactcaccaccgtccccaggtgaaccattcctcccttctcctcagctgcagtcgaaggctttaactttgcacacttgggatcacagttgcgtcattgtgtattaaatacttggaataaatc

SEQ ID NO: 14240 - DNA, 2580 bp, Homo sapiens
  source 1..2580: mol_type = unassigned DNA
actcgaccgggctgcgctcactgcccagccggggccccgggagcctccaggctcccgcccgccctgagctgcggcctccgcatggaggggccactcactccaccaccgctgcagggaggcggagccgccgctgttccggagcccggagcccggcaacacccgggacacgagacggcggcgcagcggtacagcgcccgactgctgcaggccggctacgagcccgagagctgtttcctcctagaactatcttcagtggtcttactggcaggtgttggtgtccagatggatcgccttcgcagggctagcatggcggactacctgatcagcggcggcaccggctacgtgcccgaggatgggctcaccgcgcagcagctcttcgccagcgccgacggcctcacctacaacgacttcctgattctcccaggattcatagacttcatagctgatgaggtggacctgacctcagccctgacccggaagatcacgctgaagacgccactgatctcctcccccatggacactgtgacagaggctgacatggccattgccatggctctgatgggaggtattggtttcattcaccacaactgcaccccagagttccaggccaacgaggtgcggaaggtcaagaagtttgaacagggcttcatcacggaccctgtggtgctgagcccctcgcacactgtgggcgatgtgctggaggccaagatgcggcatggcttctctggcatccccatcactgagacgggcaccatgggcagcaagctggtgggcatcgtcacctcccgagacatcgactttcttgctgagaaggaccacaccaccctcctcagtgaggtgatgacgccaaggattgaactggtggtggctccagcaggtgtgacgttgaaagaggcaaatgagatcctgcagcgtagcaagaaagggaagctgcctatcgtcaatgattgcgatgagctggtggccatcatcgcccgcaccgacctgaagaagaaccgagactaccctctggcctccaaggattcccagaagcagctgctctgtggggcagctgtgggcacccgtgaggatgacaaataccgtctggacctgctcacccaggcgggcgtcgacgtcatagtcttggactcgtcccaagggaattcggtgtatcagatcgccatggtgcattacatcaaacagaagtacccccacctccaggtgattggggggaacgtggtgacagcagcccaggccaagaacctgattgatgctggtgtggacgggctgcgcgtgggcatgggctgcggctccatctgcatcacccaggaagtgatggcctgtggtcggccccagggcactgctgtgtacaaggtggctgagtatgcccggcgctttggtgtgcccatcatagccgatggcggcatccagaccgtgggacacgtggtcaaggccctggcccttggagcctccacagtgatgatgggctccctgctggccgccactacggaggcccctggcgagtacttcttctcagacggggtgcggctcaagaagtaccggggcatgggctcactggatgccatggagaagagcagcagcagccagaaacgatacttcagcgagggggataaagtgaagatcgcgcagggtgtctcgggctccatccaggacaaaggatccattcagaagttcgtgccctacctcatagcaggcatccaacacggctgccaggatatcggggcccgcagcctgtctgtccttcggtccatgatgtactcaggagagctcaagtttgagaagcggaccatgtcggcccagattgagggtggtgtccatggcctgcactcttacgaaaagcggctgtactgaggacagcggtggaggccgaggtggtggaggggatgcaccccagtgtccacttttgggcacagcctccctccataactgagtggtccacagatttgcactacgggttctccagctcctttccaggcagagaggaggggaggtcctgaggggactgctgcccctcactcggcatcccctgcagagtcaggactgctcccggggccaggctgccctgggagcccccctccgagcccagccagccaggctctcaggccctgcgcctgcctcaggtctttcttgctgcagcctgctccagcctggcccccaccccaggggcaggcggcccctcctggcttctcctgtagggcacctccctgcccctagcctcccaggaaatggtgctctcctggccctgcctctggcccttcccgggccgctgcccctcagccatgtggcacttctgagctcctgacctaggccaaggggaggtctctgcccccttccccggccctgggctacccttgggtcctgctcctcaggccgctcccctgtccctggccatgggtaggagactgccctggtcatggccgcctgcctgtcattcctgactcaccaccgtccccaggtgaaccattcctcccttctcctcagctgcagtcgaaggctttaactttgcacacttgggatcacagttgcgtcattgtgtattaaatacttggaataaatcaagcaggtctcaacgcctccact

SEQ ID NO: 14241 - DNA, 2324 bp, Homo sapiens
  source 1..2324: mol_type = unassigned DNA
tccgcatggaggggccactcactccaccaccgctgcagggaggcggagccgccgctgttccggagcccggagcccggcaacacccgggacacgagacggcggcgcagcggtacagcgcccgactgctgcaggccggctacgagcccgagagcgacttcctgattctcccaggattcatagacttcatagctgatgaggtggacctgacctcagccctgacccggaagatcacgctgaagacgccactgatctcctcccccatggacactgtgacagaggctgacatggccattgccatggctctgatgggaggtattggtttcattcaccacaactgcaccccagagttccaggccaacgaggtgcggaaggtcaagaagtttgaacagggcttcatcacggaccctgtggtgctgagcccctcgcacactgtgggcgatgtgctggaggccaagatgcggcatggcttctctggcatccccatcactgagacgggcaccatgggcagcaagctggtgggcatcgtcacctcccgagacatcgactttcttgctgagaaggaccacaccaccctcctcagtgaggtgatgacgccaaggattgaactggtggtggctccagcaggtgtgacgttgaaagaggcaaatgagatcctgcagcgtagcaagaaagggaagctgcctatcgtcaatgattgcgatgagctggtggccatcatcgcccgcaccgacctgaagaagaaccgagactaccctctggcctccaaggattcccagaagcagctgctctgtggggcagctgtgggcacccgtgaggatgacaaataccgtctggacctgctcacccaggcgggcgtcgacgtcatagtcttggactcgtcccaagggaattcggtgtatcagatcgccatggtgcattacatcaaacagaagtacccccacctccaggtgattggggggaacgtggtgacagcagcccaggccaagaacctgattgatgctggtgtggacgggctgcgcgtgggcatgggctgcggctccatctgcatcacccaggaagtgatggcctgtggtcggccccagggcactgctgtgtacaaggtggctgagtatgcccggcgctttggtgtgcccatcatagccgatggcggcatccagaccgtgggacacgtggtcaaggccctggcccttggagcctccacagtgatgatgggctccctgctggccgccactacggaggcccctggcgagtacttcttctcagacggggtgcggctcaagaagtaccggggcatgggctcactggatgccatggagaagagcagcagcagccagaaacgatacttcagcgagggggataaagtgaagatcgcgcagggtgtctcgggctccatccaggacaaaggatccattcagaagttcgtgccctacctcatagcaggcatccaacacggctgccaggatatcggggcccgcagcctgtctgtccttcggtccatgatgtactcaggagagctcaagtttgagaagcggaccatgtcggcccagattgagggtggtgtccatggcctgcactcttacgaaaagcggctgtactgaggacagcggtggaggccgaggtggtggaggggatgcaccccagtgtccacttttgggcacagcctccctccataactgagtggtccacagatttgcactacgggttctccagctcctttccaggcagagaggaggggaggtcctgaggggactgctgcccctcactcggcatcccctgcagagtcaggactgctcccggggccaggctgccctgggagcccccctccgagcccagccagccaggctctcaggccctgcgcctgcctcaggtctttcttgctgcagcctgctccagcctggcccccaccccaggggcaggcggcccctcctggcttctcctgtagggcacctccctgcccctagcctcccaggaaatggtgctctcctggccctgcctctggcccttcccgggccgctgcccctcagccatgtggcacttctgagctcctgacctaggccaaggggaggtctctgcccccttccccggccctgggctacccttgggtcctgctcctcaggccgctcccctgtccctggccatgggtaggagactgccctggtcatggccgcctgcctgtcattcctgactcaccaccgtccccaggtgaaccattcctcccttctcctcagctgcagtcgaaggctttaactttgcacacttgggatcacagttgcgtcattgtgtattaaatacttggaataaatcaagcaggtctcaacgcctcc

SEQ ID NO: 14242 - DNA, 2431 bp, Homo sapiens
  source 1..2431: mol_type = unassigned DNA
atggaggggccactcactccaccaccgctgcagggaggcggagccgccgctgttccggagcccggagcccggcaacacccgggacacgagacggcggcgcagcggtacagcgcccgactgctgcaggccggctacgagcccgagagccctagattggacctcgctacacacccgacgacaccccgttcagaactatcttcagtggtcttactggcaggtgttggtgtccagatggatcgccttcgcagggctagcgacttcctgattctcccaggattcatagacttcatagctgatgaggtggacctgacctcagccctgacccggaagatcacgctgaagacgccactgatctcctcccccatggacactgtgacagaggctgacatggccattgccatggctctgatgggaggtattggtttcattcaccacaactgcaccccagagttccaggccaacgaggtgcggaaggtcaagaagtttgaacagggcttcatcacggaccctgtggtgctgagcccctcgcacactgtgggcgatgtgctggaggccaagatgcggcatggcttctctggcatccccatcactgagacgggcaccatgggcagcaagctggtgggcatcgtcacctcccgagacatcgactttcttgctgagaaggaccacaccaccctcctcagtgaggtgatgacgccaaggattgaactggtggtggctccagcaggtgtgacgttgaaagaggcaaatgagatcctgcagcgtagcaagaaagggaagctgcctatcgtcaatgattgcgatgagctggtggccatcatcgcccgcaccgacctgaagaagaaccgagactaccctctggcctccaaggattcccagaagcagctgctctgtggggcagctgtgggcacccgtgaggatgacaaataccgtctggacctgctcacccaggcgggcgtcgacgtcatagtcttggactcgtcccaagggaattcggtgtatcagatcgccatggtgcattacatcaaacagaagtacccccacctccaggtgattggggggaacgtggtgacagcagcccaggccaagaacctgattgatgctggtgtggacgggctgcgcgtgggcatgggctgcggctccatctgcatcacccaggaagtgatggcctgtggtcggccccagggcactgctgtgtacaaggtggctgagtatgcccggcgctttggtgtgcccatcatagccgatggcggcatccagaccgtgggacacgtggtcaaggccctggcccttggagcctccacagtgatgatgggctccctgctggccgccactacggaggcccctggcgagtacttcttctcagacggggtgcggctcaagaagtaccggggcatgggctcactggatgccatggagaagagcagcagcagccagaaacgatacttcagcgagggggataaagtgaagatcgcgcagggtgtctcgggctccatccaggacaaaggatccattcagaagttcgtgccctacctcatagcaggcatccaacacggctgccaggatatcggggcccgcagcctgtctgtccttcggtccatgatgtactcaggagagctcaagtttgagaagcggaccatgtcggcccagattgagggtggtgtccatggcctgcactcttacgaaaagcggctgtactgaggacagcggtggaggccgaggtggtggaggggatgcaccccagtgtccacttttgggcacagcctccctccataactgagtggtccacagatttgcactacgggttctccagctcctttccaggcagagaggaggggaggtcctgaggggactgctgcccctcactcggcatcccctgcagagtcaggactgctcccggggccaggctgccctgggagcccccctccgagcccagccagccaggctctcaggccctgcgcctgcctcaggtctttcttgctgcagcctgctccagcctggcccccaccccaggggcaggcggcccctcctggcttctcctgtagggcacctccctgcccctagcctcccaggaaatggtgctctcctggccctgcctctggcccttcccgggccgctgcccctcagccatgtggcacttctgagctcctgacctaggccaaggggaggtctctgcccccttccccggccctgggctacccttgggtcctgctcctcaggccgctcccctgtccctggccatgggtaggagactgccctggtcatggccgcctgcctgtcattcctgactcaccaccgtccccaggtgaaccattcctcccttctcctcagctgcagtcgaaggctttaactttgcacacttgggatcacagttgcgtcattgtgtattaaatacttggaataaatcaagcaggtctcaacgcctccacta

SEQ ID NO: 14243 - DNA, 1765 bp, Homo sapiens
  source 1..1765: mol_type = unassigned DNA
agtagcagcagcagcagcggcggcagcggcgggcggccgcgcgggtgtttatgtcgggtcgcggggtctcgcggcagcatggcggactacctgatcagcggcggcaccggctacgtgcccgaggatgggctcaccgcgcagcagctcttcgccagcgccgacggcctcacctacaacgacttcctgattctcccaggattcatagacttcatagctgatgaggtggacctgacctcagccctgacccggaagatcacgctgaagacgccactgatctcctcccccatggacactgtgacagaggctgacatggccattgccatggctctgatgggaggtattggtttcattcaccacaactgcaccccagagttccaggccaacgagaagtttgaacagggcttcatcacggaccctgtggtgctgagcccctcgcacactgtgggcgatgtgctggaggccaagatgcggcatggcttctctggcatccccatcactgagacgggcaccatgggcagcaagctggtgggcatcgtcacctcccgagacatcgactttcttgctgagaaggaccacaccaccctcctcagtgaggtgatgacgccaaggattgaactggtggtggctccagcaggtgtgacgttgaaagaggcaaatgagatcctgcagcgtagcaagaaagggaagctgcctatcgtcaatgattgcgatgagctggtggccatcatcgcccgcaccgacctgaagaagaaccgagactaccctctggcctccaaggattcccagaagcagctgctctgtggggcagctgtgggcacccgtgaggatgacaaataccgtctggacctgctcacccaggcgggcgtcgacgtcatagtcttggactcgtcccaagggaattcggtgtatcagatcgccatggtgcattacatcaaacagaagtacccccacctccaggtgattggggggaacgtggtgacagcagcccaggccaagaacctgattgatgctggtgtggacgggctgcgcgtgggcatgggctgcggctccatctgcatcacccaggaagtgatggcctgtggtcggccccagggcactgctgtgtacaaggtggctgagtatgcccggcgctttggtgtgcccatcatagccgatggcggcatccagaccgtgggacacgtggtcaaggccctggcccttggagcctccacagtgatgatgggctccctgctggccgccactacggaggcccctggcgagtacttcttctcagacggggtgcggctcaagaagtaccggggcatgggctcactggatgccatggagaagagcagcagcagccagaaacgatacttcagcgagggggataaagtgaagatcgcgcagggtgtctcgggctccatccaggacaaaggatccattcagaagttcgtgccctacctcatagcaggcatccaacacggctgccaggatatcggggcccgcagcctgtctgtccttcggtccatgatgtactcaggagagctcaagtttgagaagcggaccatgtcggcccagattgagggtggtgtccatggcctgcactcttacgaaaagcggctgtactgaggacagcggtggaggccgaggtggtggaggggatgcaccccagtgtccacttttgggcacagcctccctccataactgagtggtccacagatttgcactacgggttctccagctcctttccaggcagagaggaggggaggtcctgaggggactgctg

SEQ ID NO: 14244 - DNA, 2283 bp, Homo sapiens
  source 1..2283: mol_type = unassigned DNA
gtcagcagtagcagcagcagcagcggcggcagcggcgggcggccgcgcgggtgtttatgtcgggtcgcggggtctcgcggcagcatggcggactacctgatcagcggcggcaccggctacgtgcccgaggatgggctcaccgcgcagcagctcttcgccagcgccgacggcctcacctacaacgacttcctgattctcccaggattcatagacttcatagctgatgaggtggacctgacctcagccctgacccggaagatcacgctgaagacgccactgatctcctcccccatggacactgtgacagaggctgacatggccattgccatggctaagtttgaacagggcttcatcacggaccctgtggtgctgagcccctcgcacactgtgggcgatgtgctggaggccaagatgcggcatggcttctctggcatccccatcactgagacgggcaccatgggcagcaagctggtgggcatcgtcacctcccgagacatcgactttcttgctgagaaggaccacaccaccctcctcagtgaggtgatgacgccaaggattgaactggtggtggctccagcaggtgtgacgttgaaagaggcaaatgagatcctgcagcgtagcaagaaagggaagctgcctatcgtcaatgattgcgatgagctggtggccatcatcgcccgcaccgacctgaagaagaaccgagactaccctctggcctccaaggattcccagaagcagctgctctgtggggcagctgtgggcacccgtgaggatgacaaataccgtctggacctgctcacccaggcgggcgtcgacgtcatagtcttggactcgtcccaagggaattcggtgtatcagatcgccatggtgcattacatcaaacagaagtacccccacctccaggtgattggggggaacgtggtgacagcagcccaggccaagaacctgattgatgctggtgtggacgggctgcgcgtgggcatgggctgcggctccatctgcatcacccaggaagtgatggcctgtggtcggccccagggcactgctgtgtacaaggtggctgagtatgcccggcgctttggtgtgcccatcatagccgatggcggcatccagaccgtgggacacgtggtcaaggccctggcccttggagcctccacagtgatgatgggctccctgctggccgccactacggaggcccctggcgagtacttcttctcagacggggtgcggctcaagaagtaccggggcatgggctcactggatgccatggagaagagcagcagcagccagaaacgatacttcagcgagggggataaagtgaagatcgcgcagggtgtctcgggctccatccaggacaaaggatccattcagaagttcgtgccctacctcatagcaggcatccaacacggctgccaggatatcggggcccgcagcctgtctgtccttcggtccatgatgtactcaggagagctcaagtttgagaagcggaccatgtcggcccagattgagggtggtgtccatggcctgcactcttacgaaaagcggctgtactgaggacagcggtggaggccgaggtggtggaggggatgcaccccagtgtccacttttgggcacagcctccctccataactgagtggtccacagatttgcactacgggttctccagctcctttccaggcagagaggaggggaggtcctgaggggactgctgcccctcactcggcatcccctgcagagtcaggactgctcccggggccaggctgccctgggagcccccctccgagcccagccagccaggctctcaggccctgcgcctgcctcaggtctttcttgctgcagcctgctccagcctggcccccaccccaggggcaggcggcccctcctggcttctcctgtagggcacctccctgcccctagcctcccaggaaatggtgctctcctggccctgcctctggcccttcccgggccgctgcccctcagccatgtggcacttctgagctcctgacctaggccaaggggaggtctctgcccccttccccggccctgggctacccttgggtcctgctcctcaggccgctcccctgtccctggccatgggtaggagactgccctggtcatggccgcctgcctgtcattcctgactcaccaccgtccccaggtgaaccattcctcccttctcctcagctgcagtcgaaggctttaactttgcacacttgggatcacagttgcgtcattgtgtattaaatacttggaataaatcaagcaggtctcaacgcctccact

SEQ ID NO: 14245 - DNA, 1643 bp, Homo sapiens
  source 1..1643: mol_type = unassigned DNA
cgcggtcctcggagacacgcggcggtgtcctgtgttggccatggccgactacctgattagtgggggcacgtcctacgtgccagacgacggactcacagcacagcagctcttcaactgcggagacggcctcacctacaatgactttctcattctccctgggtacatcgacttcactgcagaccaggtggacctgacttctgctctgaccaagaaaatcactcttaagaccccactggtttcctctcccatggacacagtcacagaggctgggatggccatagcaatggcgcttacaggcggtattggcttcatccaccacaactgtacacctgaattccaggccaatgaagttcggaaagtgaagaaatatgaacagggattcatcacagaccctgtggtcctcagccccaaggatcgcgtgcgggatgtttttgaggccaaggcccggcatggtttctgcggtatcccaatcacagacacaggccggatggggagccgcttggtgggcatcatctcctccagggacattgattttctcaaagaggaggaacatgactgtttcttggaagagataatgacaaagagggaagacttggtggtagcccctgcaggcatcacactgaaggaggcaaatgaaattctgcagcgcagcaagaagggaaagttgcccattgtaaatgaagatgatgagcttgtggccatcattgcccggacagacctgaagaagaatcgggactacccactagcctccaaagatgccaagaaacagctgctgtgtggggcagccattggcactcatgaggatgacaagtataggctggacttgctcgcccaggctggtgtggatgtagtggttttggactcttcccagggaaattccatcttccagatcaatatgatcaagtacatcaaagacaaataccctaatctccaagtcattggaggcaatgtggtcactgctgcccaggccaagaacctcattgatgcaggtgtggatgccctgcgggtgggcatgggaagtggctccatctgcattacgcaggaagtgctggcctgtgggcggccccaagcaacagcagtgtacaaggtgtcagagtatgcacggcgctttggtgttccggtcattgctgatggaggaatccaaaatgtgggtcatattgcgaaagccttggcccttggggcctccacagtcatgatgggctctctcctggctgccaccactgaggcccctggtgaatacttcttttccgatgggatccggctaaagaaatatcgcggtatgggttctctcgatgccatggacaagcacctcagcagccagaacagatatttcagtgaagctgacaaaatcaaagtggcccagggagtgtctggtgctgtgcaggacaaagggtcaatccacaaatttgtcccttacctgattgctggcatccaacactcatgccaggacattggtgccaagagcttgacccaagtccgagccatgatgtactctggggagcttaagtttgagaagagaacgtcctcagcccaggtggaaggtggcgtccatagcctccattcgtatgagaagcggcttttctgaaaagggatccagcacacctcctcggtttttttttcaataaaagtttagaaagaaaaaa

SEQ ID NO: 14246 - DNA, 1111 bp, Homo sapiens
  source 1..1111: mol_type = unassigned DNA
cgcggtcctcggagacacgcggcggtgtcctgtgttggccatggccgactacctgattagtgggggcacgtcctacgtgccagacgacggactcacagcacagcagctcttcaactgcggagacggcctcacctacaatgactttctcattctccctgggtacatcgacttcactgcagaccaggtggacctgacttctgctctgaccaagaaaatcactcttaagaccccactggtttcctctcccatggacacagtcacagaggctgggatggccatagcaatggcgcttacaggcggtattggcttcatccaccacaactgtacacctgaattccaggccaatgaagttcggaaagtgaagaaatatgaacagggattcatcacagaccctgtggtcctcagccccaaggatcgcgtgcgggatgtttttgaggccaaggcccggcatggtttctgcggtatcccaatcacagacacaggccggatggggagccgcttggtgggcatcatctcctccagggacattgattttctcaaagaggaggaacatgactgtttcttggaagagataatgacaaagagggaagacttggtggtagcccctgcaggcatcacactgaaggaggcaaatgaaattctgcagcgcagcaagaagggaaagttgcccattgtaaatgaagatgatgagcttgtggccatcattgcccggacagacctgaagaagaatcgggactacccactagcctccaaagatgccaagaaacagctgctgtgtggggcagccattggcactcatgaggatgacaagtataggctggacttgctcgcccaggctggtgtggatgtagtggttttggactcttcccagggaaattccatcttccagatcaatatgatcaagtacatcaaagacaaataccctaatctccaagtcattggaggcaatgtggtcactgctgcccaggccaagaacctcattgatgcaggtgtggatgccctgcgggtgggcatgggaagtggctccatctgcattacgcaggaagtgctggcctgtgggcggccccaagcaacagcagtatgcacacaaaaacagcaccctcatttccag

SEQ ID NO: 14247 - DNA, 795 bp, Homo sapiens
  source 1..795: mol_type = unassigned DNA
gaaaagtgcgccctacgaaaggacggtcgacttcggcggggcccaggtgagaaaggcccacctgtgtcctggttgagggtctccagggttctttggggcccgaggaatttcagacctgaacaatcaggtggacaacttcttgtgactttgggtattctgaaattactgccaatggtggcagagtctacatagaactatgcttcgtggtgttctggggaaaacctttcgacttgttggctatactattcaatatggctgtatagctcattgtgcttttgaatacgttggtggtgttgtcatgtgttctggaccatcaatggagcctacaattcaaaattcagatattgtctttgcagaaaatcttagtcgacatttttatggtatccaaagaggtgacattgtgattgcaaaaagcccaagtgatccaaaatcaaatatttgtaaaagagtaattggtttggaaggagacaaaatcctcaccactagtccatcagatttctttaaaagccatagttatgtgccaatgggtcatgtttggttagaaggtgacaatctacagaattctacagattccaggtgctatggacctattccatatggactaataagaggacgaatcttctttaagatttggcctctgagtgattttggatttttacgtgccagccctaatggccacagattttctgatgattagtaagcatttattcttttgacttgattattgtctccttttcatgtgaatttattactcccgttgaaaccgtgtacttaccaataaactatttgctattc

SEQ ID NO: 14248 - DNA, 475 bp, Homo sapiens
  source 1..475: mol_type = unassigned DNA
aggacggtcgacttcggcggggcccaggtgagaaaggcccacctgtgtcctggttgagggtctccagggttctttggggcccgagcatcttgactctactgtgcctggatgtagctgtgtgttttgccaatggtggcagagtctacatagaactatgcttcgtggtgttctggggaaaacctttcgacttgttggctatactattcaatatggctgtatagctcattgtgcttttgaatacgttggtggtgttgtcatgtgttctggaccatcaatggagcctacaattcaaaattcagatattgtctttgcagaaaatcttagtcgacatttttatggtatccaaagaggtgacattgtgattgcaaaaagcccaagtgatccaaaatcaaatatttgtaaaagagtaattggtttggaaggagacaaaatcctcaccactagtccatcagatttctttaaaagccatagttat

SEQ ID NO: 14249 - DNA, 552 bp, Homo sapiens
  source 1..552: mol_type = unassigned DNA
gcgtattgctgaaaagtgcgccctacgaaaggacggtcgacttcggcggggcccaggtgagaaaggcccacctgtgtcctggttgagggtctccagggttctttggggcccgaggaatttcagacctgaacaatcaggtggacaacttcttgtgactttgggtattctgaaattactcatcttgactctactgtgcctggatgtagctgtgtgttttgtgtgtatcctgttcatggccaatggtggcagagtctacatagaactatgcttcgtggtgttctggggaaaacctttcgacttgttggctatactattcaatatggctgtatagctcattgtgcttttgaatacgttggtggtgttgtcatgtgttctggaccatcaatggagcctacaattcaaaattcagatattgtctttgcagaaaatcttagtcgacatttttatggtatccaaagaggtgacattgtgattgcaaaaagcccaagtgatccaaaatcaaatatttgtaaaagagtaattggtttggaaggagacaaaatcctcaccact

SEQ ID NO: 14250 - DNA, 685 bp, Homo sapiens
  source 1..685: mol_type = unassigned DNA
gagaaaggcccacctgtgtcctggttgagggtctccagggttctttggggcccgaggccaatggtggcagagtctacatagaactatgcttcgtggtgttctggggaaaacctttcgacttgttggctatactattcaatatggctgtatagctcattgtgcttttgaatacgttggtggtgttgtcatgtgttctggaccatcaatggagcctacaattcaaaattcagatattgtctttgcagaaaatcttagtcgacatttttatggtatccaaagaggtgacattgtgattgcaaaaagcccaagtgatccaaaatcaaatatttgtaaaagagtaattggtttggaaggagacaaaatcctcaccactagtccatcagatttctttaaaagccatagttatgtgccaatgggtcatgtttggttagaaggtgacaatctacagaattctacagattccaggtgctatggacctattccatatggactaataagaggacgaatcttctttaagatttggcctctgagtgattttggatttttacgtgccagccctaatggccacagattttctgatgattagtaagcatttattcttttgacttgattattgtctccttttcatgtgaatttattactcccgttgaaaccgtgtacttaccaataaactatttgctattca

SEQ ID NO: 14251 - DNA, 1205 bp, Homo sapiens
  source 1..1205: mol_type = unassigned DNA
cggcggagggcggggtctgcgcggggacttcccccgggctgagctgcgcagcggggttttggccaaattgggcgagggcacaaaataaccacttaccccttctcaccgaggaagagcgggagaaagggtatggcacagtcacaagggtgggtgaaaagatacatcaaggccttttgtaaaggcttctttgtggcggtgcctgtggcagtgactttcttggatcgggtcgcctgtgtggcaagagtagaaggagcatcgatgcagccttctttgaatcctggggggagccagtcatctgatgtggtgcttttgaaccactggaaagtgaggaattttgaagtacaccgtggtgacattgtatcattggtgtctcctaaaaacccagaacagaagatcattaagagagtgattgctcttgaaggagatattgtcagaaccataggacacaaaaaccggtatgtcaaagtcccccgtggtcacatctgggttgaaggtgatcatcatggacacagttttgacagtaattcttttgggccggtttccctaggacttctgcatgcccatgccacacatatcctgtggcccccagagcgctggcagaaattggaatctgttcttcctccagagcgcttaccagtacagagagaagaggaatgactgcatgaatctacctgagttgctggcattgggaggccagttactggaaaggaatggaaaaaagaagcctccaaaagggaaaaacttctgacaatatgatgctgtgcgagaaatatttacagcacattaaaacgatctgtattattaaataaataattttcaaatgttaaacagtattaaatggcacctgattttgtgttaaattttagttccctgttgtttaatgcccccaaaatatgcagacctttgggaatataaaaatattgcacccacatgtcttaatggggctgaatttcagattatttgttacatatacttattatattgattgttgggttttgattttggtgcttgctgctgaaataaattgaaaattaatattcaataaaaatgatgtatttgtcacttgctgttaaggtagaacaagaaggaacacatattatacacataatgatgggaattacattgtgatttgtactatctacaaaggagtaactgccagttaggaagaacagtaaacagtgatgttaaaataaaacaatgatttg

SEQ ID NO: 14252 - DNA, 1519 bp, Homo sapiens
  source 1..1519: mol_type = unassigned DNA
cggccgcgagtcctgcgtgatcgcgagcatgtgtgcgtgcgcgtgtttatctgaggcgcgtgcggcggccaccccagcctagtcctcttcttggtgccactggctaactaggttgagaaaccggcgccacaggcggcacacctggcccggagctggcccgctcctccccgccgagccggcgccccaacaacgcgccctctcccagtcctcacaaaggggcctagtccggcccccggctctggccgtgagggagcgctgtgggggcgcgctgccttctgcctggaagtgttgggcaggtggtgggagagcgtcaggcttgaacaacatgattttaaagcacgtgtctgtctgtcgttttttacttttagggttttggccaaattgggcgagggcacaaaataaccacttaccccttctcaccgaggaagagcgggagaaagggtatggcacagtcacaagggtgggtgaaaagatacatcaaggccttttgtaaaggcttctttgtggcggtgcctgtggcagtgactttcttggatcgggtcgcctgtgtggcaagagtagaaggagcatcgatgcagccttctttgaatcctggggggagccagtcatctgatgtggtgcttttgaaccactggaaagtgaggaattttgaagtacaccgtggtgacattgtatcattggtgtctcctaaaaacccagaacagaagatcattaagagagtgattgctcttgaaggagatattgtcagaaccataggacacaaaaaccggtatgtcaaagtcccccgtggtcacatctgggttgaaggtgatcatcatggacacagttttgacagtaattcttttgggccggtttccctaggacttctgcatgcccatgccacacatatcctgtggcccccagagcgctggcagaaattggaatctgttcttcctccagagcgcttaccagtacagagagaagaggaatgactgcatgaatctacctgagttgctggcattgggaggccagttactggaaaggaatggaaaaaagaagcctccaaaagggaaaaacttctgacaatatgatgctgtgcgagaaatatttacagcacattaaaacgatctgtattattaaataaataattttcaaatgttaaacagtattaaatggcacctgattttgtgttaaattttagttccctgttgtttaatgcccccaaaatatgcagacctttgggaatataaaaatattgcacccacatgtcttaatggggctgaatttcagattatttgttacatatacttattatattgattgttgggttttgattttggtgcttgctgctgaaataaattgaaaattaatattcaataaaaatgatgtatttgtcacttgctgttaaggtagaacaagaaggaacacatattatacacataatgatgggaattacattgtgatttgtactatctacaaaggagtaactgccagttaggaagaacagtaaacagtgatgttaaaataaaacaatgatttg

SEQ ID NO: 14253 - DNA, 528 bp, Homo sapiens
  source 1..528: mol_type = unassigned DNA
atggcacagtcacaagggtgggtgaaaagatacatcaaggccttttgtaaaggcttctttgtggcggtgcctgtggcagtgactttcttggatcgggtcgcctgtgtggcaagagtagaaggagcatcgatgcagccttctttgaatcctggggggagccagtcatctgatgtggtgcttttgaaccactggaaagtgaggaattttgaagtacaccgtggtgacattgtatcattggtgtctcctaaaaacccagaacagaagatcattaagagagtgattgctcttgaaggagatattgtcagaaccataggacacaaaaaccggtatgtcaaagtcccccgtggtcacatctgggttgaaggtgatcatcatggacacagttttgacagtaattcttttgggccggtttccctaggacttctgcatgcccatgccacacatatcctgtggcccccagagcgctggcagaaattggaatctgttcttcctccagagcgcttaccagtacagagagaagaggaatga

SEQ ID NO: 14254 - DNA, 333 bp, Homo sapiens
  source 1..333: mol_type = unassigned DNA
atggcacagtcacaagggtgggtgaaaagatacatcaaggccttttgtaaaggcttctttgtggcggtgcctgtggcagtgactttcttggatcgggtcgcctgtgtggcaagagtagaaggagcatcgatgcagccttctttgaatcctggggggagccagtcatctgatgtggtgcttttgaaccactggaaagtgaggaattttgaagtacaccgtggtgacattgtatcattggtgtctcctaaaaacccagaacagaagatcattaagagagtgattgctcttgaaggagatattgtcagagatgggagaaaactgaaaaggatatga

SEQ ID NO: 14255 - DNA, 421 bp, Homo sapiens
  source 1..421: mol_type = unassigned DNA
ggtctgcgcggggacttcccccgggctgagctgcgcagcggggttttggccaaattgggcgagggcacaaaataaccacttaccccttctcaccgaggaagagcgggagaaaggtggcctgattcttttgagaagccttcctactccttactcccaaccctgatcaaaggaaaagccatgttgtatggcacagtcacaagggtgggtgaaaagatacatcaaggccttttgtaaaggcttctttgtggcggtgcctgtggcagtgactttcttggatcgggtcgcctgtgtggcaagagtagaaggagcatcgatgcagccttctttgaatcctggggggagccagtcatctgatgtggtgcttttgaaccactggaaagtgaggaattttgaagtacaccgtggtgacattgtatcattg

SEQ ID NO: 14256 - DNA, 833 bp, Homo sapiens
  source 1..833: mol_type = unassigned DNA
cccccgggctgagctgcgcagcgggtgcggagggcgggcgcccgggttttggccaaattgggcgagggcacaaaataaccacttaccccttctcaccgaggaagagcgggagaaagggtatggcacagtcacaagggtgggtgaaaagatacatcaaggccttttgtaaaggcttctttgtggcggtgcctgtggcagtgactttcttggatcgggtcgcctgtgtggcaagagtagaaggagcatcgatgcagccttctttgaatcctggggggagccagtcatctgatgtggtgcttttgaaccactggaaagtgaggaattttgaagtacaccgtggtgacattgtatcattggtgtctcctaaaaacccagaacagaagatcattaagagagtgattgctcttgaaggagatattgtcagaaccataggacacaaaaaccggtatgtcaaagtcccccgtggtcacatctgggttgaaggtgatcatcatggacacagttttgacagtaattcttttgggccggtttccctaggacttctgcatgcccatgccacacatatcctgtggcccccagagcgctggcagaaattggaatctgttcttcctccagagcgcttaccagtacagagagaagaggaatgactgcatgaatctacctgagttgctggcattgggaggccagttactggaaaggaatggaaaaaagaagcctccaaaagggaaaaacttctgacaatatgatgctgtgcgagaaatatttacagcacattaaaacgatctgtattattaaataaataattttcaaatgttaaacagtattaaatggca

SEQ ID NO: 14257 - DNA, 2028 bp, Homo sapiens
  source 1..2028: mol_type = unassigned DNA
aaaatagaagagactcactctgaaaccaccattccagaaacccgggcagggctcggctgtccctctggctcccagattcttttggcggctctcgctttgggaggctctcacattcctctgcagatctgccccttcctccttcctcctcttgctcctgggccactgggttttcaaaaatccggaaaatccaagaggggcaaggagaaaagcagcagccgcctgaatcgagtccaagggtggatgtgtccggcttcacaacgagccaggccgggaaaacaaggactgaggcttacacaacaggccgccaactcttcgaccccggctgcgcagccggagcccccgccggctcgggcgccctctccccgccccagaagtggccagccccaaccccggaggaaggagggggcgcgacgaggctgtcgggcgacttctagccactcgctgagtggtctcttttgtttgcctaattcctcagcagtttctgagcctgacgctgaccctgctctgaatcccaggaaccccgtccaaaggtaaccccagcagaaaccggttcctcacccgggacttacgacccccgatcaccaccctcgcgtgcacgcacacactcaacagtttggagtttggagagtgagctccggcgagcagatggcgcggccagccgtctgtccgtccgtcctcctctccgccctgcggggcccggccagtggggggcgggctgcgcccccagcctgccttccccggcgctcgcagaccctccgctccgccagcgagaaggcagctccaaaacaaaaaggcgattccgggaggtggcgtcctgaggaaggaggggatcgccaaaggggagggtcccaggccgtccaggtcttggggcgccgcggcggaaatcgcgcggatgccagaacgcgctctcagcttcgggtcctgcggctgcggctgccgccatcatggtgcggaagcttaagttccacgagcagaagctgctgaagcaggtggacttcctgaactgggaggtcaccgaccacaacctgcacgagctgcgcgtgctgcggcgttaccggctgcagcggcgggaggactacacgcgctacaaccagctgagccgtgccgtgcgtgagctggcgcggcgcctgcgcgacctgcccgaacgcgaccagttccgcgtgcgcgcttcggccgcgctgctggacaagctgtatgctctcggcttggtgcccacgcgcggttcgctggagctctgcgacttcgtcacggcctcgtccttctgccgccgccgcctccccaccgtgctcctcaagctgcgcatggcgcagcaccttcaggctgccgtggcctttgtggagcaagggcacgtacgcgtgggccctgacgtggttaccgaccccgccttccttgtcacgcgcagcatggaggactttgtcacttgggtggactcgtccaagatcaagcggcacgtgctagagtacaatgaggagcgcgatgacttcgatctggaagcctagcggatctcccactttgcatggctgtcttttacagatgggaaaactgaggcctgatgctggagattctatgagggtgctctcctcaagggtatcagacggtcgtaggttcttaagaatttgattcatcagtggcaggccatgcatagagccacgggaggtgcgtccttgttttccagggaatgttcttagaacttggactactgattattaattgactgtgccttgggaaacagtgggaagtaacttggtgcagcactggggtattgttggcttcttgtgttggaaactttgtaatgtaaaaggaaaaactggaaatccccacgccctgtttccctttatcgtcttgtggttggactggttcaattcgtttaactcgaattcttgctcctggccgtggttaagctgtgtacagatgatggagagtttggcctcaagtttttataaactgagcgagactagtgttcaggatctcctcccttgtttaaatgtcaataaatgccccaactgctttgtaagtgcaactttttaa

SEQ ID NO: 14258 - DNA, 1031 bp, Homo sapiens
  source 1..1031: mol_type = unassigned DNA
cgcgctctcagcttcgggtcctgcggctgcggctgccgccatcatggtgcggaagcttaagttccacgagcagaagctgctgaagcaggtggacttcctgaactgggaggtcaccgaccacaacctgcacgagctgcgcgtgctgcggcgttaccggctgcagcggcgggaggactacacgcgctacaaccagctgagccgtgccgtgcgtgagctggcgcggcgcctgcgcgacctgcccgaacgcgaccagttccgcgtgcgcgcttcggccgcgctgctggacaagctgtatgctctcggcttggtgcccacgcgcggttcgctggagctctgcgacttcgtcacggcctcgtccttctgccgccgccgcctccccaccgtgctcctcaagctgcgcatggcgcagcaccttcaggctgccgtggcctttgtggagcaagggcacgtacgcgtgggccctgacgtggttaccgaccccgccttccttgtcacgcgcagcatggaggactttgtcacttgggtggactcgtccaagatcaagcggcacgtgctagagtacaatgaggagcgcgatgacttcgatctggaagcctagcggatctcccactttgcatggctgtcttttacagatgggaaaactgaggcctgatgctggagattctatgagggtgctctcctcaagggtatcagacggtcgtaggttcttaagaatttgattcatcagtggcaggccatgcatagagccacgggaggtgcgtccttgttttccagggaatgttcttagaacttggactactgattattaattgactgtgccttgggaaacagtgggaagtaacttggtgcagcactggggtattgttggactggttcaattcgtttaactcgaattcttgctcctggccgtggttaagctgtgtacagatgatggagagtttggcctcaagtttttataaactgagcgagactagtgttcaggatctcctcccttgtttaaatgtcaataaatgccccaactgctttgtaag

SEQ ID NO: 14259 - DNA, 631 bp, Homo sapiens
  source 1..631: mol_type = unassigned DNA
gcggatgccagaacgcgctctcagcttcgggtcctgcggctgcggctgccgccatcatggtgcggaagcttaagttccacgagcagaagctgctgaagcaggtggacttcctgaactgggaggtcaccgaccacaacctgcacgagctgcgcgtgctgcggcgttaccggctgcagcggcgggaggactacacgcgctacaaccagctgagccgtgccgtgcgtgagctggcgcggcgcctgcgcgacctgcccgaacgcgaccagttccgcgtgcgcgcttcggccgcgctgctggacaagctgtatgctctcggcttggtgctcctcaagctgcgcatggcgcagcaccttcaggctgccgtggcctttgtggagcaagggcacgtacgcgtgggccctgacgtggttaccgaccccgccttccttgtcacgcgcagcatggaggactttgtcacttgggtggactcgtccaagatcaagcggcacgtgctagagtacaatgaggagcgcgatgacttcgatctggaagcctagcggatctcccactttgcatggctgtcttttacagatgggaaaactgaggcctgatgctggagattctatgagggtgctctcctcaagggtatcag

SEQ ID NO: 14260 - DNA, 1740 bp, Homo sapiens
  source 1..1740: mol_type = unassigned DNA
cccatctggggatccccacgccggcagcaccaaggcctctgggtcagcttctttaagggcaagcgcccttagagaagcagcacggaagcaaccaatcaactggtttctccaattagcccccaagtggatcagcctgctgaactgtcggctagggttataggtggttctgagtccttccggaagctgccgaatcttagaagtcgcgccactgttgtggcgatggaagaaggcgaagctctacagaaaccattttggttgagggaagagtggttttaaagttaatttggaaaggagccggcaagcaaccttcagtcggtgtgcggtttttacagttgaactgtttccagccgctaattatgattgttttagcggttcgtcatctgaaaactgcattctgcacggcggtggtggggggaggacgaggatggagaagcctgggcggacatatttattagctgcggtcctaagtcacgtgtgacattctgtatccagtctatcggttatcccaaggagaacgccctgccggaatggccaatcgccttgagatgtccccgccctattcgccatcttaacatagggcattccccacagctgcaggcaccagtgaagcgtctaagggaccatcttggttgagggcggaagtgaggactgtgtcgcgctggaggagcccacagattctcccggacccacgtggaagcggcactcaagatgctgcgccgcgaggcccgcctgcgccgcgagtacctgtaccgcaaggcccgggaggaggcgcagcgctcagcccaggagaggaaggagcggctgcggcgcgcgctggaagaaaaccgcctgattcccactgagttacgccgagaggctctggccttacaggggtccctggagtttgatgatgctggaggtgaaggtgtgaccagccacgtggatgatgaataccgatgggcaggagtcgaggatcccaaggttatgatcactacctcccgagaccccagttcccgcctcaagatgtttgcaaaggagctgaagctggtgttcccgggcgcccagcgaatgaaccgaggtcgacatgaagtgggggcactggtgcgagcctgcaaagccaacggcgtcaccgatctgctggtcgttcacgagcatcggggcacacctgtggggctcatcgtcagccacctgccctttggtcctactgcctacttcacgctgtgcaatgtggtcatgcggcatgacatcccagacctgggcaccatgtcggaggccaagccccacctcatcacacacggcttctcctcccgcctgggcaagcgggtctctgacatcctccgatacctatttcccgtgcccaaagatgacagccaccgggtcatcaccttcgcaaaccaggacgactacatatcattccggcaccatgtgtataagaagacagaccaccgcaacgtggagctcactgaggtcgggccccgctttgagctgaagctgtacatgatccgtctgggcacgctggagcaggaggccacagcagacgtggagtggcgctggcacccttacaccaataccgcacgcaagagagtcttcctgagcaccgagtgagcacactcaccactcagtcaggacatggacttggaactcaggatggggctgtcatagacagacccaccagtaggaactgtcacagaatggcctgctgaactgggatgtggaactgtggcgggtggagaggtctgaataaaccgtctgtgtcatggc

SEQ ID NO: 14261 - DNA, 4356 bp, Homo sapiens
  source 1..4356: mol_type = unassigned DNA
tttggagctgcgacgccaaacatggcgtgttcctagaagccgctttcggcatcagtaggcggcggcgtggggtctggcagcgtggggagagggaccaaccgacgccacttcgtgttgggaagtgggagcgggagggccgggcaattcccgaccgaaccaaacggtttccatggatctcaatagtgccagcactgttgttcttcaggtgttaacacaggccaccagtcaggatactgctgtgttaaaaccagctgaggagcagttgaagcagtgggagacacagccaggtttctattcagtgttgctgaatattttcaccaaccacactttggatataaatgtaaggtggcttgctgtactgtattttaaacatggaattgatcgctactggagacgtgtagcacctcatgctctctcagaggaggagaaaactactctgcgtgcagggctcatcaccaacttcaatgaaccaataaaccagattgcaactcagattgcagtgctcattgcaaaagttgctagattggattgtcccagacagtggcctgaactaattcccactcttatagagtctgttaaagtccaggatgatcttcgacagcacagagcattacttaccttctatcatgttaccaagacactggcatctaaacgacttgctgctgatagaaaactattttatgatttagcttctggaatttataattttgcctgctctctgtggaatcaccacacagacacattcctgcaagaagtttcttctggcaatgaagctgcaattttgagttcactagaacgaacactgctatcattgaaagtgctgcgtaagttaactgttaatggatttgtggaacctcataagaatatggaggtgatgggttttttacatggaatatttgaacgtctaaaacagtttctggaatgcagtagaagtataggtacagataatgtgtgtagagatagactggaaaagaccatcattctttttactaaagtgcttttggacttcttggatcagcatcctttttcatttactcctctaattcagagatcactggaattttctgtaagctatgtttttacagaagttggtgaaggcgttacatttgaacgattcattgtccaatgtatgaatcttattaagatgattgtcaaaaattatgcttataagccatccaaaaattttgaagatagcagccctgaaactcttgaagcccataagattaagatggcattcttcacatatcctactttgacagagatatgtagaagattagtctctcattatttcctattaactgaagaagaactgacaatgtgggaagaagacccagaaggctttacagtggaagaaacaggaggagattcttggaaatatagtttgaggccatgcactgaagtattatttatagatatattccatgaatataatcagactcttactcctgtacttctagaaatgatgcaaacacttcaaggacccacaaatgtggaagatatgaatgcactgttaatcaaagatgctgtgtataatgctgttggattagctgcttatgagctctttgacagtgttgattttgatcagtggtttaaaaaccagcttcttccagaattacaagtcattcacaataggtataagccattgcgacgcagggtgatttggctcatcggtcagtggatttctgtgaaattcaagtctgacttaagacccatgctttatgaagcaatctgtaacttgcttcaagatcaagatttagtggtccgtattgaaacagctacaactttgaagttaactgttgatgattttgaatttagaacagatcagtttctaccgtatttggaaaccatgttcacactactttttcagttactgcagcaagttacagaatgtgacacaaagatgcatgttttgcatgtcctttcttgtgtgatcgaaagagtcaacatgcagatacgaccatatgtgggatgtttggtacaatatttgcccctcctttggaagcagagtgaagaacacaatatgttgagatgtgctattttgacaacacttattcatcttgttcagggattaggagcagacagcaagaacctgtaccctttcctgctcccagttattcaactgagtacagatgtttcacagcctccacatgtttatcttctggaagatggtttagaattatggttagtaactttggaaaacagtccatgtattacaccagagttgcttcgtatatttcagaatatgtcaccacttcttgaactaagttcagaaaatcttagaacttgctttaagatcatcaatggttatatctttttatcatcaacagaatttttacagacatacgcagtaggtctatgccagtccttttgtgaacttttaaaggaaattactacagaaggtcaagttcaggtgctcaaggttgtggaaaatgcccttaaagtgaacccaatactaggtccacaaatgtttcaaccgattttaccctatgttttcaagggtattatagaaggggagaggtatcctgtagtgatgtccacgtatcttggagttatgggtcgagttctactacaaaacactagttttttttcttcactacttaatgagatggcccataaatttaatcaggagatggaccagcttttgggaaatatgattgaaatgtgggttgatcgaatggacaacattacccagcctgaaagaagaaaactttcagctttggctttgctctctcttctgccatctgataatagtgttatccaagataaattctgtgggattataaacatttcagtagaaggcctgcatgatgtcatgacggaagatcctgaaacaggaacttataaagactgtatgttgatgtctcatcttgaggaaccaaaagtaacagaagatgaagaaccacccacagaacaagataagaggaaaaagatgctggccctgaaggaccctgttcatacagtgtcactgcagcagttcatctacgagaagctcaaggcacagcaggagatgctaggagaacaaggtttccagtccctcatggaaacagtggatacggagattgtcacccagctacaggagtttttgcaaggattctaagagcacatgacatgtggctgcctcccctttcagaaacaagctgagtaacccagcctgccgtttgtatgtgagagcctgctgagatgaagaaatcacttcatgaaaataagcaaagaccacacattttttactacaaaatgtaaaggataaatgtaaatcctgcataactaaaatcacaaacctattcctcaaaagaatttaattttatatttatgagggggcccttcactaaaaagtacatgtaaaagtacatttgatgacaatagctgcttagtttcctgttaagagaagaaactttatcttttaattatgtgctcttaatatttgaagatgagagttaatacctgagatgtttttctgcaaccaaaattcattaaatttggctgccttatcctttttttaagctaatgaaactacaggtttgaaaaatgacaaagctgttcagatgatgctattaaagaaatgtgtgtactaagcaaaaatatataaatagtgacaaatacacattaccaagcttatcttgcaagggagttattttcatctaacatagaaagtgtgttttatcagacaaatgcttttattttcattctaataatttgatacagaaattagtaaaggcatttttttctttttttttccagtaaatacattgggtctataaatgtgcatttgtaagggccacaaaagtgaacgtgtggtactgtagtaccacgtgggagacctctggttatggtttagtcctagttcctttgttactcctgtgagcaccgagaagaactgggcgactcccagtcccacctgtgctgtgacagtcccacgtggctatgacagactgtttagtacttacccttctcaggttcctcagtgcaggggtgcatcagggcctcaataataggggtatacctgggaggatccagcagtaatccccagggtactaggattactagtactctgatggaactagtcttccttccttattcctcgaacatgcagtacataaaaaggggaaaaggagaaaaaaaaagccttactttgttttacttgccatttattgtaaggaaactttaaagcattttttaggaaatactcaaaagcaaggttggaaaatgttttatctttctatagaaagttgggtacagtatgtaactgcgggaaacccactgcccctttgtaagctgtggaacccaaactgtatggggatatttgatgttttcagaaagaggaagaaaatatggtccaaattaaattttccaaagata

SEQ ID NO: 14262 - DNA, 3564 bp, Homo sapiens
  source 1..3564: mol_type = unassigned DNA
atagcaccaggtgtgaaactgctgggtcatagaagatacagtcacgagttgcttaaggctgggatacatcctgagaaatgggtcgttaggcaattttgttgttctatgaacatcatatgaacaaacctagatggtacagcctattatacacttgggctatgtggtatatagcttattgtatctaggctataagcctgtacagcatgttactgcactgaatactgtaagcagttgtcacaaaatggtttccatggatctcaatagtgccagcactgttgttcttcaggtgttaacacaggccaccagtcaggatactgctgtgttaaaaccagctgaggagcagttgaagcagtgggagacacagccaggtttctattcagtgttgctgaatattttcaccaaccacactttggatataaatgtaaggtggcttgctgtactgtattttaaacatggaattgatcgctactggagacgtgtagcacctcatgctctctcagaggaggagaaaactactctgcgtgcagggctcatcaccaacttcaatgaaccaataaaccagattgcaactcagattgcagtgctcattgcaaaagttgctagattggattgtcccagacagtggcctgaactaattcccactcttatagagtctgttaaagtccaggatgatcttcgacagcacagagcattacttaccttctatcatgttaccaagacactggcatctaaacgacttgctgctgatagaaaactattttatgatttagcttctggaatttataattttgcctgctctctgtggaatcaccacacagacacattcctgcaagaagtttcttctggcaatgaagctgcaattttgagttcactagaacgaacactgctatcattgaaagtgctgcgtaagttaactgttaatggatttgtggaacctcataagaatatggaggtgatgggttttttacatggaatatttgaacgtctaaaacagtttctggaatgcagtagaagtataggtacagataatgtgtgtagagatagactggaaaagaccatcattctttttactaaagtgcttttggacttcttggatcagcatcctttttcatttactcctctaattcagagatcactggaattttctgtaagctatgtttttacagaagttggtgaaggcgttacatttgaacgattcattgtccaatgtatgaatcttattaagatgattgtcaaaaattatgcttataagccatccaaaaattttgaagatagcagccctgaaactcttgaagcccataagattaagatggcattcttcacatatcctactttgacagagatatgtagaagattagtctctcattatttcctattaactgaagaagaactgacaatgtgggaagaagacccagaaggctttacagtggaagaaacaggaggagattcttggaaatatagtttgaggccatgcactgaagtattatttatagatatattccatgaatataatcagactcttactcctgtacttctagaaatgatgcaaacacttcaaggacccacaaatgtggaagatatgaatgcactgttaatcaaagatgctgtgtataatgctgttggattagctgcttatgagctctttgacagtgttgattttgatcagtggtttaaaaaccagcttcttccagaattacaagtcattcacaataggtataagccattgcgacgcagggtgatttggctcatcggtcagtggatttctgtgaaattcaagtctgacttaagacccatgctttatgaagcaatctgtaacttgcttcaagatcaagatttagtggtccgtattgaaacagctacaactttgaagttaactgttgatgattttgaatttagaacagatcagtttctaccgtatttggaaaccatgttcacactactttttcagttactgcagcaagttacagaatgtgacacaaagatgcatgttttgcatgtcctttcttgtgtgatcgaaagagtcaacatgcagatacgaccatatgtgggatgtttggtacaatatttgcccctcctttggaagcagagtgaagaacacaatatgttgagatgtgctattttgacaacacttattcatcttgttcagggattaggagcagacagcaagaacctgtaccctttcctgctcccagttattcaactgagtacagatgtttcacagcctccacatgtttatcttctggaagatggtttagaattatggttagtaactttggaaaacagtccatgtattacaccagagttgcttcgtatatttcagaatatgtcaccacttcttgaactaagttcagaaaatcttagaacttgctttaagatcatcaatggttatatctttttatcatcaacagaatttttacagacatacgcagtaggtctatgccagtccttttgtgaacttttaaaggaaattactacagaaggtcaagttcaggtgctcaaggttgtggaaaatgcccttaaagtgaacccaatactaggtccacaaatgtttcaaccgattttaccctatgttttcaagggtattatagaaggggagaggtatcctgtagtgatgtccacgtatcttggagttatgggtcgagttctactacaaaacactagttttttttcttcactacttaatgagatggcccataaatttaatcaggagatggaccagcttttgggaaatatgattgaaatgtgggttgatcgaatggacaacattacccagcctgaaagaagaaaactttcagctttggctttgctctctcttctgccatctgataatagtgttatccaagataaattctgtgggattataaacatttcagtagaaggcctgcatgatgtcatgacggaagatcctgaaacaggaacttataaagactgtatgttgatgtctcatcttgaggaaccaaaagtaacagaagatgaagaaccacccacagaacaagataagaggaaaaagatgctggccctgaaggaccctgttcatacagtgtcactgcagcagttcatctacgagaagctcaaggcacagcaggagatgctaggagaacaaggtttccagtccctcatggaaacagtggatacggagattgtcacccagctacaggagtttttgcaaggattctaagagcacatgacatgtggctgcctcccctttcagaaacaagctgagtaacccagcctgccgtttgtatgtgagagcctgctgagatgaagaaatcacttcatgaaaataagcaaagaccacacattttttactacaaaatgtaaaggataaatgtaaatcctgcataactaaaatcacaaacctattcctcaaaagaatttaattttatatttatgagggggcccttcactaaaaagtacatgtaaaagtacatttgatgacaatagctgcttagtttcctgttaagagaagaaactttatcttttaattatgtgctcttaatatttgaagatgagagttaatacctgagatgtttttctgcaaccaaaattcattaaatttggctg

SEQ ID NO: 14263 - DNA, 530 bp, Homo sapiens
  source 1..530: mol_type = unassigned DNA
gacaaagcccctccttccccttcccgccgttcgcctatcgccttctctctctgccggtcgcatgcgcgctggtctcctgtgacgtagttttcgcgcgtccgcgtcgtttggagctgcgacgccaaacatggcgtgttcctagaagccgctttcggcatcagtaggcggcggcgtggggtctggcagcgtggggagagggaccaaccgacgccacttcgtgttgggaagtgggagcgggagggccgggcaattcccgaccgaaccaaacgctaaggagacaccagagggtgatggttgacagtagttggtacctcacagctgggcactgatcaggtttccatggatctcaatagtgccagcactgttgttcttcaggtgttaacacaggccaccagtcaggatactgctgtgttaaaaccagctgaggagcagttgaagcagtgggagacacagccaggtttctattcagtgttgctgaatattttcaccaaccacactttggatataaatgtaaggtggcttgctgtact

SEQ ID NO: 14264 - DNA, 554 bp, Homo sapiens
  source 1..554: mol_type = unassigned DNA
acatgcttttaatgaaaaagtgaaggtagttgtccgtttatagagaggagcttcatggagaggtttccatggatctcaatagtgccagcactgttgttcttcaggtgttaacacaggccaccagtcaggatactgctgtgttaaaaccagctgaggagcagttgaagcagtgggagacacagccaggtttctattcagtgttgctgaatattttcaccaaccacactttggatataaatgtaaggtggcttgctgtactgtattttaaacatggaattgatcgctactggagacgtgtagcacctcatgctctctcagaggaggagaaaactactctgcgtgcagggctcatcaccaacttcaatgaaccaataaaccagattgcaactcagattgcagtgctcattgcaaaagttgctagattggattgtcccagacagtggcctgaactaattcccactcttatagagtctgttaaagtccaggatgatcttcgacagcacagagcattacttaccttctatcatgttaccaagacactggcatctaaacga

SEQ ID NO: 14265 - DNA, 584 bp, Homo sapiens
  source 1..584: mol_type = unassigned DNA
actgccgggaattggagtcacagagggaggaaggccgaaccgcgggagcctacagatcccagaagacaccgcgctaccgaggactgcagtctggagttggagcccttgtcccaaccagggctggataagaaggtttccatggatctcaatagtgccagcactgttgttcttcaggtgttaacacaggccaccagtcaggatactgctgtgttaaaaccagctgaggagcagttgaagcagtgggagacacagccaggtttctattcagtgttgctgaatattttcaccaaccacactttggatataaatgtaaggtggcttgctgtactgtattttaaacatggaattgatcgctactggagacgtgtagcacctcatgctctctcagaggaggagaaaactactctgcgtgcagggctcatcaccaacttcaatgaaccaataaaccagattgcaactcagattgcagtgctcattgcaaaagttgctagattggattgtcccagacagtggcctgaactaattcccactcttatagagtctgttaaagtccaggatgatcttcgacagcacagagcattact

SEQ ID NO: 14266 - DNA, 2953 bp, Homo sapiens
  source 1..2953: mol_type = unassigned DNA
ttatagatatattccatgaatataatcagactcttactcctgtacttctagaaatgatgcaaacacttcaaggacccacaaatgtggaagatatgaatgcactgttaatcaaagatgctgtgtataatgctgttggattagctgcttatgagctctttgacagtgttgattttgatcagtggtttaaaaaccagcttcttccagaattacaagtcattcacaataggtataagccattgcgacgcagggtgatttggctcatcggtcagtggatttctgtgaaattcaagtctgacttaagacccatgctttatgaagcaatctgtaacttgcttcaagatcaagatttagtggtccgtattgaaacagctacaactttgaagttaactgttgatgattttgaatttagaacagatcagtttctaccgtatttggaaaccatgttcacactactttttcagttactgcagcaagttacagaatgtgacacaaagatgcatgttttgcatgtcctttcttgtgtgatcgaaagagtcaacatgcagatacgaccatatgtgggatgtttggtacaatatttgcccctcctttggaagcagagtgaagaacacaatatgttgagatgtgctattttgacaacacttattcatcttgttcagggattaggagcagacagcaagaacctgtaccctttcctgctcccagttattcaactgagtacagatgtttcacagcctccacatgtttatcttctggaagatggtttagaattatggttagtaactttggaaaacagtccatgtattacaccagagttgcttcgtatatttcagaatatgtcaccacttcttgaactaagttcagaaaatcttagaacttgctttaagatcatcaatggttatatctttttatcatcaacagaatttttacagacatacgcagtaggtctatgccagtccttttgtgaacttttaaaggaaattactacagaaggtcaagttcaggtgctcaaggttgtggaaaatgcccttaaagtgaacccaatactaggtccacaaatgtttcaaccgattttaccctatgttttcaagggtattatagaaggggagaggtatcctgtagtgatgtccacgtatcttggagttatgggtcgagttctactacaaaacactagttttttttcttcactacttaatgagatggcccataaatttaatcaggagatggaccagcttttgggaaatatgattgaaatgtgggttgatcgaatggacaacattacccagcctgaaagaagaaaactttcagctttggctttgctctctcttctgccatctgataatagtgttatccaagataaattctgtgggattataaacatttcagtagaaggcctgcatgatgtcatgacggaagatcctgaaacaggaacttataaagactgtatgttgatgtctcatcttgaggaaccaaagtaacagaagatgaagaaccacccacagaacaagataagaggaaaaagatgctggccctgaaggaccctgttcatacagtgtcactgcagcagttcatctacgagaagctcaaggcacagcaggagatgctaggagaacaaggtttccagtccctcatggaaacagtggatacggagattgtcacccagctacaggagtttttgcaaggattctaagagcacatgacatgtggctgcctcccctttcagaaacaagctgagtaacccagcctgccgtttgtatgtgagagcctgctgagatgaagaaatcacttcatgaaaataagcaaagaccacacattttttactacaaaatgtaaaggataaatgtaaatcctgcataactaaaatcacaaacctattcctcaaaagaatttaattttatatttatgagggggcccttcactaaaaagtacatgtaaaagtacatttgatgacaatagctgcttagtttcctgttaagagaagaaactttatcttttaattatgtgctcttaatatttgaagatgagagttaatacctgagatgtttttctgcaaccaaaattcattaaatttggctgccttatcctttttttaagctaatgaaactacaggtttgaaaaatgacaaagctgttcagatgatgctattaaagaaatgtgtgtactaagcaaaaatatataaatagtgacaaatacacattaccaagcttatcttgcaagggagttattttcatctaacatagaaagtgtgttttatcagacaaatgcttttattttcattctaataatttgatacagaaattagtaaaggcatttttttctttttttttccagtaaatacattgggtctataaatgtgcatttgtaagggccacaaaagtgaacgtgtggtactgtagtaccacgtgggagacctctggttatggtttagtcctagttcctttgttactcctgtgagcaccgagaagaactgggcgactcccagtcccacctgtgctgtgacagtcccacgtggctatgacagactgtttagtacttacccttctcaggttcctcagtgcaggggtgcatcagggcctcaataataggggtatacctgggaggatccagcagtaatccccagggtactaggattactagtactctgatggaactagtcttccttccttattcctcgaacatgcagtacataaaaaggggaaaaggagaaaaaaaaagccttactttgttttacttgccatttattgtaaggaaactttaaagcattttttaggaaatactcaaaagcaaggttggaaaatgttttatctttctatagaaagttgggtacagtatgtaactgcgggaaacccactgcccctttgtaagctgtggaacccaaactgtatggggatatttgatgttttcagaaagaggaagaaaatatggtccaaattaaattttccaaagatacctc

SEQ ID NO: 14267 - DNA, 6191 bp, Homo sapiens
  source 1..6191: mol_type = unassigned DNA
gttctatccggggccttggcgcttctctttcctttcgcgccggttgccgctgcggagcgcggcgggtccatgtgcgcagtgagtggcgctattcctggcccagtagcacccgagccccgggtttgaccgagtccgcgctgcgatggaccccaacaccattatcgaggccctgcggggcactatggacccagccctgcgtgaggccgcggagcgccagctcaatgaagcacacaagtctctgaattttgtctcaacactgctccagattactatgtcggaacagctggatttacctgtgagacaggcaggtgttatctatctgaaaaatatgataacacagtattggcctgatcgagaaacagcaccaggggatatatccccttatactattccagaagaagatcgccattgtattcgagaaaatattgtagaagccattatccattctcctgagctcatcagggtacagcttactacatgcattcatcacatcatcaaacatgattatccaagccgctggactgccattgtggacaaaattggcttttatcttcagtccgataacagtgcttgttggctaggaattcttctttgcctttatcagcttgtgaaaaattatgagtataaaaaaccagaggagcggagtccattggtagcagcaatgcagcattttctgccagttctaaaggatcgttttatccagcttctttctgaccagtctgatcagtctgtcctcatccagaaacagatattcaagatcttctatgctcttgttcagtatacactaccactggaactgataaaccaacagaacctgacagaatggatagaaattttaaagactgttgtgaacagggatgtacctaatgaaacacttcaagttgaagaagatgatcgacctgagttaccatggtggaaatgcaagaagtgggccttacatattttagcaagactttttgaaagatatggaagccctggcaatgtttccaaggagtataatgaatttgctgaagtatttctgaaggcatttgctgttggtgtccagcaagttttattgaaggtgttatatcagtacaaggagaagcaatatatggctcctcgagttttacaacagacattaaattatattaatcaaggagtttctcatgctctcacctggaagaatctgaagccccatatacaaggcattatccaagatgttatttttccattgatgtgctatacagatgctgatgaggaactttggcaagaagacccttacgaatatatacgcatgaagtttgatgtgtttgaagatttcatttctcctaccactgctgcccagacacttttgtttacagcctgtagtaagaggaaagaggtactgcaaaagactatgggattttgttaccagattcttacagaaccaaatgctgaccctcgaaaaaaagatggagccctgcatatgattggctctttagctgaaatacttctgaagaaaaagatctataaagatcagatggaatacatgttgcagaatcatgtattccctctcttcagcagtgaactaggctacatgagagcaagggcttgctgggtacttcactatttttgtgaagtgaagttcaaaagtgatcagaaccttcaaacagccttagagctaacaagaagatgtctgattgatgatagagaaatgcctgtgaaagtggaagctgccattgcccttcaagtattgatcagcaatcaagaaaaagctaaagaatatatcacaccattcatcagacctgtaatgcaggctcttcttcacattataagagaaacagaaaatgatgaccttaccaatgtaattcagaaaatgatctgtgaatatagtgaagaagttactcctattgcagtagaaatgacacaacatttggcaatgacatttaaccaagtaatccagacggggccagatgaagaaggtagtgatgacaaagcagttactgctatgggaattctgaatacaattgatacacttcttagtgtagttgaagatcataaagagataacccaacagcttgagggaatctgcttacaggtcattggtactgttttacaacagcatgtcttagaattctatgaggagatcttctctttagcgcacagtttgacatgtcaacaagtgtctccacagatgtggcagctactaccccttgtatttgaagtctttcagcaagatggctttgattactttacagatatgatgcccctccttcataattatgtaacagttgatacagacacacttctgtctgacaccaagtatcttgaaatgatatacagtatgtgcaaaaaggttcttacaggagttgcaggagaagatgcagagtgtcatgcagcaaaattgttagaggtcatcattctgcagtgcaaagggcgtggcattgaccagtgcattcccttattcgtggaagcagccttagaaagactgacaagagaggttaagacaagtgaacttcgaactatgtgtctgcaagttgcaattgcagctttgtattataatccacacctactactcaataccttagaaaatcttcgcttccctaataatgttgaaccagttacaaatcattttattacacagtggcttaatgatgttgactgtttcttggggcttcatgacagaaagatgtgtgttctcggactctgtgctcttattgatatggaacagataccccaagttttaaatcaggtttctggacagattttgccggcttttatccttttatttaacggattgaaaagagcatatgcctgccatgcagaacatgagaatgacagtgatgatgatgatgaagctgaagatgatgatgaaaccgaggaactggggagtgatgaagatgatattgatgaagatgggcaagaatatttggagattctggctaagcaggctggtgaagatggagatgatgaagattgggaagaagatgatgctgaagagactgctctggaaggctattccacaatcattgatgatgaagataaccctgttgatgagtatcagatatttaaagctatctttcaaactattcaaaatcgtaatcctgtgtggtatcaggcactgactcacggtcttaatgaagaacaaagaaaacagttacaggacatagcaactctggctgatcaaagaagagcagcccatgaatccaaaatgattgagaagcatggaggatacaaattcagtgctccagttgtgccaagttctttcaattttggaggcccagcaccagggatgaattgagttatctctttctttcctgctgtgtgcttgtagtgaagagcttgtgttcctcctagtagtggttccagaactggttcatgttatctattctaaactaataatcaatagatggacaaaagaaacaacaaccccaggagatgggacctgatcatgcaacctggcactggaaaagaaatcagcgggattttgggggtggggggggatgggaggtaccttagagggagtattttctttattttttgaagaaagtaagatcctgactctgaagcttcaaagtgacactgtggaaatctgaaacgaggggatgtcatgaaggcagcttttctttttctgaggaaaaaataggcatgggctacaggactatttaaaatgtctcatttacagtataaaactcaaaggtagatgtaatttttacacctatgagtatttgtccaatttctgtctcttcctcaccattgggtatctattctttatatgtaaataagataaggtcatctgatagccttattcagtcttcatcattttcatcattgttcctatgtagattattggacatttattgtagcactacataactgattataaaaatctgtaaatgaattagcactttcatattgaaacaagcctgctagcctatgtataaaatagcaaaatgtttgctgtttataaaaagatgtaatggggtggggggcaggggtaatttcaagttattaatttaaaaatgaactagcaattttgtacctggtgactttgtggtgcactcacctctgatagtgacttgaattcggtatgtaaaaaggggttagtggtatttcattgctgctaaaaatgacaactccctctgtgtcctgtttttcttaaagctgtcagtgtacaagtgggtatttgaataccagaccttactgtaaaaaataaaaaaggtggtatctagagcatgtaaattggatataaagttctgctcttaaagagttgatctaagagtatggctaaacatctatatatgcaatctattaaaagaacttaattcggctattatgtcttgatttgattgcagttttttcctaattataacaaatttttcctcattggcctgtttttaatcctgtgcctagaaggagtacaaaatgcacactttacaaaattgatatttaacacttacccactcccctttccccatctcttctaccgctcttgttgatcgtggtatctgatcttgactagataggctgaaggcacatggttccctccaaaaaccactattgataccactacaaaaacaagccagcaaaaagatactgtagagaggttggcttgcttccctctcttcctaactgcatgttgaaaaataagccgttattgatcttaaacatcggtcagatgagtcatacattgggttattttttatatacatgtatacacaaaatatttcaaattgaaagcaacatcttaatggattcaaaactattacaagctgttgtctaaaacaggtgagaaaaaaatttataactgtaaaaacaaatgcacatattgatatttaaaatgcgtaattaagaaaacccattgttgttgtgtttttcttgtataccaataattaagccactactgttggcactgtttggttttctattttaacactgaaggagtgaaagtatttcctatatttatgaatttactactaaaatcttggcaaaaaaagaaaaaaattgtctaacgtgtgtgggtgaaaactgttaatcaagtgtttctactcccccccgaaaatcccctgaaagttggacaccaactgtataccctaggttgcttaaagggatttcactattatataaagtcaataaaaatgaagtagttgtatatatgcaacattgtgtacagaggggaaataatgaatagtattaaagaaacattctcgtcttcctttacctttaatcccctaatacctagtctactttttaaattttcagacttcactgctttttgaattcataattctaattttcacattattgttaatggaaaatcatatctaataaaggttttagttattcccatgcacagtatgaaaattctcatttgctgaggttttgtttcaagaaaatgtattggcatgtctttgagaacatgttttattgtctcctgtgtcatataatccaaactaatctccgtttacagactttaacttgaaattagaccttataattaaactatttaaatagtgttcaaatgatagtttctaatgcatcaaatatatacctcagttttcatgatttcctttaacattataatttggtatagatcaagaatcttaacatgtatcagtttctagatgaggctgcaggatttttggaaaactttttgaatgtatttacaatattctcttgtaattagctacatagggacttgtctttttttctttttacatacagcttttcctacagttttattaccctgtaatttttttttagttgtagaagttaattctgattttgtgtggatttcagtatttgtctttgttaatggcacatattagcataaatcacttttgtaaatgtaagctttctttttttttcttgaaaaagcctttctatttatcagtattaaataaaggaagttaatctgtttctctgcaggtaataaaatagtgacacactgtattaagatagtgactgctatactcaactctggaagagactagagtatagagcatgagtggcaaaaccacagcccttgggccatatgctgctattcagtcccagatgtagcccctgaagcaagcataaagaaaaatgaattaaaaattaaattaatatggaaagttaaaaaatggattacattagtatgactaaaccatgtctttggcaaagatctaacacaatgtcttaagtataataggtagtctctgtttgtaaaataaatgacttaaatttaaaacatc

SEQ ID NO: 14268 - DNA, 5325 bp, Homo sapiens
  source 1..5325: mol_type = unassigned DNA
acagcagcatggcggccgccgacgggaggcggtcatagcatcacgcccgggggaagaggccgccgtaaaggaagctctgcttcctcttcttccttctcccgcctcccaccggctgtcgtaaaacggtgaatggagagcgagttgtgggggggaaaaagggaggacagggggcgcggagtcagagtggcgcagcaagtggccgcaggtggcgacggtggcggggggtggggtgtgaggtaatccaggggtcgcggaagaggaggctgagagggtcaaaagaaaactaaagctgcagtccggcctactgttccgggggccgcggagcccccacccggggagatggacctcaaccggatcatccaggcgctgaagggcaccatcgacccgaagttgcggattgcagccgagaacgagctcaaccagtcctacaagattatcaattttgcccccagtttacttcggattatagtctctgaccatgtggaattcccagtacgacaggcagctgccatttacctgaagaacatggtgacacaatactggccagatcgagaacctccaccaggagaagcaatatttccattcaacattcacgaaaacgatcgccagcaaatacgtgataacattgtggaaggaataattcggtctccagatttagtgagagtccaattaacaatgtgtctccgtgccatcataaaacatgattttcctggtcactggccaggagtggtcgacaagatagactattacttgcaatcacagagcagtgcaagctggcttggcagtttattatgcctgtatcaactggtgaagacatatgaatataagaaagcagaagagagagaacctcttataatagcaatgcagatattcctgcctcgtattcagcaacaaattgttcagctccttcctgattcctcctattattctgtattactgcagaaacaaattctgaaaatcttttatgcacttgttcagtatgcattgcctcttcagctagtgaataaccaaaccatgacaacatggatggagatcttccgaactattatcgacaggaccgttcctcctgagactctgcacattgatgaggatgatagaccagaactggtatggtggaagtgtaagaagtgggcactgcatattgtagctcggctctttgaacgatatggaagcccaggaaatgtcacaaaagaatactttgaattttctgaattctttttgaaaacctatgcagtgggcattcagcaggtgctactaaaaattttagatcaatatagacagaaagaatatgtagctccccgtgttcttcagcaagcattcaactatctcaaccaaggggtggttcattctataacctggaagcagatgaagccacacatacagaatatctctgaagatgtgattttttctgtgatgtgttataaagatgaggatgaagagctgtggcaagaagatccatatgagtatataaggatgaaatttgatatttttgaagattatgcttctcccaccacagcagcccagactctcttatatactgctgcaaagaaaagaaaagaggtgttgccaaaaatgatggcattctgttatcaaatcctgacagacccgaactttgaccctaggaagaaagatggagccctgcatgtgattggttccctagctgagattttactgaagaagagtttattcaaggaccaaatggagctgtttctacaaaatcatgtatttccattattattgtctaacctgggatatcttcgagctagatcttgctgggtacttcatgcatttagttctttgaagttccataatgagctcaatctaagaaatgccgttgaattagcgaagaagagcctgattgaagataaagagatgcctgtcaaagttgaagctgcccttgctcttcagtctttaatttctaaccagatacaagctaaggaatatatgaagccacatgtgaggcctattatgcaggaactgttgcacattgttagagagacagaaaatgatgatgttactaatgtcatccagaagatgatatgtgaatacagtcaagaggtagcctcaattgctgttgatatgacccaacacttggctgagatatttggcaaagttcttcaaagtgatgaatatgaagaagttgaagacaaaacagtaatggctatgggaattttacataccattgatactatcttaacagttgtagaagatcataaagagattacccagcagttagagaatatctgtctacggatcattgatcttgttctgcagaaacatgtaattgaattctatgaagaaattctttccctggcatacagtttaacctgccacagtatttcccctcaaatgtggcagcttctaggtatactatatgaagtgtttcagcaggattgctttgaatactttacagacatgatgcctctcctgcataattatgtgacaatagatacagataccttactatcaaatgcaaaacatttagaaattctttttacaatgtgtaggaaggtactatgtggagatgcaggagaagatgcagagtgtcatgcagctaaacttctggaagtcatcattcttcagtgcaaaggaaggggaattgatcagtgcattccactcttcgttcaacttgttttggagagattaactcgaggggtcaaaactagtgagcttcgtactatgtgtcttcaggttgcaattgctgccttgtactacaaccctgatttgctgctacatactttagaacgaattcagttgcctcacaaccctggacctatcactgtacagtttataaatcaatggatgaatgatacagattgttttcttgggcatcatgaccggaagatgtgtataataggactgagtatccttttggaattgcaaaatcgacctcctgcagtagatgctgtggtgggacagattgttccctcaattcttttccttttccttggcctaaagcaggtctgtgctactagacaactggtaaaccgggaagatcgttcaaaagcagagaaagctgatatggaagaaaatgaggagatttcaagtgatgaagaggagacaaatgtaactgctcaagcaatgcagtcaaataatggaagaggtgaagatgaggaggaggaagatgatgactgggatgaagaagtattggaagaaaccgcgcttgaggggttcagtactccacttgaccttgacaatagtgtggatgaatatcagttttttacacaagctctgataactgtgcagagtcgagatgcagcctggtaccagctgctgatggcaccactcagcgaggatcagaggacagcactgcaggaggtgtacacactggcagagcaccgacggacggtggcagaggcaaagaagaagattgaacaacagggaggcttcacctttgaaaacaaaggagtcctctccgcatttaattttgggactgtgcccagcaacaactgaaggaaagaacatcagctgaccaaatgtcatcgctgcattttatttcacaagaggagtgtgagggtcaaggggatgaaatgaggggctgcttttagggccctcctgctgtgccagttaccatctggcattaggcagcacttttatctactctttcccctttgacctttgtcaccctgaaatatatattttaaacagctactgtaagtatgaaatgaaagaaaaacaatcattggacggaaaaggacaacccatatgttccaaaggctgaatgcccaaggttgttttagaggattggatagacttgcacgtctcaggtttttgccatgcagaatcaatggatttatgcggataacagtgccttctgttgtacatgaattatcagaaaaaaatttttggagtgcattgcaattttttttaaagcataaaacatatttctagatacaacataaaccttggttatatgtcaactattctgcattttactctgtgaatttattgttaggcagttactgcaagtcactctggtttcaaaatcttcacggctccctctgctcaccctgctgctggggggcttttttcaggggttgtattataaaatatgcactggctgtggtttttcataagatgttttgtggctttttaaagaagtgtcttactccctcttctctcatttttttctgccttgaaaaggggtggtatttcttttggggtcaacaaatacacatatcagtttcactcctaaccttgtaagttcaggactcattttcttggcagcaagtggcaggggctctttagtcactggagttaacagtaagtctgagtatattctgaataatgtaattatgcaattaattgataatcatacctaaagcacattgaacttctaagagacaggtgctacgtaagcacactgtctttctggatggggacttgtattttaaataacttatcattccagctatgttggactagggtccaaagcattttataatatttttttttaatctaggaaaaagacccaaacaaatctaacttcttgctttctcacctatttgaattttctcctacctaatttgtttgtgtctttattatagctcagtttgacttctcaaacttttcaagggttggggcagctgcacttttaggttgcctataggaaatattgcatatggagattacagtgtttttctgacctagttcaagaccagaacatgggtcatagggtttttattcagcaaaatgaaaacgtatcttcagaacttaacatattactggatgtgatacagattttgctttctgtggaattgaaaattcacaaaaattcacagcttaaatttcccatcagtgactggaggaatttttttcaggtgcttcctatattaccatccctcatgcatattaactctttagaattttaggttaagtgatgtctatagaagtagcctggaaaaccatgagttttggagttcagtgaccccctgctttcctctgctcctcccttcccaaggcattgaagctgaatgtgccaactggcagttagaagcgaaagatggcattgggagaaattttagagagctttcaaactctttattctcatgttccacatggtctaattttaacataaataatatgccttcacactggattgtaaaaggcatgtgatttttgagattttattttgtgatgtattgtcttctgcagtattaaagggaaagagatattaatgtgcattaccctatcttgtttttgaagccagggtagttgtatgattttgttaccagcagtgctaacctgaatgtgacctggttaccttggaaatgcaggaacttatatgaatgtactataaaataaaatgcggactgattcccagga

SEQ ID NO: 14269 - DNA, 3212 bp, Homo sapiens
  source 1..3212: mol_type = unassigned DNA
attgttgtatatgcagtctgtcactgaccgaaacatttgttatgtggtgcatgactttatatacattttttccagttagagtgtaagcttcgtgagggcaaagattgtctatcttattatgtctgtagcatgtagcatgttttgtactgaatggatgtggaggcaatatccgtcttctgcaactcacagtacagcagaggtgagccatatatctgtttagtacaaagtggactgtagttattatgctacagtgtagaggaaagtaatttaaaaaaatgtttcatgagtgtttaatgaaataaatattttcatcaaggtggttaaaatggaaagtttgaccctcaaagggtatgcattgcctcttcagctagtgaataaccaaaccatgacaacatggatggagatcttccgaactattatcgacaggaccgttcctcctgagactctgcacattgatgaggatgatagaccagaactggtatggtggaagtgtaagaagtgggcactgcatattgtagctcggctctttgaacgatatggaagcccaggaaatgtcacaaaagaatactttgaattttctgaattctttttgaaaacctatgcagtgggcattcagcaggtgctactaaaaattttagatcaatatagacagaaagaatatgtagctccccgtgttcttcagcaagcattcaactatctcaaccaaggggtggttcattctataacctggaagcagatgaagccacacatacagaatatctctgaagatgtgattttttctgtgatgtgttataaagatgaggatgaagagctgtggcaagaagatccatatgagtatataaggatgaaatttgatatttttgaagattatgcttctcccaccacagcagcccagactctcttatatactgctgcaaagaaaagaaaagaggtgttgccaaaaatgatggcattctgttatcaaatcctgacagacccgaactttgaccctaggaagaaagatggagccctgcatgtgattggttccctagctgagattttactgaagaagagtttattcaaggaccaaatggagctgtttctacaaaatcatgtatttccattattattgtctaacctgggatatcttcgagctagatcttgctgggtacttcatgcatttagttctttgaagttccataatgagctcaatctaagaaatgccgttgaattagcgaagaagagcctgattgaagataaagagatgcctgtcaaagttgaagctgcccttgctcttcagtctttaatttctaaccagatacaagctaaggaatatatgaagccacatgtgaggcctattatgcaggaactgttgcacattgttagagagacagaaaatgatgatgttactaatgtcatccagaagatgatatgtgaatacagtcaagaggtagcctcaattgctgttgatatgacccaacacttggctgagatatttggcaaagttcttcaaagtgatgaatatgaagaagttgaagacaaaacagtaatggctatgggaattttacataccattgatactatcttaacagttgtagaagatcataaagagattacccagcagttagagaatatctgtctacggatcattgatcttgttctgcagaaacatgtaattgaattctatgaagaaattctttccctggcatacagtttaacctgccacagtatttcccctcaaatgtggcagcttctaggtatactatatgaagtgtttcagcaggattgctttgaatactttacagacatgatgcctctcctgcataattatgtgacaatagatacagataccttactatcaaatgcaaaacatttagaaattctttttacaatgtgtaggaaggtactatgtggagatgcaggagaagatgcagagtgtcatgcagctaaacttctggaagtcatcattcttcagtgcaaaggaaggggaattgatcagtgcattccactcttcgttcaacttgttttggagagattaactcgaggggtcaaaactagtgagcttcgtactatgtgtcttcaggttgcaattgctgccttgtactacaaccctgatttgctgctacatactttagaacgaattcagttgcctcacaaccctggacctatcactgtacagtttataaatcaatggatgaatgatacagattgttttcttgggcatcatgaccggaagatgtgtataataggactgagtatccttttggaattgcaaaatcgacctcctgcagtagatgctgtggtgggacagattgttccctcaattcttttccttttccttggcctaaagcaggtctgtgctactagacaactggtaaaccgggaagatcgttcaaaagcagagaaagctgatatggaagaaaatgaggagatttcaagtgatgaagaggagacaaatgtaactgctcaagcaatgcagtcaaataatggaagaggtgaagatgaggaggaggaagatgatgactgggatgaagaagtattggaagaaaccgcgcttgaggggttcagtactccacttgaccttgacaatagtgtggatgaatatcagttttttacacaagctctgataactgtgcagagtcgagatgcagcctggtaccagctgctgatggcaccactcagcgaggatcagaggacagcactgcaggaggtgtacacactggcagagcaccgacggacggtggcagaggcaaagaagaagattgaacaacagggaggcttcacctttgaaaacaaaggagtcctctccgcatttaattttgggactgtgcccagcaacaactgaaggaaagaacatcagctgaccaaatgtcatcgctgcattttatttcacaagaggagtgtgagggtcaaggggatgaaatgaggggctgcttttagggccctcctgctgtgccagttaccatctggcattaggcagcacttttatctactctttcccctttgacctttgtcaccctgaaatatatattttaaacagctactgtaagtatgaaatgaaagaaaaacaatcattggacggaaaaggacaacccatatgttccaaaggctgaatgcccaaggttgttttagaggattggatagacttgcacgtctcaggtttttgccatgcagaatcaatggatttatgcggataacagtgccttctgttgtacatgaattatcagaaaaaa

SEQ ID NO: 14270 - DNA, 3413 bp, Homo sapiens
  source 1..3413: mol_type = unassigned DNA
ttatcatctgggcatgaattagctaaggaatatatgaagccacatgtgaggcctattatgcaggaactgttgcacattgttagagagacagaaaatgatgatgttactaatgtcatccagaagatgatatgtgaatacagtcaagaggtagcctcaattgctgttgatatgacccaacacttggctgagatatttggcaaagttcttcaaagtgatgaatatgaagaagttgaagacaaaacagtaatggctatgggaattttacataccattgatactatcttaacagttgtagaagatcataaagagattacccagcagttagagaatatctgtctacggatcattgatcttgttctgcagaaacatgtaattgaattctatgaagaaattctttccctggcatacagtttaacctgccacagtatttcccctcaaatgtggcagcttctaggtatactatatgaagtgtttcagcaggattgctttgaatactttacagacatgatgcctctcctgcataattatgtgacaatagatacagataccttactatcaaatgcaaaacatttagaaattctttttacaatgtgtaggaaggtactatgtggagatgcaggagaagatgcagagtgtcatgcagctaaacttctggaagtcatcattcttcagtgcaaaggaaggggaattgatcagtgcattccactcttcgttcaacttgttttggagagattaactcgaggggtcaaaactagtgagcttcgtactatgtgtcttcaggttgcaattgctgccttgtactacaaccctgatttgctgctacatactttagaacgaattcagttgcctcacaaccctggacctatcactgtacagtttataaatcaatggatgaatgatacagattgttttcttgggcatcatgaccggaagatgtgtataataggactgagtatccttttggaattgcaaaatcgacctcctgcagtagatgctgtggtgggacagattgttccctcaattcttttccttttccttggcctaaagcaggtctgtgctactagacaactggtaaaccgggaagatcgttcaaaagcagagaaagctgatatggaagaaaatgaggagatttcaagtgatgaagaggagacaaatgtaactgctcaagcaatgcagtcaaataatggaagaggtgaagatgaggaggaggaagatgatgactgggatgaagaagtattggaagaaaccgcgcttgaggggttcagtactccacttgaccttgacaatagtgtggatgaatatcagttttttacacaagctctgataactgtgcagagtcgagatgcagcctggtaccagctgctgatggcaccactcagcgaggatcagaggacagcactgcaggaggtgtacacactggcagagcaccgacggacggtggcagaggcaaagaagaagattgaacaacagggaggcttcacctttgaaaacaaaggagtcctctccgcatttaattttgggactgtgcccagcaacaactgaaggaaagaacatcagctgaccaaatgtcatcgctgcattttatttcacaagaggagtgtgagggtcaaggggatgaaatgaggggctgcttttagggccctcctgctgtgccagttaccatctggcattaggcagcacttttatctactctttcccctttgacctttgtcaccctgaaatatatattttaaacagctactgtaagtatgaaatgaaagaaaaacaatcattggacggaaaaggacaacccatatgttccaaaggctgaatgcccaaggttgttttagaggattggatagacttgcacgtctcaggtttttgccatgcagaatcaatggatttatgcggataacagtgccttctgttgtacatgaattatcagaaaaaaatttttggagtgcattgcaattttttttaaagcataaaacatatttctagatacaacataaaccttggttatatgtcaactattctgcattttactctgtgaatttattgttaggcagttactgcaagtcactctggtttcaaaatcttcacggctccctctgctcaccctgctgctggggggcttttttcaggggttgtattataaaatatgcactggctgtggtttttcataagatgttttgtggctttttaaagaagtgtcttactccctcttctctcatttttttctgccttgaaaaggggtggtatttcttttggggtcaacaaatacacatatcagtttcactcctaaccttgtaagttcaggactcattttcttggcagcaagtggcaggggctctttagtcactggagttaacagtaagtctgagtatattctgaataatgtaattatgcaattaattgataatcatacctaaagcacattgaacttctaagagacaggtgctacgtaagcacactgtctttctggatggggacttgtattttaaataacttatcattccagctatgttggactagggtccaaagcattttataatatttttttttaatctaggaaaaagacccaaacaaatctaacttcttgctttctcacctatttgaattttctcctacctaatttgtttgtgtctttattatagctcagtttgacttctcaaacttttcaagggttggggcagctgcacttttaggttgcctataggaaatattgcatatggagattacagtgtttttctgacctagttcaagaccagaacatgggtcatagggtttttattcagcaaaatgaaaacgtatcttcagaacttaacatattactggatgtgatacagattttgctttctgtggaattgaaaattcacaaaaattcacagcttaaatttcccatcagtgactggaggaatttttttcaggtgcttcctatattaccatccctcatgcatattaactctttagaattttaggttaagtgatgtctatagaagtagcctggaaaaccatgagttttggagttcagtgaccccctgctttcctctgctcctcccttcccaaggcattgaagctgaatgtgccaactggcagttagaagcgaaagatggcattgggagaaattttagagagctttcaaactctttattctcatgttccacatggtctaattttaacataaataatatgccttcacactggattgtaaaaggcatgtgatttttgagattttattttgtgatgtattgtcttctgcagtattaaagggaaagagatattaatgtgcattaccctatcttgtttttgaagccagggtagttgtatgattttgttaccagcagtgctaacctgaatgtgacctggttaccttggaaatgcaggaacttatatgaatgtactataaaataaaatgcggactgattcccagg

SEQ ID NO: 14271 - DNA, 4169 bp, Homo sapiens
  source 1..4169: mol_type = unassigned DNA
gaggcagggccgacaccgagcccgcccgacccgggctcccacctgctcctccagcgcaccaggtgtctttaagagtgattgaagagaataattcaaaatgcctgaaaatcctgctacagataaactgcaggtgctgcaggtacttgatcgcctgaaaatgaaattgcaggagaagggtgacacgtcgcagaatgagaagttatctatgttttatgagacactaaagagtcctctcttcaaccagatactcacacttcagcagtccatcaagcaactgaagggtcaactcaaccatataccctcagattgttcagccaactttgatttttctaggaaaggtttgttagtgttcacagatggttccatcactaatggaaatgtccacaggccctctaataactcgactgtatctgggttatttccgtggaccccgaagttgggaaatgaagactttaactcagtcattcaacagatggctcagggccggcaaattgaatatatagatatagaacggccttcaactggaggccttggattcagtgtggtggccctcagaagtcaaaatctcggaaaagttgatatcttcgtgaaggatgtccagccagggagtgtagcagacagggatcaaagattaaaggaaaatgatcaaatattggccattaatcacacgccattggatcagaacatttcccatcagcaagcaattgcattattacaacaaaccactggatctttgagactgattgtggccagggaaccagtccacacaaaaagcagtacttctagcagcctaaatgatacaactctgcctgaaacagtttgttggggccatgttgaagaggttgagctcattaatgatggctctggactaggttttggaatagttggaggaaaaacaagtggcgtggttgtgaggactatagttcctggaggattagcagatcgagatggaagactccagacaggggaccacatcttgaagattggtggcacaaacgtgcagggaatgaccagtgagcaagttgcacaagttctaaggaactgtgggaattcagtcaggatgctcgttgctagagatccagctggtgacatttcagtcaccccccctgcccctgcagccttacctgttgccctgcctactgtagccagcaagggccctggttctgacagttctctttttgaaacttataatgttgagcttgtgagaaaagatgggcagagtcttggaattagaattgttggctatgttggaacatctcatacaggggaagcttcagggatttatgtgaaaagtataatacctggcagtgctgcgtaccacaatggccacattcaagtgaatgacaaaatagttgctgtcgatggcgtgaacattcagggttttgccaaccatgatgttgttgaagtattacgaaatgcagggcaggtggtacacctaaccctagttcgaaggaagacatcctcatctacttctccacttgaaccaccttcagacagaggaactgttgtagaaccactgaaaccaccagctctctttctaactggagcagtggaaactgaaactaatgtggatggtgaagatgaggaaattaaagaaagaattgatactttaaaaaatgacaacatacaagccttagaaaaattggaaaaagtcccagactctccagaaaatgagctgaaatccagatgggaaaacctgttgggtcctgattatgaagtaatggttgctactttggacacacagattgcagatgatgctgagttacagaaatattcaaagctgctgcctattcacactctgaggcttggtgtggaagtggattcctttgatgggcaccattatatttcttcaattgtttctggtggtcctgttgatacattgggtctcctacagccagaagatgagctgcttgaggtcaatggcatgcagctttatggaaaatctcgccgagaagcagtctcctttcttaaagaagtgccacccccttttactttggtttgctgtcggaggttgtttgatgatgaagcttctgtagatgaaccaaggcgcactgaaacctctcttcctgagacagaggttgaccacaatatggatgtcaatactgaagaagatgatgatggggaattagcactgtggtcccctgaagtcaagattgttgaactagtaaaagattgtaaaggtttgggattcagcattttggattaccaggaccctttagatcctacaagatcagtgattgtgatccgctccctggtagcagatggtgtagcagaaagaagtgggggactattacctggagaccgcctggtctcagtcaatgaatactgtttggacaacacctcacttgctgaagctgtggaaatattgaaagctgtgccaccaggcctagtacaccttggcatctgtaagcctttggtggaagataatgaagaagaaagttgttatattttacattcaagcagtaatgaagacaagactgaattttcaggaacaattcatgatataaattcatctttaatactcgaagcacccaagggatttagagatgaaccatattttaaagaagaacttgtggatgaaccatttctagatctgggaaagtctttccattcccaacaaaaagagatagagcaaagcaaggaggcctgggagatgcatgaatttctgactcctagattgcaggaaatggatgaagaaagagaaattcttgttgatgaagaatatgagttatatcaagatccctcaccatccatggagttgtatcccttgtcgcacattcaagaggccactcctgtgccctctgtgaatgaacttcactttggtacacagtggttgcatgataatgaaccatccgagtctcaagaggcaagaaccgggaggactgtctattcccaggaggcacagccgtatggctattgccctgaaaatgtgatgaaagaaaattttgtcatggagtccctaccatctgtaccatcaactgaaggaaacagtcaacaaggcagatttgacgacctggaaaatcttaattcattagcaaaaactagtctggatttaggcatgatcccgaatgatgtccaaggtcctagcttgctcattgaccttcctgttgtggctcaaaggagggagcaagaagatttgcctttatatcaacaccaagcgacacgagttatttccaaggcctcagcatacacaggaatgttgtcttctagatatgccactgatacatgtgagttacctgagagagaagaaggcgaaggagaagaaactccaaattttagccactggggtccaccgagaattgttgagatttttagagaacccaatgtgtctcttgggatcagtattgttggtggacaaactgttataaaacgtctaaagaatggagaggagcttaaaggtatattcatcaaacaagttttagaagacagtccagcagggaagacgaacgcacttaaaactggagataaaatacttgaggtgtctggagtagatttgcagaatgcctcacacagcgaagcagttgaggccattaagaatgcaggaaaccctgtggtgttcattgttcagagtttgtcatccactccagcctgggtgacagagcaagactctgtctcgaaaaagaaaaaaaaccatgaaggatgagtactagagtcagtaatagaagtagttcagcattatttaactacaacacaatgctgcaaatatttcacagtaattatcaaaatttaatgggctctaatttaaaatgttatttaataagtatagattttaattgagaattatctttgagtagatgtaatcacaaagtgcattaactcttgttggaatattttatggctattccaaagtatagagtgcctaaattttgtgttgaaaatgtctttcatgacggtattaagttttctgaaattacacatggcttttaaaatttctaatgtatccaagatgtgcaatgttgttaggatctcattcttcagtgcatgaaaagctactaccctcagaacattttgtgttaattgtacctgcaagaacacctcaggcaagccaagaagaaatgaaacccaaataaaacttgaaaatgcaccttaaaaatatatatacatataatagttttgaaatgggattctgctttattttgatggaatggccattaaatacacattttgag

SEQ ID NO: 14272 - DNA, 679 bp, Homo sapiens
  source 1..679: mol_type = unassigned DNA
gaggagtctgtggtgaggatttgagctgcgtccagcattggatatttgtcaggaatgcagataccctgaagggaacacaacaatggtccaagggggtttcccagaaaaaatcagacaaagatatgcagatctgcctggagaactgcacattattgaacttgaaaaagataagaatggacttggactcagccttgctggtaataaagaccgatcacgcatgagcatatttgtggtgggaattaacccggaaggacctgctgccgcagatggacgaatgcgtattggagatgaactcttagagataaacaatcagattctgtatggaagaagtcaccaaaatgcatctgccattattaagactgccccatcaaaggtcaagctggttttcatcagaaacgaggatgcagtcaatcagatggccgttactccctttccagtgccatcaagttctccatcttctattgaggatcagagcggcaccgaacctattagtagtgaggaagatggcagcgtcgaagttggtattaaacaattgcctgaaagtgaaagcttcaaactggctgtcagccagatgaaacagcaaaaatatccaacaaaagtctccttcagttcacaagagataccattagcaccagcttcatcataccattcaacagatgcagacttcacaggctatggt

SEQ ID NO: 14273 - DNA, 8595 bp, Homo sapiens
  source 1..8595: mol_type = unassigned DNA
ctcacttccgcccaggtgaggcagggccgacaccgagcccgcccgacccgggctcccacctgctcctccagcgcaccaggtgtctttaagagtgattgaagagaataattcaaaatgcctgaaaatcctgctacagataaactgcaggtgctgcaggtacttgatcgcctgaaaatgaaattgcaggagaagggtgacacgtcgcagaatgagaagttatctatgttttatgagacactaaagagtcctctcttcaaccagatactcacacttcagcagtccatcaagcaactgaagggtcaactcaaccatataccctcagattgttcagccaactttgatttttctaggaaaggtttgttagtgttcacagatggttccatcactaatggaaatgtccacaggccctctaataactcgactgtatctgggttatttccgtggaccccgaagttgggaaatgaagactttaactcagtcattcaacagatggctcagggccggcaaattgaatatatagatatagaacggccttcaactggaggccttggattcagtgtggtggccctcagaagtcaaaatctcggaaaagttgatatcttcgtgaaggatgtccagccagggagtgtagcagacagggatcaaagattaaaggaaaatgatcaaatattggccattaatcacacgccattggatcagaacatttcccatcagcaagcaattgcattattacaacaaaccactggatctttgagactgattgtggccagggaaccagtccacacaaaaagcagtacttctagcagcctaaatgatacaactctgcctgaaacagtttgttggggccatgttgaagaggttgagctcattaatgatggctctggactaggttttggaatagttggaggaaaaacaagtggcgtggttgtgaggactatagttcctggaggattagcagatcgagatggaagactccagacaggggaccacatcttgaagattggtggcacaaacgtgcagggaatgaccagtgagcaagttgcacaagttctaaggaactgtgggaattcagtcaggatgctcgttgctagagatccagctggtgacatttcagtcaccccccctgcccctgcagccttacctgttgccctgcctactgtagccagcaagggccctggttctgacagttctctttttgaaacttataatgttgagcttgtgagaaaagatgggcagagtcttggaattagaattgttggctatgttggaacatctcatacaggggaagcttcagggatttatgtgaaaagtataatacctggcagtgctgcgtaccacaatggccacattcaagtgaatgacaaaatagttgctgtcgatggcgtgaacattcagggttttgccaaccatgatgttgttgaagtattacgaaatgcagggcaggtggtacacctaaccctagttcgaaggaagacatcctcatctacttctccacttgaaccaccttcagacagaggaactgttgtagaaccactgaaaccaccagctctctttctaactggagcagtggaaactgaaactaatgtggatggtgaagatgaggaaattaaagaaagaattgatactttaaaaaatgacaacatacaagccttagaaaaattggaaaaagtcccagactctccagaaaatgagctgaaatccagatgggaaaacctgttgggtcctgattatgaagtaatggttgctactttggacacacagattgcagatgatgctgagttacagaaatattcaaagctgctgcctattcacactctgaggcttggtgtggaagtggattcctttgatgggcaccattatatttcttcaattgtttctggtggtcctgttgatacattgggtctcctacagccagaagatgagctgcttgaggtcaatggcatgcagctttatggaaaatctcgccgagaagcagtctcctttcttaaagaagtgccacccccttttactttggtttgctgtcggaggttgtttgatgatgaagcttctgtagatgaaccaaggcgcactgaaacctctcttcctgagacagaggttgaccacaatatggatgtcaatactgaagaagatgatgatggggaattagcactgtggtcccctgaagtcaagattgttgaactagtaaaagattgtaaaggtttgggattcagcattttggattaccaggaccctttagatcctacaagatcagtgattgtgatccgctccctggtagcagatggtgtagcagaaagaagtgggggactattacctggagaccgcctggtctcagtcaatgaatactgtttggacaacacctcacttgctgaagctgtggaaatattgaaagctgtgccaccaggcctagtacaccttggcatctgtaagcctttggtggaagataatgaagaagaaagttgttatattttacattcaagcagtaatgaagacaagactgaattttcaggaacaattcatgatataaattcatctttaatactcgaagcacccaagggatttagagatgaaccatattttaaagaagaacttgtggatgaaccatttctagatctgggaaagtctttccattcccaacaaaaagagatagagcaaagcaaggaggcctgggagatgcatgaatttctgactcctagattgcaggaaatggatgaagaaagagaaattcttgttgatgaagaatatgagttatatcaagatccctcaccatccatggagttgtatcccttgtcgcacattcaagaggccactcctgtgccctctgtgaatgaacttcactttggtacacagtggttgcatgataatgaaccatccgagtctcaagaggcaagaaccgggaggactgtctattcccaggaggcacagccgtatggctattgccctgaaaatgtgatgaaagaaaattttgtcatggagtccctaccatctgtaccatcaactgaaggaaacagtcaacaaggcagatttgacgacctggaaaatcttaattcattagcaaaaactagtctggatttaggcatgatcccgaatgatgtccaaggtcctagcttgctcattgaccttcctgttgtggctcaaaggagggagcaagaagatttgcctttatatcaacaccaagcgacacgagttatttccaaggcctcagcatacacaggaatgttgtcttctagatatgccactgatacatgtgagttacctgagagagaagaaggcgaaggagaagaaactccaaattttagccactggggtccaccgagaattgttgagatttttagagaacccaatgtgtctcttgggatcagtattgttggtggacaaactgttataaaacgtctaaagaatggagaggagcttaaaggtatattcatcaaacaagttttagaagacagtccagcagggaagacgaacgcacttaaaactggagataaaatacttgaggtgtctggagtagatttgcagaatgcctcacacagcgaagcagttgaggccattaagaatgcaggaaaccctgtggtgttcattgttcagagtttgtcatccactccacgagtcattcctaacgtacataacaaggccaacaaaatcaccggtaaccagaaccaggacacccaagaaaagaaagaaaagaggcaaggaactgctccaccgccaatgaaacttcctcctccttataaagctctgactgatgacagtgatgaaaatgaagaagaagatgcctttaccgaccaaaaaatcagacaaagatatgcagatctgcctggagaactgcacattattgaacttgaaaaagataagaatggacttggactcagccttgctggtaataaagaccgatcacgcatgagcatatttgtggtgggaattaacccggaaggacctgctgccgcagatggacgaatgcgtattggagatgaactcttagagataaacaatcagattctgtatggaagaagtcaccaaaatgcatctgccattattaagactgccccatcaaaggtcaagctggttttcatcagaaacgaggatgcagtcaatcagatggccgttactccctttccagtgccatcaagttctccatcttctattgaggatcagagcggcaccgaacctattagtagtgaggaagatggcagcgtcgaagttggtattaaacaattgcctgaaagtgaaagcttcaaactggctgtcagccagatgaaacagcaaaaatatccaacaaaagtctccttcagttcacaagagataccattagcaccagcttcatcataccattcaacagatgcagacttcacaggctatggtggtttccaggctcctctgtcagtggaccccgcaacgtgtcccattgtccctggacaggaaatgattatagaaatatccaagggacgttcagggcttggtctcagcattgtgggaggaaaagacacacccttgttctggaggctgggaagtccaagagcatggagccagcatctggtgagggccttcatgctgcatcatcctgtgacagaagttgaagggcaaaatgctatagttatccatgaagtctatgaagaaggggcagcagccagagatggaagactttgggctggtgaccagatattagaggttaatggggttgacctgaggaactccagccacgaagaagccatcacagccctgaggcagaccccccagaaggtgcggctggtggtgtatagagatgaggcacactaccgggatgaggagaacttggagattttccctgtggatctgcagaagaaagctggccggggcctgggcctgagcatcgttgggaaacgaaatggaagcggagtgtttatttctgacatcgtgaaaggcggagccgcagacctggatgggagattgattcagggagatcagatcttatctgtgaatggggaggacatgagaaatgcctcacaggagacagtggccaccatcctcaagtgtgcacagggacttgtgcagctagagattggaagactccgagctggttcctggacctccgcaaggacgacatcacagaacagtcagggtagtcagcagagtgcacacagcagctgtcatccctccttcgctcctgtcatcactggcctgcaaaacctggttggcacaaaaagagtttcagatccttcccagaaaaattcaggcacagatatggaaccaaggactgttgagataaacagggagctcagtgatgcccttggaatcagtattgctggaggaagaggaagtcccttaggagatatccccgtatttattgccatgattcaggctagcggagtggccgcacggacacagaagcttaaagttggagatcggattgtcagcattaacgggcaacctttggatgggctgtctcacgcggatgtggttaatctgctgaagaacgcctacgggcgcattatcctgcaggttgtagcagataccaatataagcgccatagcagctcagcttgaaaacatgtctacaggctaccaccttggttcgcccactgctgaacaccatccagaagacacagaggagcagctgcagatgacggccgattaaaacgaggggatcagattttagctgttaatggcgagaccctggaaggtgttactcatgagcaagcagtcgccattctaaaacaccagagagggactgtaaccttaactgtgctgtcatgagcctcgggcctgatcacaagatagatgttgttgtttagaatatccacaggcagatgaagttctgagtgggtatgaaaagcaccctcaactaaaatgcaccttcattcttatttcttgccctctctgctcaggagaaatggctgaggtttcatgtgaatttcccaaatcaacaatcatctcctaatgtttcccagttcctgtcacctgttggcgaggttgatttctaaaacttaaatgagtctacctgttttgcatttaatttcagtgttccgatttctttttttttttttttttttttttttgagacggagtctcactctgtcacccaggctggagtgcaatggcgcaatcttggctcactgcaacctcggcctcccaggttggagcgattctcctgcctcagcctcccgagtagctgggattacaggcatgcatcaccacactgggtttatttttgtttttttagtagagatggagcttccccatgtgggccaggctggtcttgaacttctgacctcaggtgatctgcctgccttggcctcccaaagtgctgggattccaggcgtgagccactgcgcccagcccagtattctgattttaaccaactggttctgattatatttaccaaaactggagttaacttctctttccttatactcttctctccctatcccctactcacaccgaggcttaacagcaacctcagatctcatccaatggacagaaacaaatgttaagcaacttgtcatctcactcatgatttacttatgctaattgtctcttcaagtaagcaagaaaacattagcagtgtaattaatttaccagtgatccccaagatgaaataccagattctcctatgggaaattactgtgctgtcttctgtatgacttatggtcaaataagtctcaaattcatttctctggatagatctttatatgctagtcattggtgattttgatgagtcaatttacagactgtaatcttctaaaaattctgaaagactaattgttttctgtgccatataaatgcataccactgagcaaatgaaccttattctcagcaggaacaactagcatacatgttctgaattctaacagtgctaaattacattcaagtccaggaagatcacctggaattaatggcatttcagttggcaggcatcattcccacccctcggtcttaggaaaaggaggtagaagccccagaaccacacggcagagatcagcaagttttgtctcaagtcagacaaggtctaggtggccttggccttatgcaaagtgggtgacatatttgattatatttccctttacctccatagtagtcaggccagcagcatggactgcaagaacctaagggagcaacatacttagctgcaaagtgagcaaatgaattgagcctaggaatatgtgatgaaaatgcatggctgatgtttcctgatctccaaggagactcccatttgctgaagttttgcatgctaagaaatcaactacagcagaaaatacaagaatacctttaagttgattattggcaatcttattcatatattagcaagaaaaagggagagatgcttactggtggatgctatagagtcctctgtttttaaaagtaccatggccgggtgcagtggctcacgcctgtaatcccagcactttgggaggccagggcaggcgaatcatgaggtcaggagttcgagaccagcctggccaatatggtgaaaccctgtctctactaaaaatacaaaaattagctgggtgcagtggcaggcgcctgtaatcccagctactccggaggttgaagcaggaaaattgcttgaacctgggaggtggaggttgcagtgagccaagttcgtgccactccactccagcctgggtgacagagcaagactctgtctcgaaaaagaaaaaaaaccatgaaggatgagtactagagtcagtaatagaagtagttcagcattatttaactacaacacaatgctgcaaatatttcacagtaattatcaaaatttaatgggctctaatttaaaatgttatttaataagtatagattttaattgagaattatctttgagtagatgtaatcacaaagtgcattaactcttgttggaatattttatggctattccaaagtatagagtgcctaaattttgtgttgaaaatgtctttcatgacggtattaagttttctgaaattacacatggcttttaaaatttctaatgtatccaagatgtgcaatgttgttaggatctcattcttcagtgcatgaaaagctactaccctcagaacattttgtgttaattgtacctgcaagaacacctcaggcaagccaagaagaaatgaaacccaaataaaacttgaaaatgcaccttaaaaatatatatacatataatagttttgaaatgggattctgctttattttgatggaatggccattaaatacacattttgagataatacattgttgtggtgtttctttatacattatccttttaggtcgtgctagtaaaagtatattgatgaaggaattatgatgctttatacttcttactgcactaaattgatagaactagtacttgtcataatcggttctgtctccgctcacatgactaatacgtaattgcctttccaaaaagatatttttgcctcagaacttactgacaagctgagaggctatgaagatggaaatttgtgaaagaagtagtgctcttatatttggcctcatcatttgggccatttcagtatagtaatgatatcactaatcggaattagcatgagagggaagtaagccaggaagaataaaactgctgaatgtttgtatgtgtaagatatttccaaagattctaaataaatgtagttgcctacagagcaaa

SEQ ID NO: 14274 - DNA, 8505 bp, Homo sapiens
  source 1..8505: mol_type = unassigned DNA
ctcacttccgcccaggtgaggcagggccgacaccgagcccgcccgacccgggctcccacctgctcctccagcgcaccaggtgtctttaagagtgattgaagagaataattcaaaatgcctgaaaatcctgctacagataaactgcaggtgctgcaggtacttgatcgcctgaaaatgaaattgcaggagaagggtgacacgtcgcagaatgagaagttatctatgttttatgagacactaaagagtcctctcttcaaccagatactcacacttcagcagtccatcaagcaactgaagggtcaactcaaccatataccctcagattgttcagccaactttgatttttctaggaaaggtttgttagtgttcacagatggttccatcactaatggaaatgtccacaggccctctaataactcgactgtatctgggttatttccgtggaccccgaagttgggaaatgaagactttaactcagtcattcaacagatggctcagggccggcaaattgaatatatagatatagaacggccttcaactggaggccttggattcagtgtggtggccctcagaagtcaaaatctcggaaaagttgatatcttcgtgaaggatgtccagccagggagtgtagcagacagggatcaaagattaaaggaaaatgatcaaatattggccattaatcacacgccattggatcagaacatttcccatcagcaagcaattgcattattacaacaaaccactggatctttgagactgattgtggccagggaaccagtccacacaaaaagcagtacttctagcagcctaaatgatacaactctgcctgaaacagtttgttggggccatgttgaagaggttgagctcattaatgatggctctggactaggttttggaatagttggaggaaaaacaagtggcgtggttgtgaggactatagttcctggaggattagcagatcgagatggaagactccagacaggggaccacatcttgaagattggtggcacaaacgtgcagggaatgaccagtgagcaagttgcacaagttctaaggaactgtgggaattcagtcaggatgctcgttgctagagatccagctggtgacatttcagtcaccccccctgcccctgcagccttacctgttgccctgcctactgtagccagcaagggccctggttctgacagttctctttttgaaacttataatgttgagcttgtgagaaaagatgggcagagtcttggaattagaattgttggctatgttggaacatctcatacaggggaagcttcagggatttatgtgaaaagtataatacctggcagtgctgcgtaccacaatggccacattcaagtgaatgacaaaatagttgctgtcgatggcgtgaacattcagggttttgccaaccatgatgttgttgaagtattacgaaatgcagggcaggtggtacacctaaccctagttcgaaggaagacatcctcatctacttctccacttgaaccaccttcagacagaggaactgttgtagaaccactgaaaccaccagctctctttctaactggagcagtggaaactgaaactaatgtggatggtgaagatgaggaaattaaagaaagaattgatactttaaaaaatgacaacatacaagccttagaaaaattggaaaaagtcccagactctccagaaaatgagctgaaatccagatgggaaaacctgttgggtcctgattatgaagtaatggttgctactttggacacacagattgcagatgatgctgagttacagaaatattcaaagctgctgcctattcacactctgaggcttggtgtggaagtggattcctttgatgggcaccattatatttcttcaattgtttctggtggtcctgttgatacattgggtctcctacagccagaagatgagctgcttgaggtcaatggcatgcagctttatggaaaatctcgccgagaagcagtctcctttcttaaagaagtgccacccccttttactttggtttgctgtcggaggttgtttgatgatgaagcttctgtagatgaaccaaggcgcactgaaacctctcttcctgagacagaggttgaccacaatatggatgtcaatactgaagaagatgatgatggggaattagcactgtggtcccctgaagtcaagattgttgaactagtaaaagattgtaaaggtttgggattcagcattttggattaccaggaccctttagatcctacaagatcagtgattgtgatccgctccctggtagcagatggtgtagcagaaagaagtgggggactattacctggagaccgcctggtctcagtcaatgaatactgtttggacaacacctcacttgctgaagctgtggaaatattgaaagctgtgccaccaggcctagtacaccttggcatctgtaagcctttggtggaagataatgaagaagaaagttgttatattttacattcaagcagtaatgaagacaagactgaattttcaggaacaattcatgatataaattcatctttaatactcgaagcacccaagggatttagagatgaaccatattttaaagaagaacttgtggatgaaccatttctagatctgggaaagtctttccattcccaacaaaaagagatagagcaaagcaaggaggcctgggagatgcatgaatttctgactcctagattgcaggaaatggatgaagaaagagaaattcttgttgatgaagaatatgagttatatcaagatccctcaccatccatggagttgtatcccttgtcgcacattcaagaggccactcctgtgccctctgtgaatgaacttcactttggtacacagtggttgcatgataatgaaccatccgagtctcaagaggcaagaaccgggaggactgtctattcccaggaggcacagccgtatggctattgccctgaaaatgtgatgaaagaaaattttgtcatggagtccctaccatctgtaccatcaactgaaggaaacagtcaacaaggcagatttgacgacctggaaaatcttaattcattagcaaaaactagtctggatttaggcatgatcccgaatgatgtccaaggtcctagcttgctcattgaccttcctgttgtggctcaaaggagggagcaagaagatttgcctttatatcaacaccaagcgacacgagttatttccaaggcctcagcatacacaggaatgttgtcttctagatatgccactgatacatgtgagttacctgagagagaagaaggcgaaggagaagaaactccaaattttagccactggggtccaccgagaattgttgagatttttagagaacccaatgtgtctcttgggatcagtattgttggtggacaaactgttataaaacgtctaaagaatggagaggagcttaaaggtatattcatcaaacaagttttagaagacagtccagcagggaagacgaacgcacttaaaactggagataaaatacttgaggtgtctggagtagatttgcagaatgcctcacacagcgaagcagttgaggccattaagaatgcaggaaaccctgtggtgttcattgttcagagtttgtcatccactccacgagtcattcctaacgtacataacaaggccaacaaaatcaccggtaaccagaaccaggacacccaagaaaagaaagaaaagaggcaaggaactgctccaccgccaatgaaacttcctcctccttataaagctctgactgatgacagtgatgaaaatgaagaagaagatgcctttaccgaccaaaaaatcagacaaagatatgcagatctgcctggagaactgcacattattgaacttgaaaaagataagaatggacttggactcagccttgctggtaataaagaccgatcacgcatgagcatatttgtggtgggaattaacccggaaggacctgctgccgcagatggacgaatgcgtattggagatgaactcttagagataaacaatcagattctgtatggaagaagtcaccaaaatgcatctgccattattaagactgccccatcaaaggtcaagctggttttcatcagaaacgaggatgcagtcaatcagatggccgttactccctttccagtgccatcaagttctccatcttctattgaggatcagagcggcaccgaacctattagtagtgaggaagatggcagcgtcgaagttggtattaaacaattgcctgaaagtgaaagcttcaaactggctgtcagccagatgaaacagcaaaaatatccaacaaaagtctccttcagttcacaagagataccattagcaccagcttcatcataccattcaacagatgcagacttcacaggctatggtggtttccaggctcctctgtcagtggaccccgcaacgtgtcccattgtccctggacaggaaatgattatagaaatatccaagggacgttcagggcttggtctcagcattgtgggaggaaaagacacacccttgaatgctatagttatccatgaagtctatgaagaaggggcagcagccagagatggaagactttgggctggtgaccagatattagaggttaatggggttgacctgaggaactccagccacgaagaagccatcacagccctgaggcagaccccccagaaggtgcggctggtggtgtatagagatgaggcacactaccgggatgaggagaacttggagattttccctgtggatctgcagaagaaagctggccggggcctgggcctgagcatcgttgggaaacgaaatggaagcggagtgtttatttctgacatcgtgaaaggcggagccgcagacctggatgggagattgattcagggagatcagatcttatctgtgaatggggaggacatgagaaatgcctcacaggagacagtggccaccatcctcaagtgtgcacagggacttgtgcagctagagattggaagactccgagctggttcctggacctccgcaaggacgacatcacagaacagtcagggtagtcagcagagtgcacacagcagctgtcatccctccttcgctcctgtcatcactggcctgcaaaacctggttggcacaaaaagagtttcagatccttcccagaaaaattcaggcacagatatggaaccaaggactgttgagataaacagggagctcagtgatgcccttggaatcagtattgctggaggaagaggaagtcccttaggagatatccccgtatttattgccatgattcaggctagcggagtggccgcacggacacagaagcttaaagttggagatcggattgtcagcattaacgggcaacctttggatgggctgtctcacgcggatgtggttaatctgctgaagaacgcctacgggcgcattatcctgcaggttgtagcagataccaatataagcgccatagcagctcagcttgaaaacatgtctacaggctaccaccttggttcgcccactgctgaacaccatccagaagacacagaggagcagctgcagatgacggccgattaaaacgaggggatcagattttagctgttaatggcgagaccctggaaggtgttactcatgagcaagcagtcgccattctaaaacaccagagagggactgtaaccttaactgtgctgtcatgagcctcgggcctgatcacaagatagatgttgttgtttagaatatccacaggcagatgaagttctgagtgggtatgaaaagcaccctcaactaaaatgcaccttcattcttatttcttgccctctctgctcaggagaaatggctgaggtttcatgtgaatttcccaaatcaacaatcatctcctaatgtttcccagttcctgtcacctgttggcgaggttgatttctaaaacttaaatgagtctacctgttttgcatttaatttcagtgttccgatttctttttttttttttttttttttttttgagacggagtctcactctgtcacccaggctggagtgcaatggcgcaatcttggctcactgcaacctcggcctcccaggttggagcgattctcctgcctcagcctcccgagtagctgggattacaggcatgcatcaccacactgggtttatttttgtttttttagtagagatggagcttccccatgtgggccaggctggtcttgaacttctgacctcaggtgatctgcctgccttggcctcccaaagtgctgggattccaggcgtgagccactgcgcccagcccagtattctgattttaaccaactggttctgattatatttaccaaaactggagttaacttctctttccttatactcttctctccctatcccctactcacaccgaggcttaacagcaacctcagatctcatccaatggacagaaacaaatgttaagcaacttgtcatctcactcatgatttacttatgctaattgtctcttcaagtaagcaagaaaacattagcagtgtaattaatttaccagtgatccccaagatgaaataccagattctcctatgggaaattactgtgctgtcttctgtatgacttatggtcaaataagtctcaaattcatttctctggatagatctttatatgctagtcattggtgattttgatgagtcaatttacagactgtaatcttctaaaaattctgaaagactaattgttttctgtgccatataaatgcataccactgagcaaatgaaccttattctcagcaggaacaactagcatacatgttctgaattctaacagtgctaaattacattcaagtccaggaagatcacctggaattaatggcatttcagttggcaggcatcattcccacccctcggtcttaggaaaaggaggtagaagccccagaaccacacggcagagatcagcaagttttgtctcaagtcagacaaggtctaggtggccttggccttatgcaaagtgggtgacatatttgattatatttccctttacctccatagtagtcaggccagcagcatggactgcaagaacctaagggagcaacatacttagctgcaaagtgagcaaatgaattgagcctaggaatatgtgatgaaaatgcatggctgatgtttcctgatctccaaggagactcccatttgctgaagttttgcatgctaagaaatcaactacagcagaaaatacaagaatacctttaagttgattattggcaatcttattcatatattagcaagaaaaagggagagatgcttactggtggatgctatagagtcctctgtttttaaaagtaccatggccgggtgcagtggctcacgcctgtaatcccagcactttgggaggccagggcaggcgaatcatgaggtcaggagttcgagaccagcctggccaatatggtgaaaccctgtctctactaaaaatacaaaaattagctgggtgcagtggcaggcgcctgtaatcccagctactccggaggttgaagcaggaaaattgcttgaacctgggaggtggaggttgcagtgagccaagttcgtgccactccactccagcctgggtgacagagcaagactctgtctcgaaaaagaaaaaaaaccatgaaggatgagtactagagtcagtaatagaagtagttcagcattatttaactacaacacaatgctgcaaatatttcacagtaattatcaaaatttaatgggctctaatttaaaatgttatttaataagtatagattttaattgagaattatctttgagtagatgtaatcacaaagtgcattaactcttgttggaatattttatggctattccaaagtatagagtgcctaaattttgtgttgaaaatgtctttcatgacggtattaagttttctgaaattacacatggcttttaaaatttctaatgtatccaagatgtgcaatgttgttaggatctcattcttcagtgcatgaaaagctactaccctcagaacattttgtgttaattgtacctgcaagaacacctcaggcaagccaagaagaaatgaaacccaaataaaacttgaaaatgcaccttaaaaatatatatacatataatagttttgaaatgggattctgctttattttgatggaatggccattaaatacacattttgagataatacattgttgtggtgtttctttatacattatccttttaggtcgtgctagtaaaagtatattgatgaaggaattatgatgctttatacttcttactgcactaaattgatagaactagtacttgtcataatcggttctgtctccgctcacatgactaatacgtaattgcctttccaaaaagatatttttgcctcagaacttactgacaagctgagaggctatgaagatggaaatttgtgaaagaagtagtgctcttatatttggcctcatcatttgggccatttcagtatagtaatgatatcactaatcggaattagcatgagagggaagtaagccaggaagaataaaactgctgaatgtttgtatgtgtaagatatttccaaagattctaaataaatgtagttgcctacagagcaaa

SEQ ID NO: 14275 - DNA, 8421 bp, Homo sapiens
  source 1..8421: mol_type = unassigned DNA
ctcacttccgcccaggtgaggcagggccgacaccgagcccgcccgacccgggctcccacctgctcctccagcgcaccaggtgtctttaagagtgattgaagagaataattcaaaatgcctgaaaatcctgctacagataaactgcaggtgctgcaggtacttgatcgcctgaaaatgaaattgcaggagaagggtgacacgtcgcagaatgagaagttatctatgttttatgagacactaaagagtcctctcttcaaccagatactcacacttcagcagtccatcaagcaactgaagggtcaactcaaccatataccctcagattgttcagccaactttgatttttctaggaaaggtttgttagtgttcacagatggttccatcactaatggaaatgtccacaggccctctaataactcgactgtatctgggttatttccgtggaccccgaagttgggaaatgaagactttaactcagtcattcaacagatggctcagggccggcaaattgaatatatagatatagaacggccttcaactggaggccttggattcagtgtggtggccctcagaagtcaaaatctcggaaaagttgatatcttcgtgaaggatgtccagccagggagtgtagcagacagggatcaaagattaaaggaaaatgatcaaatattggccattaatcacacgccattggatcagaacatttcccatcagcaagcaattgcattattacaacaaaccactggatctttgagactgattgtggccagggaaccagtccacacaaaaagcagtacttctagcagcctaaatgatacaactctgcctgaaacagtttgttggggccatgttgaagaggttgagctcattaatgatggctctggactaggttttggaatagttggaggaaaaacaagtggcgtggttgtgaggactatagttcctggaggattagcagatcgagatggaagactccagacaggggaccacatcttgaagattggtggcacaaacgtgcagggaatgaccagtgagcaagttgcacaagttctaaggaactgtgggaattcagtcaggatgctcgttgctagagatccagctggtgacatttcagtcaccccccctgcccctgcagccttacctgttgccctgcctactgtagccagcaagggccctggttctgacagttctctttttgaaacttataatgttgagcttgtgagaaaagatgggcagagtcttggaattagaattgttggctatgttggaacatctcatacaggggaagcttcagggatttatgtgaaaagtataatacctggcagtgctgcgtaccacaatggccacattcaagtgaatgacaaaatagttgctgtcgatggcgtgaacattcagggttttgccaaccatgatgttgttgaagtattacgaaatgcagggcaggtggtacacctaaccctagttcgaaggaagacatcctcatctacttctccacttgaaccaccttcagacagaggaactgttgtagaaccactgaaaccaccagctctctttctaactggagcagtggaaactgaaactaatgtggatggtgaagatgaggaaattaaagaaagaattgatactttaaaaaatgacaacatacaagccttagaaaaattggaaaaagtcccagactctccagaaaatgagctgaaatccagatgggaaaacctgttgggtcctgattatgaagtaatggttgctactttggacacacagattgcagatgatgctgagttacagaaatattcaaagctgctgcctattcacactctgaggcttggtgtggaagtggattcctttgatgggcaccattatatttcttcaattgtttctggtggtcctgttgatacattgggtctcctacagccagaagatgagctgcttgaggtcaatggcatgcagctttatggaaaatctcgccgagaagcagtctcctttcttaaagaagtgccacccccttttactttggtttgctgtcggaggttgtttgatgatgaagcttctgtagatgaaccaaggcgcactgaaacctctcttcctgagacagaggttgaccacaatatggatgtcaatactgaagaagatgatgatggggaattagcactgtggtcccctgaagtcaagattgttgaactagtaaaagattgtaaaggtttgggattcagcattttggattaccaggaccctttagatcctacaagatcagtgattgtgatccgctccctggtagcagatggtgtagcagaaagaagtgggggactattacctggagaccgcctggtctcagtcaatgaatactgtttggacaacacctcacttgctgaagctgtggaaatattgaaagctgtgccaccaggcctagtacaccttggcatctgtaagcctttggtggaagataatgaagaagaaagttgttatattttacattcaagcagtaatgaagacaagactgaattttcaggaacaattcatgatataaattcatctttaatactcgaagcacccaagggatttagagatgaaccatattttaaagaagaacttgtggatgaaccatttctagatctgggaaagtctttccattcccaacaaaaagagatagagcaaagcaaggaggcctgggagatgcatgaatttctgactcctagattgcaggaaatggatgaagaaagagaaattcttgttgatgaagaatatgagttatatcaagatccctcaccatccatggagttgtatcccttgtcgcacattcaagaggccactcctgtgccctctgtgaatgaacttcactttggtacacagtggttgcatgataatgaaccatccgagtctcaagaggcaagaaccgggaggactgtctattcccaggaggcacagccgtatggctattgccctgaaaatgtgatgaaagaaaattttgtcatggagtccctaccatctgtaccatcaactgaaggaaacagtcaacaaggcagatttgacgacctggaaaatcttaattcattagcaaaaactagtctggatttaggcatgatcccgaatgatgtccaaggtcctagcttgctcattgaccttcctgttgtggctcaaaggagggagcaagaagatttgcctttatatcaacaccaagcgacacgagttatttccaaggcctcagcatacacaggaatgttgtcttctagatatgccactgatacatgtgagttacctgagagagaagaaggcgaaggagaagaaactccaaattttagccactggggtccaccgagaattgttgagatttttagagaacccaatgtgtctcttgggatcagtattgttggtggacaaactgttataaaacgtctaaagaatggagaggagcttaaaggtatattcatcaaacaagttttagaagacagtccagcagggaagacgaacgcacttaaaactggagataaaatacttgaggtgtctggagtagatttgcagaatgcctcacacagcgaagcagttgaggccattaagaatgcaggaaaccctgtggtgttcattgttcagagtttgtcatccactccacgagtcattcctaacgtacataacaaggccaacaaaatcaccggtaaccagaaccaggacacccaagaaaagaaagaaaagaggcaaggaactgctccaccgccaatgaaacttcctcctccttataaagctctgactgatgacagtgatgaaaatgaagaagaagatgcctttaccgaccaaaaaatcagacaaagatatgcagatctgcctggagaactgcacattattgaacttgaaaaagataagaatggacttggactcagccttgctggtaataaagaccgatcacgcatgagcatatttgtggtgggaattaacccggaaggacctgctgccgcagatggacgaatgcgtattggagatgaactcttagagataaacaatcagattctgtatggaagaagtcaccaaaatgcatctgccattattaagactgccccatcaaaggtcaagctggttttcatcagaaacgaggatgcagtcaatcagatggccgttactccctttccagtgccatcaagttctccatcttctattgaggatcagagcggcaccgaacctattagtagtgaggaagatggcagcgtcgaagttggtattaaacaattgcctgaaagtgaaagcttcaaactggctgtcagccagatgaaacagcaaaaatatccaacaaaagtctccttcagttcacaagagataccattagcaccagcttcatcataccattcaacagatgcagacttcacaggctatggtggtttccaggctcctctgtcagtggaccccgcaacgtgtcccattgtccctggacaggaaatgattatagaaatatccaagggacgttcagggcttggtctcagcattgtgggaggaaaagacacacccttggttaatggggttgacctgaggaactccagccacgaagaagccatcacagccctgaggcagaccccccagaaggtgcggctggtggtgtatagagatgaggcacactaccgggatgaggagaacttggagattttccctgtggatctgcagaagaaagctggccggggcctgggcctgagcatcgttgggaaacgaaatggaagcggagtgtttatttctgacatcgtgaaaggcggagccgcagacctggatgggagattgattcagggagatcagatcttatctgtgaatggggaggacatgagaaatgcctcacaggagacagtggccaccatcctcaagtgtgcacagggacttgtgcagctagagattggaagactccgagctggttcctggacctccgcaaggacgacatcacagaacagtcagggtagtcagcagagtgcacacagcagctgtcatccctccttcgctcctgtcatcactggcctgcaaaacctggttggcacaaaaagagtttcagatccttcccagaaaaattcaggcacagatatggaaccaaggactgttgagataaacagggagctcagtgatgcccttggaatcagtattgctggaggaagaggaagtcccttaggagatatccccgtatttattgccatgattcaggctagcggagtggccgcacggacacagaagcttaaagttggagatcggattgtcagcattaacgggcaacctttggatgggctgtctcacgcggatgtggttaatctgctgaagaacgcctacgggcgcattatcctgcaggttgtagcagataccaatataagcgccatagcagctcagcttgaaaacatgtctacaggctaccaccttggttcgcccactgctgaacaccatccagaagacacagaggagcagctgcagatgacggccgattaaaacgaggggatcagattttagctgttaatggcgagaccctggaaggtgttactcatgagcaagcagtcgccattctaaaacaccagagagggactgtaaccttaactgtgctgtcatgagcctcgggcctgatcacaagatagatgttgttgtttagaatatccacaggcagatgaagttctgagtgggtatgaaaagcaccctcaactaaaatgcaccttcattcttatttcttgccctctctgctcaggagaaatggctgaggtttcatgtgaatttcccaaatcaacaatcatctcctaatgtttcccagttcctgtcacctgttggcgaggttgatttctaaaacttaaatgagtctacctgttttgcatttaatttcagtgttccgatttctttttttttttttttttttttttttgagacggagtctcactctgtcacccaggctggagtgcaatggcgcaatcttggctcactgcaacctcggcctcccaggttggagcgattctcctgcctcagcctcccgagtagctgggattacaggcatgcatcaccacactgggtttatttttgtttttttagtagagatggagcttccccatgtgggccaggctggtcttgaacttctgacctcaggtgatctgcctgccttggcctcccaaagtgctgggattccaggcgtgagccactgcgcccagcccagtattctgattttaaccaactggttctgattatatttaccaaaactggagttaacttctctttccttatactcttctctccctatcccctactcacaccgaggcttaacagcaacctcagatctcatccaatggacagaaacaaatgttaagcaacttgtcatctcactcatgatttacttatgctaattgtctcttcaagtaagcaagaaaacattagcagtgtaattaatttaccagtgatccccaagatgaaataccagattctcctatgggaaattactgtgctgtcttctgtatgacttatggtcaaataagtctcaaattcatttctctggatagatctttatatgctagtcattggtgattttgatgagtcaatttacagactgtaatcttctaaaaattctgaaagactaattgttttctgtgccatataaatgcataccactgagcaaatgaaccttattctcagcaggaacaactagcatacatgttctgaattctaacagtgctaaattacattcaagtccaggaagatcacctggaattaatggcatttcagttggcaggcatcattcccacccctcggtcttaggaaaaggaggtagaagccccagaaccacacggcagagatcagcaagttttgtctcaagtcagacaaggtctaggtggccttggccttatgcaaagtgggtgacatatttgattatatttccctttacctccatagtagtcaggccagcagcatggactgcaagaacctaagggagcaacatacttagctgcaaagtgagcaaatgaattgagcctaggaatatgtgatgaaaatgcatggctgatgtttcctgatctccaaggagactcccatttgctgaagttttgcatgctaagaaatcaactacagcagaaaatacaagaatacctttaagttgattattggcaatcttattcatatattagcaagaaaaagggagagatgcttactggtggatgctatagagtcctctgtttttaaaagtaccatggccgggtgcagtggctcacgcctgtaatcccagcactttgggaggccagggcaggcgaatcatgaggtcaggagttcgagaccagcctggccaatatggtgaaaccctgtctctactaaaaatacaaaaattagctgggtgcagtggcaggcgcctgtaatcccagctactccggaggttgaagcaggaaaattgcttgaacctgggaggtggaggttgcagtgagccaagttcgtgccactccactccagcctgggtgacagagcaagactctgtctcgaaaaagaaaaaaaaccatgaaggatgagtactagagtcagtaatagaagtagttcagcattatttaactacaacacaatgctgcaaatatttcacagtaattatcaaaatttaatgggctctaatttaaaatgttatttaataagtatagattttaattgagaattatctttgagtagatgtaatcacaaagtgcattaactcttgttggaatattttatggctattccaaagtatagagtgcctaaattttgtgttgaaaatgtctttcatgacggtattaagttttctgaaattacacatggcttttaaaatttctaatgtatccaagatgtgcaatgttgttaggatctcattcttcagtgcatgaaaagctactaccctcagaacattttgtgttaattgtacctgcaagaacacctcaggcaagccaagaagaaatgaaacccaaataaaacttgaaaatgcaccttaaaaatatatatacatataatagttttgaaatgggattctgctttattttgatggaatggccattaaatacacattttgagataatacattgttgtggtgtttctttatacattatccttttaggtcgtgctagtaaaagtatattgatgaaggaattatgatgctttatacttcttactgcactaaattgatagaactagtacttgtcataatcggttctgtctccgctcacatgactaatacgtaattgcctttccaaaaagatatttttgcctcagaacttactgacaagctgagaggctatgaagatggaaatttgtgaaagaagtagtgctcttatatttggcctcatcatttgggccatttcagtatagtaatgatatcactaatcggaattagcatgagagggaagtaagccaggaagaataaaactgctgaatgtttgtatgtgtaagatatttccaaagattctaaataaatgtagttgcctacagagcaaa

SEQ ID NO: 14276 - DNA, 1526 bp, Homo sapiens
  source 1..1526: mol_type = unassigned DNA
agtctgtggtgaggatttgagctgcgtccagcattggatatttgtcaggaatgcagataccctgaagggaacacaacaatggtccaagggggtttcccagaaaaaatcagacaaagatatgcagatctgcctggagaactgcacattattgaacttgaaaaagataagaatggacttggactcagccttgctggtaataaagaccgatcacgcatgagcatatttgtggtgggaattaacccggaaggacctgctgccgcagatggacgaatgcgtattggagatgaactcttagagataaacaatcagattctgtatggaagaagtcaccaaaatgcatctgccattattaagactgccccatcaaaggtcaagctggttttcatcagaaacgaggatgcagtcaatcagatggccgttactccctttccagtgccatcaagttctccatcttctattgaggatcagagcggcaccgaacctattagtagtgaggaagatggcagcgtcgaagttggtattaaacaattgcctgaaagtgaaagcttcaaactggctgtcagccagatgaaacagcaaaaatatccaacaaaagtctccttcagttcacaagagataccattagcaccagcttcatcataccattcaacagatgcagacttcacaggctatggtggtttccaggctcctctgtcagtggaccccgcaacgtgtcccattgtccctggacaggaaatgattatagaaatatccaagggacgttcagggcttggtctcagcattgtgggaggaaaagacacacccttgttctggaggctgggaagtccaagagcatggagccagcatctggtgagggccttcatgctgcatcatcctgtgacagaagttgaagggcaaaatgctatagttatccatgaagtctatgaagaaggggcagcagccagagatggaagactttgggctggtgaccagatattagaggttaatggggttgacctgaggaactccagccacgaagaagccatcacagccctgaggcagaccccccagaaggtgcggctggtggtgtatagagatgaggcacactaccgggatgaggagaacttggagattttccctgtggatctgcagaagaaagctggccggggcctgggcctgagcatcgttgggaaacgaaatggaagcggagtgtttatttctgacatcgtgaaaggcggagccgcagacctggatgggagattgattcagggagatcagatcttatctgtgaatggggaggacatgagaaatgcctcacaggagacagtggccaccatcctcaagtgtgcacagggacttgtgcagctagagattggaagactccgagctggttcctggacctccgcaaggacgacatcacagaacagtcaggttgtcgatggcttctcatcagactgactcactcttctgcccccactgggagaaagttccccatttaataaatggttgtttggaaataatatctaatgtacagcatattcacagca

SEQ ID NO: 14277 - DNA, 959 bp, Homo sapiens
  source 1..959: mol_type = unassigned DNA
gcacacagcctgatggtttcctaagcaggtatgcagagagaagttccacgctatcagtcactaaaggaaccagaaaaaatcagacaaagatatgcagatctgcctggagaactgcacattattgaacttgaaaaagataagaatggacttggactcagccttgctggtaataaagaccgatcacgcatgagcatatttgtggtgggaattaacccggaaggacctgctgccgcagatggacgaatgcgtattggagatgaactcttagagaaacgaggatgcagtcaatcagatggccgttactccctttccagtgccatcaagttctccatcttctattgaggatcagagcggcaccgaacctattagtagtgaggaagatggcagcgtcgaagttggtattaaacaattgcctgaaagtgaaagcttcaaactggctgtcagccagatgaaacagcaaaaatatccaacaaaagtctccttcagttcacaagagataccattagcaccagcttcatcataccattcaacagatgcagacttcacaggctatggtggtttccaggctcctctgtcagtggaccccgcaacgtgtcccattgtccctggacaggaaatgattatagaaatatccaagggacgttcagggcttggtctcagcattgtgggaggaaaagacacacccttggttaatggggttgacctgaggaactccagccacgaagaagccatcacagccctgaggcagaccccccagaaggtgcggctggtggtgtatagagatgaggcacactaccgggatgaggagaacttggagattttccctgtggatctgcagaagaaagctggccggggcctgggcctgagcatcgttgggaaacggtaaagacgtgctgtgggagttgggatctgcctttttcatccagagctctgatgcctgtgaacactgaaagagaaag

SEQ ID NO: 14278 - DNA, 2019 bp, Homo sapiens
  source 1..2019: mol_type = unassigned DNA
atgtctcccgcccggctccggccccgactgcacttctgcctggtcctgttgctgctgctggtggtgccggcggcatggggctgcgggccgggtcgggtggtgggcagccgccggcgaccgccacgcaaactcgtgccgctcgcctacaagcagttcagccccaatgtgcccgagaagaccctgggcgccagcggacgctatgaaggcaagatcgctcgcagctccgagcgcttcaaggagctcacccccaattacaatccagacatcatcttcaaggacgaggagaacacaggcgccgaccgcctcatgacccagcgctgcaaggaccgcctgaactcgctggctatctcggtgatgaaccagtggcccggtgtgaagctgcgggtgaccgagggctgggacgaggacggccaccactcagaggagtccctgcattatgagggccgcgcggtggacatcaccacatcagaccgcgaccgcaataagtatggactgctggcgcgcttggcagtggaggccggctttgactgggtgtattacgagtcaaaggcccacgtgcattgctccgtcaagtccgagcactcggccgcagccaagacgggcggctgcttccctgccggagcccaggtacgcctggagagtggggcgcgtgtggccttgtcagccgtgaggccgggagaccgtgtgctggccatgggggaggatgggagccccaccttcagcgatgtgctcattttcctggaccgcgagcctcacaggctgagagccttccaggtcatcgagactcaggaccccccacgccgcctggcactcacacccgctcacctgctctttacggctgacaatcacacggagccggcagcccgcttccgggccacatttgccagccacgtgcagcctggccagtacgtgctggtggctggggtgccaggcctgcagcctgcccgcgtggcagctgtctctacacacgtggccctcggggcctacgccccgctcacaaagcatgggacactggtggtggaggatgtggtggcatcctgcttcgcggccgtggctgaccaccacctggctcagttggccttctggcccctgagactctttcacagcttggcatggggcagctggactccgggggagggtgtgcattggtacccccagctgctctaccgcctggggcgtctcctgctagaagagggcagcttccacccactgggcatgtccggggcagggagctgaaaggactccaccgctgccctcctggaactgctgtactgggtccagaagcctctcagccaggagggagctggccctggaagggacctgagctgggggacactggctcctgccatctcctctgccatgaagatacaccattgagacttgactgggcaacaccagcgtcccccacccccgtcgtggtgtagtcatagagctgcaagctgagctggcgaggggatggttgttgacccctctctcctagagaccttgaggctggcacggcgactcccaactcagcctgctctcactacgagttttcatactctgcctcccccattggggagggcccattccatccatcttaggcccctttgggtgggcttgcgcctcagttgatgctgctaaattccctgggagccagcatggatctggctggacccgatgctgtccagaactgggaaggccacaggggtggggcagccatcccggccattctgaggtatgacattcctccccggccacactcctcaagacacatccagagactgttgctgtctgtgggcagagttctgtgttctggccaatgtgaccgtagtgccggggactgggggaggtgggttggatgtgcttgccacccccccggctaagctcccccttctgctgaaccatgatccccaccccctccgccggtcagtctcccataccttatttattggagtggagggggaagcccatgggagaattttggggatgttttggtcttttcttccttttgtaataaaaattatttaagttgttaga

SEQ ID NO: 14279 - DNA, 2097 bp, Homo sapiens
  source 1..2097: mol_type = unassigned DNA
tgagaagggcaaatgctatcattggaaaaactgacaaaagtcccaataggaaaaataaggaagtggagagttactatgtttctaatttttcatgtgcttctatttttttcctacttcagagccattgactaatagttgagtataacacaggttgtgtttccgggctgctgaaacatgacactaatattttcaaagaactgtggaagcctaaaaggaagccaatgagaaataactaaatgagagtttaggactgcagccttcattttcattcaaagatttaaaagtttccataaagtaaaatgttcttctccggccacctgttttcatagttctgtgttttccttcaggcctttctggcttcctatatggcagtaagaaaatgatgtgcttaatgattacaaatttcatatggaatacgaactttcagtttgtacatatgatgcacagagatgcttttgtggttttattggttttcatattacaaacaaagaaactagaaaatgaaaccattccaaaagtggaagtaatttctcactgcccctgtgataaactgtggtcactggctgtggcagcaactattataagatgctctgaaaactcttcagacactgaggggcaccagaggagcagactacaagaatggcacacgctatggaaaactcctggacaatcagtaaagagtaccatattgatgaagaagtgggctttgctctgccaaatccacaggaaaatctacctgatttttataatgactggatgttcattgctaaacatctgcctgatctcatagagtctggccagcttcgagaaagagttgagaagttaaacatgctcagcattgatcatctcacagaccacaagtcacagcgccttgcacgtctagttctgggatgcatcaccatggcatatgtgtggggcaaaggtcatggagatgtccgtaaggtcttgccaagaaatattgctgttccttactgccaactctccaagaaactggaactgcctcctattttggtttatgcagactgtgtcttggcaaactggaagaaaaaggatcctaataagcccctgacttatgagaacatggacgttttgttctcatttcgtgatggagactgcagtaaaggattcttcctggtctctctattggtggaaatagcagctgcttctgcaatcaaagtaattcctactgtattcaaggcaatgcaaatgcaagaacgggacactttgctaaaggcgctgttggaaatagcttcttgcttggagaaagcccttcaagtgtttcaccaaatccacgatcatgtgaacccaaaagcatttttcagtgttcttcgcatatatttgtctggctggaaaggcaacccccagctatcagacggtctggtgtatgaagggttctgggaagacccaaaggagtttgcagggggcagtgcaggccaaagcagcgtctttcagtgctttgacgtcctgctgggcatccagcagactgctggtggaggacatgctgctcagttcctccaggacatgagaagatatatgccaccagctcacaggaacttcctgtgctcattagagtcaaatccctcagtccgtgagtttgtcctttcaaaaggtgatgctggcctgcgggaagcttatgacgcctgtgtgaaagctctggtctccctgaggagctaccatctgcaaatcgtgactaagtacatcctgattcctgcaagccagcagccaaaggagaataagacctctgaagacccttcaaaactggaagccaaaggaactggaggcactgatttaatgaatttcctgaagactgtaagaagtacaactgagaaatcccttttgaaggaaggttaatgtaacccaacaagagcacattttatcatagcagagacatctgtatgcattcctgtcattacccattgtaacagagccacaaactaatactatgcaatgttttaccaataatgcaatacaaaagacctcaaaatacctgtgcatttcttgtaggaaaacaacaaaaggtaattatgtgtaattatactagaagttttgtaatctgtatcttatcattggaataaaatgacattcaataaataaaaa

SEQ ID NO: 14280 - DNA, 612 bp, Homo sapiens
  source 1..612: mol_type = unassigned DNA
ttttctcctattaatctgctttgtcatttgattttcaatgaaccttcagagggcaaaaggaaagttttccctcagctccaacagttttggcccagtgaacaggacaaccaaaactgctctgctcttccgaaaattgcagtcagggaacctgggacccggcaagccagcagaaggaacacagttggagactctggttattttaccaaggctttgactgaaatgccatattttcagatgtgaccagacagctttaagaaactgaggttgatattatgaagcccataggagcttttggaaaaactggtctaatatcctaaatacacggttcacataatgggcttgtgacactgaggggcaccagaggagcagactacaagaatggcacacgctatggaaaactcctggacaatcagtaaagagtaccatattgatgaagaagtgggctttgctctgccaaatccacaggaaaatctacctgatttttataatgactggatgttcattgctaaacatctgcctgatctcatagagtctggccagcttcgagaaagagttgagaagttaaacatgctcagcattgatcatctcacagaccacaagtcacagcgcctt

SEQ ID NO: 14281 - DNA, 1138 bp, Homo sapiens
  source 1..1138: mol_type = unassigned DNA
gaacaggacaaccaaaactgctctgctcttccgaaaattgcagtcagggaacctgggacccggcaagccagcagaaggagccattgactaatagttgagtataacacaggttgtgtttccgggctgctgaaacatgacactaatattttcaaagaactgtggaagcctaaaaggaagccaatgagaaataactaaatgagagtttaggactgcagccttcattttcattcaaagatttaaaagtttccataaagtaaaatgttcttctccggccacctgttttcatagttctgtgttttccttcaggcctttctggcttcctatatggcagtaagaaaatgatgtgcttaatgattacaaatttcatatggaatacgaactttcagtttgtacatatgatgcacagagatgcttttgtggttttattggttttcatattacaaacaaagaaactagaaaatgaaaccattccaaaagtggaagtaatttctcactgcccctgtgataaactgtggtcactggctgtggcagcaactattataagatgctctgaaaactcttcagacactgaggggcaccagaggagcagactacaagaatggcacacgctatggaaaactcctggacaatcagtaaagagtaccatattgatgaagaagtgggctttgctctgccaaatccacaggaaaatctacctgatttttataatgactggatgttcattgctaaacatctgcctgatctcatagagtctggccagcttcgagaaagagttgagaagttaaacatgctcagcattgatcatctcacagaccacaagtcacagcgccttgcacgtctagttctgggatgcatcaccatggcatatgtgtggggcaaaggtcatggagatgtccgtaaggtcttgccaagaaatattgctgttccttactgccaactctccaagaaactggaactgcctcctattttggtttatgcagactgtgtcttggcaaactggaagaaaaaggatcctaataagcccctgacttatgagaacatggacgttttgttctcatttcgtgatggagactgcagtaaaggattcttcctggtctctctattggtggaaatagcagctgcttctgcaatcaaagta

SEQ ID NO: 14282 - DNA, 1709 bp, Homo sapiens
  source 1..1709: mol_type = unassigned DNA
aggacaaccaaaactgctctgctcttccgaaaattgcagtcagggaacctgggacccggcaagccagcagaaggaggaacgggcaacttggtttcttctttagcttccttgttctcattaagattgaacaatgcctctaaagtgaaccacagacttgcatgcaagctgaaaacctttaccaaatgcagtcttaatttgtactttgagaaaaacattttcaagacactgaggggcaccagaggagcagactacaagaatggcacacgctatggaaaactcctggacaatcagtaaagagtaccatattgatgaagaagtgggctttgctctgccaaatccacaggaaaatctacctgatttttataatgactggatgttcattgctaaacatctgcctgatctcatagagtctggccagcttcgagaaagagttgagaagttaaacatgctcagcattgatcatctcacagaccacaagtcacagcgccttgcacgtctagttctgggatgcatcaccatggcatatgtgtggggcaaaggtcatggagatgtccgtaaggtcttgccaagaaatattgctgttccttactgccaactctccaagaaactggaactgcctcctattttggtttatgcagactgtgtcttggcaaactggaagaaaaaggatcctaataagcccctgacttatgagaacatggacgttttgttctcatttcgtgatggagactgcagtaaaggattcttcctggtctctctattggtggaaatagcagctgcttctgcaatcaaagtaattcctactgtattcaaggcaatgcaaatgcaagaacgggacactttgctaaaggcgctgttggaaatagcttcttgcttggagaaagcccttcaagtgtttcaccaaatccacgatcatgtgaacccaaaagcatttttcagtgttcttcgcatatatttgtctggctggaaaggcaacccccagctatcagacggtctggtgtatgaagggttctgggaagacccaaaggagtttgcagggggcagtgcaggccaaagcagcgtctttcagtgctttgacgtcctgctgggcatccagcagactgctggtggaggacatgctgctcagttcctccaggacatgagaagatatatgccaccagctcacaggaacttcctgtgctcattagagtcaaatccctcagtccgtgagtttgtcctttcaaaaggtgatgctggcctgcgggaagcttatgacgcctgtgtgaaagctctggtctccctgaggagctaccatctgcaaatcgtgactaagtacatcctgattcctgcaagccagcagccaaaggagaataagacctctgaagacccttcaaaactggaagccaaaggaactggaggcactgatttaatgaatttcctgaagactgtaagaagtacaactgagaaatcccttttgaaggaaggttaatgtaacccaacaagagcacattttatcatagcagagacatctgtatgcattcctgtcattacccattgtaacagagccacaaactaatactatgcaatgttttaccaataatgcaatacaaaagacctcaaaatacctgtgcatttcttgtaggaaaacaacaaaaggtaattatgtgtaattatactagaagttttgtaatctgtatcttatcattggaataaaatgacattcaataaat

SEQ ID NO: 14283 - DNA, 572 bp, Homo sapiens
  source 1..572: mol_type = unassigned DNA
aaccaaaactgctctgctcttccgaaaattgcagtcagggaacctgggacccggcaagccagcagaaggagttaaggaaaatgtttgttctgttaagctttacagaaatggaacacagttggagactctggttattttaccaaggctttgactgaaatgccatattttcagatgtgaccagacagctttaagaaactgaggttgatattatgaagcccataggagcttttggaaaaactggtctaatatcctaaatacacggttcacataatgggcttgtgaaactagaaaatgaaaccattccaaaagtggaagtaatttctcactgcccctgtgataaactgtggtcactggctgtggcagcaactattataagatgctctgaaaactcttcagacactgaggggcaccagaggagcagactacaagaatggcacacgctatggaaaactcctggacaatcagtaaagagtaccatattgatgaagaagtgggctttgctctgccaaatccacaggaaaatctacctgatttttataatgactggatgttcattgctaaacatctgcctg

SEQ ID NO: 14284 - DNA, 1227 bp, Homo sapiens
  source 1..1227: mol_type = unassigned DNA
atggagccccacagaccgaatgtgaagacagcagtgccattgtctttggaaagctatcacatatctgaagagtatggctttcttcttccagattctctgaaagaacttccagatcattataggccttggatggaaattgccaacaaacttcctcaattgattgatgctcaccagcttcaagctcatgtggacaagatgcccctgctgagctgccagttcctgaagggtcaccgggagcagcgcctggcccacctggtcctgagcttcctcaccatgggttatgtctggcaggaaggagaggcgcagcctgcagaggtcctgccaaggaatcttgcccttccatttgtcgaagtctccaggaacttggggctccctcctatcctggtccactcagacttggtgctgacgaactggaccaaaaaagatccagacggattcctggaaattgggaacctggagaccatcatctcatttcctgggggagagagcctgcatggttttatactggtgactgctttggtagagaaagaagcagtgcctgggataaaggctcttgttcaggccacgaatgctatcttgcagcccaaccaggaggccctgctccaagccctgcagcgactgagactgtctattcaggacatcaccaaaaccttaggacagatgcatgattatgtagatccagacatattttatgcaggcatccggatctttctctctggatggaaagacaacccagcaatgcctgcagggctgatgtatgaaggagtttcccaagagcccctgaaatactccggcgggagtgcagctcagagcacagtgcttcatgcctttgatgagttcttaggcattcgtcatagcaaggaaagtggtgactttctgtacagaatgagggattacatgcctccttcccataaggccttcatagaagacatccactcagcaccttccctgagggactacatcctgtcatctggacaggaccacttgctgacagcttataaccagtgtgtgcaggccctggcagagctgcggagctatcacatcaccatggtcaccaaatacctcatcacagctgcagccaaggcaaagcatgggaagccaaaccatctcccagggcctcctcaggctttaaaagacaggggcacaggtggaaccgcagttatgagctttcttaagagtgtcagggataagaccttggagtcaatccttcacccacgtggttaggag

SEQ ID NO: 14285 - DNA, 2294 bp, Homo sapiens
  source 1..2294: mol_type = unassigned DNA
agtccagatgatagttaagaaagcagtaagaatacagagagtccacaatgagatgaaaatgcactgccagttgaaacatcctcctacactggagctttataaatattttaaagacaaggattggattagatttgacattagaaatgtaccataatacagaaggcaatggacacctaaagaacagaatgaaaaccttcttaggaaatgaagcttgacacttcacccaccaggccaccacaagaatgttgcattttcattattatgatacttcaaacaaaataatggagccccacagaccgaatgtgaagacagcagtgccattgtctttggaaagctatcacatatctgaagagtatggctttcttcttccagattctctgaaagaacttccagatcattataggccttggatggaaattgccaacaaacttcctcaattgattgatgctcaccagcttcaagctcatgtggacaagatgcccctgctgagctgccagttcctgaagggtcaccgggagcagcgcctggcccacctggtcctgagcttcctcaccatgggttatgtctggcaggaaggagaggcgcagcctgcagaggtcctgccaaggaatcttgcccttccatttgtcgaagtctccaggaacttggggctccctcctatcctggtccactcagacttggtgctgacgaactggaccaaaaaagatccagacggattcctggaaattgggaacctggagaccatcatctcatttcctgggggagagagcctgcatggttttatactggtgactgctttggtagagaaagaagcagtgcctgggataaaggctcttgttcaggccacgaatgctatcttgcagcccaaccaggaggccctgctccaagccctgcagcgactgagactgtctattcaggacatcaccaaaaccttaggacagatgcatgattatgtagatccagacatattttatgcaggcatccggatctttctctctggatggaaagacaacccagcaatgcctgcagggctgatgtatgaaggagtttcccaagagcccctgaaatactccggcgggagtgcagctcagagcacagtgcttcatgcctttgatgagttcttaggcattcgtcatagcaaggaaagtggtgactttctgtacagaatgagggattacatgcctccttcccataaggccttcatagaagacatccactcagcaccttccctgagggactacatcctgtcatctggacaggaccacttgctgacagcttataaccagtgtgtgcaggccctggcagagctgcggagctatcacatcaccatggtcaccaaatacctcatcacagctgcagccaaggcaaagcatgggaagccaaaccatctcccagggcctcctcaggctttaaaagacaggggcacaggtggaaccgcagttatgagctttcttaagagtgtcagggataagaccttggagtcaatccttcacccacgtggttaggaggctgccctctccccagcaatgcagagcccccatggagggcaggtgggcctggagaatgagggtcagggttctgcctgggatcatccaggaaggatctcagccctattcatgtttctgctctacagagcactatattctccttgttgagagctgttggcttcacaaaggagagttgatgtggccaagcctttccctccctacctgatcactgcttaacggcatgtataatggatacttcctcatgcagaacccccagaggagtgactgtatgccattctctttgccaagtaatagaaaaccaatctaaatgtcaaaaatcagataaaattgcctggggatacattacttgttgattttcttaaaaaacaaattcacttaacaattcattaagttcatactgagcactgcctccaagattaaaaccaggatttctgtggtcccagaccagccctcttctccctgaatgtgttgagttggtggcaggaggttggaaatgctccagtggagatgggaagatagaggatgctgacaataaggacttggaagtcactagtgtgaaaatgagcagttaatgatatgggaacggatgagactttccacgtggtacctagatttgcaaattctattgtaatgcctttatttttagaagaattattctctcttcttactctgaaaatctgtatttgtaaaatgaatgaatggatcctatataagtaaataagaaaactgggaataagtagtaaatcaatgtgtttagtgtgcaaataaatgtaaatgcttttattg

SEQ ID NO: 14286 - DNA, 2559 bp, Homo sapiens
  source 1..2559: mol_type = unassigned DNA
acatttcagggacaccatgaagggtggcttcactgggggtgatgagtaccagaagcacttcctgcccagggactacttggctacttactacagcttcgatggcagcccctcacccgaggccgagatgctgaagtttaacttggaatgtctccacaagaccttcggccctggaggcctccaaggggacacgctgattgacattggctcaggtcctaccatctaccaagttcttgctgcctgtgattccttccaagacatcactctctccgactttaccgaccgcaaccgggaggagctggaaaagtggctgaagaaggagccgggggcctatgactggaccccagcggtgaaattcgcctgtgagctggaaggaaacagcggccgatgggaggagaaggaggagaagctgcgggcagcggtgaagcgggtgctcaagtgcgatgtccacctgggcaacccgctggccccggctgtgttgcctctcgccgactgtgtgctcaccctgctggccatggagtgtgcctgctgtagccttgatgcctaccgcgctgccctgtgcaaccttgcctcactgctcaagccgggtggccacctggtgaccactgtcacgcttcggctcccgtcctacatggtggggaagcgtgaattttcctgcgtggccctggagaaagaggaggtggagcaggctgtcctggatgctggctttgacattgaacagctcctacacagtccccagagctactctgtcaccaatgctgccaacaatggggtctgcttcattgtggctcgcaagaagcctgggccctgagccaggagggccagccagaggtctggtcaggctgtgaggccttggccatctgtatgctagagaggggtgaggaatggatactgtctaacagtctctgatttcaacactaacattccatcttctgaaattctgagattctaacatccttgttttagaattctaagtttccaacattcctcattctaggatcctaggagtggaattttccattttctaatatactaagccttacagctatcttagatgcgatctgactcctgtgtgactgtggagcacccagggacgtggttttagagtctacctaatatgttaaggacaaggaaacctctgagtctacctaatatgttaaggacaaggaaacctctggacagtggtatattggggaattttttttttttttttgagacggagtctggctctgtcacccaggctagagtgcaatggcacgatctcggctcactgcaagctctgcgtcctgggttgacgccattctcctgcctcagcctcccgagtagctgggactacaggagctcgccaccacacccagctaatttttttttttttttttttatttgagacggagtttcgctctgtcgcccaggctggagtgcagtggcgcgatctcgactcactgcaagctccgcctcccgggttcacgccattctcctgcctcagcctcccgtgtagctgggactacaggcacgcgccaccatgcccggctaatttttgtatttttagtagagatggggtttcaccgtgttagccaggatggtctcgatctcctgacctggtgatccacccaccttggcctcccaaagtgctgggattacaggcgtgagccaccgcacccagccagggggaatgttctataaccagctctgtaaaggaaaagcactgatgtgtggtagtcaccaatttctgtggtgtaaatactcccaccatggttgatttcaagccaccagtggtttaataaccagctcataaatctcctaaatattttacagttgactctcatgagctgattggagtcagctggaacataccactgcctctagactaaggtcagcagatttagcaaatacagactgccccagttcattgaattttagataaatgaaataaatctataaggttaagtatgtccccagaactgcatggaacatgcttaatctaaacaatgatttgttgttcacctgaaattcaaatttagctgggtgtcctgtatttcatctggcaaccctacttcagacccaggtgtaaggtacatggatgtgctttggtcaaggaataggccaaggcagagatccatgcctgcatgactcagtgggtttggtgcacaggcacacacctccacttgttatataacctgtttgtgtaagttcatacttggtctgagccactgttgtctgtaaaaggtaattgtcctgctaatgctgtacaggggctcttggggttcggctcagctcaacatggcttgacatggtgggcacactggcgcccagtaagagagagagagagccaaagctgtccgttttgcagatggacaggaaggagccaggacacagctcagcttgctcacgcccagagagagaaaaagttaagctgctgaccctgaaggcaagggagagcaggctgcacagctgtgtgtggaagccacgggctcaagcagccaaggcagggcggacagtgtgagagagctagtgtaagctgttgatgagagctgttgctgaataaaaccatattcacctgcc

SEQ ID NO: 14287 - DNA, 803 bp, Homo sapiens
  source 1..803: mol_type = unassigned DNA
atttcagggacaccatgaagggtggcttcactgggggtgatgagtaccagaagcacttcctgcccagggactacttggctacttactacagcttcgatggcagcccctcacccgaggccgagatgctgaagtttaacttggaatgtctccacaagaccttcggccctggcctccaaggggacacgctgattgacattggctcaggtcctaccatctaccaagttcttgctgcctgtgattccttccaagacatcactctctccgactttaccgaccgcaaccgggaggagctggaaaagtggctgaagaaggagccgggggcctatgactggaccccagcggtgaaattcgcctgtgagctggaaggaaacagcggccgatgggaggagaaggaggagaagctgcgggcagcggtgaagcgggtgctcaagtgcgatgtccacctgggcaacccgctggccccggctgtgttgcctctcgccgactgtgtgctcaccctgctggccatggagtgtgcctgctgtagccttgatgcctaccgcgctgccctgtgcaaccttgcctcactgctcaagccgggtggccacctggtgaccactgtcacgcttcggctcccgtcctacatggtggggaagcgtgaattttcctgcgtggccctggagaaagaggaggtggagcaggctgtcctggatgctggctttgacattgaacagctcctacacagtccccagagctactctgtcaccaatgctgccaacaatggggtctgcttcattgtggctcgcaagaagcctgggccctga

SEQ ID NO: 14288 - DNA, 2645 bp, Homo sapiens
  source 1..2645: mol_type = unassigned DNA
cgagagcctgaattcactgtcagctttgaacactgaacgcgaggactgttaactgtttctggcaaacatgaagtcaggcctctggtatttctttctcttctgcttgcgcattaaagttttaacaggagaaatcaatggttctgccaattatgagatgtttatatttcacaacggaggtgtacaaattttatgcaaatatcctgacattgtccagcaatttaaaatgcagttgctgaaaggggggcaaatactctgcgatctcactaagacaaaaggaagtggaaacacagtgtccattaagagtctgaaattctgccattctcagttatccaacaacagtgtctctttttttctatacaacttggaccattctcatgccaactattacttctgcaacctatcaatttttgatcctcctccttttaaagtaactcttacaggaggatatttgcatatttatgaatcacaactttgttgccagctgaagttctggttacccataggatgtgcagcctttgttgtagtctgcattttgggatgcatacttatttgttggcttacaaaaaagaagtattcatccagtgtgcacgaccctaacggtgaatacatgttcatgagagcagtgaacacagccaaaaaatctagactcacagatgtgaccctataatatggaactctggcacccaggcatgaagcacgttggccagttttcctcaacttgaagtgcaagattctcttatttccgggaccacggagagtctgacttaactacatacatcttctgctggtgttttgttcaatctggaagaatgactgtatcagtcaatggggattttaacagactgccttggtactgccgagtcctctcaaaacaaacaccctcttgcaaccagctttggagaaagcccagctcctgtgtgctcactgggagtggaatccctgtctccacatctgctcctagcagtgcatcagccagtaaaacaaacacatttacaagaaaaatgttttaaagatgccaggggtactgaatctgcaaagcaaatgagcagccaaggaccagcatctgtccgcatttcactatcatactacctcttctttctgtagggatgagaattcctcttttaatcagtcaagggagatgcttcaaagctggagctattttatttctgagatgttgatgtgaactgtacattagtacatactcagtactctccttcaattgctgaaccccagttgaccattttaccaagactttagatgctttcttgtgccctcaattttctttttaaaaatacttctacatgactgcttgacagcccaacagccactctcaatagagagctatgtcttacattctttcctctgctgctcaatagttttatatatctatgcatacatatatacacacatatgtatataaaattcataatgaatatatttgcctatattctccctacaagaatatttttgctccagaaagacatgttcttttctcaaattcagttaaaatggtttactttgttcaagttagtggtaggaaacattgcccggaattgaaagcaaatttattttattatcctattttctaccattatctatgttttcatggtgctattaattacaagtttagttctttttgtagatcatattaaaattgcaaacaaaatcatctttaatgggccagcattctcatggggtagagcagaatattcatttagcctgaaagctgcagttactataggttgctgtcagactatacccatggtgcctctgggcttgacaggtcaaaatggtccccatcagcctggagcagccctccagacctgggtggaattccagggttgagagactcccctgagccagaggccactaggtattcttgctcccagaggctgaagtcaccctgggaatcacagtggtctacctgcattcataattccaggatctgtgaagagcacatatgtgtcagggcacaattccctctcataaaaaccacacagcctggaaattggccctggcccttcaagatagccttctttagaatatgatttggctagaaagattcttaaatatgtggaatatgattattcttagctggaatattttctctacttcctgtctgcatgcccaaggcttctgaagcagccaatgtcgatgcaacaacatttgtaactttaggtaaactgggattatgttgtagtttaacattttgtaactgtgtgcttatagtttacaagtgagacccgatatgtcattatgcatacttatattatcttaagcatgtgtaatgctggatgtgtacagtacagtactgaacttgtaatttgaatctagtatggtgttctgttttcagctgacttggacaacctgactggctttgcacaggtgttccctgagttgtttgcaggtttctgtgtgtggggtggggtatggggaggagaaccttcatggtggcccacctggcctggttgtccaagctgtgcctcgacacatcctcatccccagcatgggacacctcaagatgaataataattcacaaaatttctgtgaaatcaaatccagttttaagaggagccacttatcaaagagattttaacagtagtaagaaggcaaagaataaacatttgatattcagcaactgaaaa

SEQ ID NO: 14289 - DNA, 2528 bp, Homo sapiens
  source 1..2528: mol_type = unassigned DNA
ctgaacgcgaggactgttaactgtttctggcaaacatgaagtcaggcctctggtatttctttctcttctgcttgcgcattaaagttttaacaggagaaatcaatggttctgccaattatgagatgtttatatttcacaacggaggtgtacaaattttatgcaaatatcctgacattgtccagcaatttaaaatgcagttgctgaaaggggggcaaatactctgcgatctcactaagacaaaaggaagtggaaacacagtgtccattaagagtctgaaattctgccattctcagttatccaacaacagtgtctctttttttctatacaacttggaccattctcatgccaactattacttctgcaacctatcaatttttgatcctcctccttttaaagtaactcttacaggaggatatttgcatatttatgaatcacaactttgttgccagctgaagttctggttacccataggatgtgcagcctttgttgtagtctgcattttgggatgcatacttatttgttggcttacaaaaaagatgtgaccctataatatggaactctggcacccaggcatgaagcacgttggccagttttcctcaacttgaagtgcaagattctcttatttccgggaccacggagagtctgacttaactacatacatcttctgctggtgttttgttcaatctggaagaatgactgtatcagtcaatggggattttaacagactgccttggtactgccgagtcctctcaaaacaaacaccctcttgcaaccagctttggagaaagcccagctcctgtgtgctcactgggagtggaatccctgtctccacatctgctcctagcagtgcatcagccagtaaaacaaacacatttacaagaaaaatgttttaaagatgccaggggtactgaatctgcaaagcaaatgagcagccaaggaccagcatctgtccgcatttcactatcatactacctcttctttctgtagggatgagaattcctcttttaatcagtcaagggagatgcttcaaagctggagctattttatttctgagatgttgatgtgaactgtacattagtacatactcagtactctccttcaattgctgaaccccagttgaccattttaccaagactttagatgctttcttgtgccctcaattttctttttaaaaatacttctacatgactgcttgacagcccaacagccactctcaatagagagctatgtcttacattctttcctctgctgctcaatagttttatatatctatgcatacatatatacacacatatgtatataaaattcataatgaatatatttgcctatattctccctacaagaatatttttgctccagaaagacatgttcttttctcaaattcagttaaaatggtttactttgttcaagttagtggtaggaaacattgcccggaattgaaagcaaatttattttattatcctattttctaccattatctatgttttcatggtgctattaattacaagtttagttctttttgtagatcatattaaaattgcaaacaaaatcatctttaatgggccagcattctcatggggtagagcagaatattcatttagcctgaaagctgcagttactataggttgctgtcagactatacccatggtgcctctgggcttgacaggtcaaaatggtccccatcagcctggagcagccctccagacctgggtggaattccagggttgagagactcccctgagccagaggccactaggtattcttgctcccagaggctgaagtcaccctgggaatcacagtggtctacctgcattcataattccaggatctgtgaagagcacatatgtgtcagggcacaattccctctcataaaaaccacacagcctggaaattggccctggcccttcaagatagccttctttagaatatgatttggctagaaagattcttaaatatgtggaatatgattattcttagctggaatattttctctacttcctgtctgcatgcccaaggcttctgaagcagccaatgtcgatgcaacaacatttgtaactttaggtaaactgggattatgttgtagtttaacattttgtaactgtgtgcttatagtttacaagtgagacccgatatgtcattatgcatacttatattatcttaagcatgtgtaatgctggatgtgtacagtacagtactgaacttgtaatttgaatctagtatggtgttctgttttcagctgacttggacaacctgactggctttgcacaggtgttccctgagttgtttgcaggtttctgtgtgtggggtggggtatggggaggagaaccttcatggtggcccacctggcctggttgtccaagctgtgcctcgacacatcctcatccccagcatgggacacctcaagatgaataataattcacaaaatttctgtgaaatcaaatccagttttaagaggagccacttatcaaagagattttaacagtagtaagaaggcaaagaataaacatttgatattcagcaactgaaaa

SEQ ID NO: 14290 - DNA, 1009 bp, Homo sapiens
  source 1..1009: mol_type = unassigned DNA
ggcccgaggtctccgcccgcaccatgcggctgggcagtcctggactgctcttcctgctcttcagcagccttcgagctgatactcaggagaaggaagtcagagcgatggtaggcagcgacgtggagctcagctgcgcttgccctgaaggaagccgttttgatttaaatgatgtttacgtatattggcaaaccagtgagtcgaaaaccgtggtgacctaccacatcccacagaacagctccttggaaaacgtggacagccgctaccggaaccgagccctgatgtcaccggccggcatgctgcggggcgacttctccctgcgcttgttcaacgtcaccccccaggacgagcagaagtttcactgcctggtgttgagccaatccctgggattccaggaggttttgagcgttgaggttacactgcatgtggcagcaaacttcagcgtgcccgtcgtcagcgccccccacagcccctcccaggatgagctcaccttcacgtgtacatccataaacggctaccccaggcccaacgtgtactggatcaataagacggacaacagcctgctggaccaggctctgcagaatgacaccgtcttcttgaacatgcggggcttgtatgacgtggtcagcgtgctgaggatcgcacggacccccagcgtgaacattggctgctgcatagagaacgtgcttctgcagcagaacctgactgtcggcagccagacaggaaatgacatcggagagagagacaagatcacagagaatccagtcagtaccggcgagaaaaacgcggccacgtggagcatcctggctgtcctgtgcctgcttgtggtcgtggcggtggccataggctgggtgtgcagggaccgatgcctccaacacagctatgcaggtgcctgggctgtgagtccggagacagagctcactgaatcctggaacctgctccttctgctctcgtgactgactgtgttctctatgcaacttccaataaaacctcttcatttgaaaggaaaaaa

SEQ ID NO: 14291 - DNA, 2907 bp, Homo sapiens
  source 1..2907: mol_type = unassigned DNA
agagcctcgggcgcggcgggagcgcagttagagccgatctcccgcgccccgaggttgctcctctccgaggtctcccgcggcccaagttctccgcgccccgaggtctccgcgccccgaggtctccgcggcccgaggtctccgcccgcaccatgcggctgggcagtcctggactgctcttcctgctcttcagcagccttcgagctgcaaacttcagcgtgcccgtcgtcagcgccccccacagcccctcccaggatgagctcaccttcacgtgtacatccataaacggctaccccaggcccaacgtgtactggatcaataagacggacaacagcctgctggaccaggctctgcagaatgacaccgtcttcttgaacatgcggggcttgtatgacgtggtcagcgtgctgaggatcgcacggacccccagcgtgaacattggctgctgcatagagaacgtgcttctgcagcagaacctgactgtcggcagccagacaggaaatgacatcggagagagagacaagatcacagagaatccagtcagtaccggcgagaaaaacgcggccacgtggagcatcctggctgtcctgtgcctgcttgtggtcgtggcggtggccataggctgggtgtgcagggaccgatgcctccaacacagctatgcaggtgcctgggctgtgagtccggagacagagctcactggccacgtttgaccggagctcaccgcccagagcgtggacagggcttccgtgagacgccaccgtgagaggccaggtggcagcttgagcatggactcccagactgcaggggagcacttggggcagcccccagaaggaccactgctggatcccagggagaacctgctggcgttggctgtgatcctggaatgaggccctttcaaaagcgtcatccacaccaaaggcaaatgtccccaagtgagtgggctccccgctgtcactgccagtcacccacaggaagggactggtgatgggctgtctctacccggagcgtgcgggattcagcaccaggctcttcccagtaccccagacccactgtgggtcttcccgtgggatgcgggatcctgagaccgaagggtgtttggtttaaaaagaagactgggcgtccgctcttccaggacggcctctgtgctgctggggtcacgcgaggctgtttgcaggggacacggtcacaggagctcttctgccctgaacgctcccaacctgcctcccgcccggaagccacaggacccactcatgtgtgtgcccacaagtgtagttagccgtccacaccgaggagcccccggaagtccccactgggcttcagtgtcctctgccacattccctgggaggaacaatgtccctcggctgttccggtgaaaagttgagccacctttggaagacgcacgggtggagtttgccagaagaaaggctgtgccagggccgtgtttggctacaggggctgccggggctcttggctctgcagcgagaaagacacagcccagcagggctggagacgcccatgtccagcaggcgcaggcctggcaacacggtccccagagtcctgagcagcagttaggtgcatggagagggtatcacctggtggccacagtcccccttctcacctcagcaatgatccccaaagtgagaggtggctcccccggcccccaccaccctcagcagccccaccccactcaaccctgagggtccccagggtcctgatgaagacctccgaccccagcgccaggctcctcggagcccaacagtcccaagggggcaggagacggggtggtccagtgctgaggggtacagccctgggccctgaccagccccggcacctgccatgctggttcccggaatgaatcagctgctgactgtctccagaagggctggaaaggatgctgccaggtgacccgaggtgcactcgccccagggagatggagtagacagcctggcctggccctcgggacacattgtctgccccggggctatgggcaaatgcccctccttcttacttcccagaatcccctgacattcccagggtcagccaggacctgttacagccctggtcacttggaactgacagctgtgtgaggcctgcacttctcagacccagacttagaacaaaaggaggagtgaggactcaaggctacaatgaggttccagtacttgttacaagaaattggttttctgcaaaaaaagtccctacctgagcctttaggtgaatgtgggatccactcccgcttttaacatgaaagcattagaagatgtgtggtgtttataaaagaacagttgtcatcaccgggcattgattggcagggacaaggagctgcttgggtgtggaaagttggggcgttggaaagtgggctgtggtgcccatttgcagtgactgtgaagtgactccaggacggacctgcgggggcacccagaggtcctaagccccaggactgagggtcgtgcatcaccactcgggtgtcccgggaggtgccctgggcccggggacctcacaggcaggacggcgacactaatgcagggagagggagtctggccccagcttttcctatcagaggcgattttccttcaccaggggatgggcaggaaagaggcaggggccccagaagcttctgtccctcatgcctgagggcacgggggacacttggaggctgctgtcaccactgtgcgtccaaggccatgctctctgcgggtcagtgcctgagtctcgcctccctgctggtccctgaagccccctcagaagccctgcctgtcacgtcggcatttgtgagacctaccctgtaacgcctgcccctctcagcccaacatcagcttcctctttctcccttgctgtagacaggctggattccagtgttgggacagccatctccagaaacctgacttaagagagtaagatgcaaatcgt

SEQ ID NO: 14292 - DNA, 7080 bp, Homo sapiens
  source 1..7080: mol_type = unassigned DNA
gcgcagttagagccgatctcccgcgccccgaggttgctcctctccgaggtctcccgcggcccaagttctccgcgccccgaggtctccgcgccccgaggtctccgcggcccgaggtctccgcccgcaccatgcggctgggcagtcctggactgctcttcctgctcttcagcagccttcgagctgatactcaggagaaggaagtcagagcgatggtaggcagcgacgtggagctcagctgcgcttgccctgaaggaagccgttttgatttaaatgatgtttacgtatattggcaaaccagtgagtcgaaaaccgtggtgacctaccacatcccacagaacagctccttggaaaacgtggacagccgctaccggaaccgagccctgatgtcaccggccggcatgctgcggggcgacttctccctgcgcttgttcaacgtcaccccccaggacgagcagaagtttcactgcctggtgttgagccaatccctgggattccaggaggttttgagcgttgaggttacactgcatgtggcagcaaacttcagcgtgcccgtcgtcagcgccccccacagcccctcccaggatgagctcaccttcacgtgtacatccataaacggctaccccaggcccaacgtgtactggatcaataagacggacaacagcctgctggaccaggctctgcagaatgacaccgtcttcttgaacatgcggggcttgtatgacgtggtcagcgtgctgaggatcgcacggacccccagcgtgaacattggctgctgcatagagaacgtgcttctgcagcagaacctgactgtcggcagccagacaggaaatgacatcggagagagagacaagatcacagagaatccagtcagtaccggcgagaaaaacgcggccacgtggagcatcctggctgtcctgtgcctgcttgtggtcgtggcggtggccataggctgggtgtgcagggaccgatgcctccaacacagctatgcaggtgcctgggctgtgagtccggagacagagctcactggccacgtttgaccggagctcaccgcccagagcgtggacagggcttccgtgagacgccaccgtgagaggccaggtggcagcttgagcatggactcccagactgcaggggagcacttggggcagcccccagaaggaccactgctggatcccagggagaacctgctggcgttggctgtgatcctggaatgaggccctttcaaaagcgtcatccacaccaaaggcaaatgtccccaagtgagtgggctccccgctgtcactgccagtcacccacaggaagggactggtgatgggctgtctctacccggagcgtgcgggattcagcaccaggctcttcccagtaccccagacccactgtgggtcttcccgtgggatgcgggatcctgagaccgaagggtgtttggtttaaaaagaagactgggcgtccgctcttccaggacggcctctgtgctgctggggtcacgcgaggctgtttgcaggggacacggtcacaggagctcttctgccctgaacgctcccaacctgcctcccgcccggaagccacaggacccactcatgtgtgtgcccacaagtgtagttagccgtccacaccgaggagcccccggaagtccccactgggcttcagtgtcctctgccacattccctgggaggaacaatgtccctcggctgttccggtgaaaagttgagccacctttggaagacgcacgggtggagtttgccagaagaaaggctgtgccagggccgtgtttggctacaggggctgccggggctcttggctctgcagcgagaaagacacagcccagcagggctggagacgcccatgtccagcaggcgcaggcctggcaacacggtccccagagtcctgagcagcagttaggtgcatggagagggtatcacctggtggccacagtcccccttctcacctcagcaatgatccccaaagtgagaggtggctcccccggcccccaccaccctcagcagccccaccccactcaaccctgagggtccccagggtcctgatgaagacctccgaccccagcgccaggctcctcggagcccaacagtcccaagggggcaggagacggggtggtccagtgctgaggggtacagccctgggccctgaccagccccggcacctgccatgctggttcccggaatgaatcagctgctgactgtctccagaagggctggaaaggatgctgccaggtgacccgaggtgcactcgccccagggagatggagtagacagcctggcctggccctcgggacacattgtctgccccggggctatgggcaaatgcccctccttcttacttcccagaatcccctgacattcccagggtcagccaggacctgttacagccctggtcacttggaactgacagctgtgtgaggcctgcacttctcagacccagacttagaacaaaaggaggagtgaggactcaaggctacaatgaggttccagtacttgttacaagaaattggttttctgcaaaaaaagtccctacctgagcctttaggtgaatgtgggatccactcccgcttttaacatgaaagcattagaagatgtgtggtgtttataaaagaacagttgtcatcaccgggcattgattggcagggacaaggagctgcttgggtgtggaaagttggggcgttggaaagtgggctgtggtgcccatttgcagtgactgtgaagtgactccaggacggacctgcgggggcacccagaggtcctaagccccaggactgagggtcgtgcatcaccactcgggtgtcccgggaggtgccctgggcccggggacctcacaggcaggacggcgacactaatgcagggagagggagtctggccccagcttttcctatcagaggcgattttccttcaccaggggatgggcaggaaagaggcaggggccccagaagcttctgtccctcatgcctgagggcacgggggacacttggaggctgctgtcaccactgtgcgtccaaggccatgctctctgcgggtcagtgcctgagtctcgcctccctgctggtccctgaagccccctcagaagccctgcctgtcacgtcggcatttgtgagacctaccctgtaacgcctgcccctctcagcccaacatcagcttcctctttctcccttgctgtagacaggctggattccagtgttgggacagccatctccagaaacctgacttaagagagtaagatgcaaatcgtgcctgtatccagtggctttggtgggtgcagggagtcttgggcacagccagctcagctgtctgtggtatgagcaggaacaggtgccactcctgctcaggggaccctgccctacaccaggctgttccgtccccctggaggacatggggccaggtctggaggcattttgggttgtcacagctgggggctgttcctcggcttcagcgggtggaagcctcagatgctgttcaacatcttctggacacgggaggccccgacagagagaagcgtccacccgcaagtccacagtctgaggtctcccctcagagaccctgccctgcacacccacctccagccaaaggtcctgcctgccccagggctcaggggaaccttgccggtctgtggaacaggagaggggactctcgccagctgcaccaccctgcacgtagtaggtgtgcggtaaacatccaccagggaggctccagtcaaggctggcagatggggcggtccatccctagggcaggtgacagaagggaaaaggctgcctgctggcccccgagccaggtagcacatgcttgtgcctcagtttcccctcctgtaaagtgaggcgctggatccaggttctgtctactgggctctgcagcttggacgctcctaagaccaagcgacccaccctggggagggcagctatggctttggaatagctgtccaggcccgggtgcctccaagacggccaccacaccctgcctgtgctgcaggggtgcaggggtaaggggcaagactccagaggcctcctctctgcatctccttgtcttcagtggccggaggtgaggcctgagctcaggggaggggcttctgccacgaaccctatggcggggcacagcacacttttcccagggaggacccctgggccccctgcattatccccagcggagtgtggggtcaccttccaagagcgacattgagaagctccagctctaggagtgtgcagactcttaaccaggcaggcccaggccctggggcacacaaaggcggggcctgctctccccagctgcccctgccaatgggggctggactgtcctaccctcctcccttctacctccccactgtcttccctctccactgtcaccactgcctccctcttccactgtcctccatgcactgccctccctccaccttcccccacccccaccactccccatgctgtccccaggctccccccgctctcccccctccccactgtccccctccccatgctgtacccagctcaccccgctctcccctctccccactgtcccccctcccactccccatgctgtccccagctcaccctacatggacttggcgatgtccttccatggctcaccggtctgaatttccatgatgagccgggcctgcagctttgctcccctatccctgcccaggctgcagctgtccatgcagggagcgagctccagcacctgcggagtccttccgtgggggcctctccgtgccacagcagccagggacctcaggtgcctgtgcatgacaccaccgcccatcctcatcctgagccagcctctcaggatcaggacttggtttggcggcgttaaccttagagcctgcaaggggcttcctcctggtgggtctggccgtagcctggggaggccacagctccaggccactccagacctcccttcctctgggccttccatgtggtggcaaccaccgcagctgtaagggagggaaaatggagcgtttgttctcgggctgggctggggtctgggggaagccatgggcgtgaagactggagtattatttgatggagaagcggccactcctggagaccggcggcaaacacagaagcacagcgtggaaggtgctggtgtcagcccacacgggtgatggggtcagactcaggagtcacactcaggagtcaccaggctcaaagggcccaggcaccgcaagtcctgctcagccccagacacaatgcattcctgttgccctcgccctcagccaggccccacgcaggccagggagcactggcaaagcttggcaaccctctgggggccagccttcatccaggccgaaggtggtcagtggcccaccatggcccaggtagaaaactcacggattaagatttcatgcccgactccaaaggcaagagactttattattttattttttttgagccagagtatcgctctgtcacctaggctggagtgcaatctctgctcattgcaacatctgcctcccgaactcaagcaattctgcctcagcctcccaagtagctgggattacaggtgtgcgccaccatgcccaggtaattgtatttttagtagagacagggtttcaccatgttggtcaggctggtttcaaactcctgacctcaaatgatctgcccacctcgacctcccaaagtgctgggattacaggtgcgagccaccgcacctggctaccagacacttcagagttacaggttagtttttctttttcttttatttttttttttttggcggaggtgcagggggagttaaacaaacaaacaaaataaacaggccgggtgcggtggctcatgcctgtaatcccagcactttaggaggcctaggtgggtggatcacgagatcaggggttcaagaccagcctggccgagatggtaaaaccccgtctccactaaaaatacaaaaattggccaggcacggtggctcacacctgtaatcccagtactttgggaggctgaggtgggcagatcacctgaggtcaggagttcaagaccaacctgaccaacatggagaaaccccatctctactaaaaatacaaaattagccaggtgtggtggtgcatgcctgtaattccagctactcgggaggctgaggcaggagaattgcttgaacccaggaggcagaggttgcagtgggccaagatggcgccattgcactccagcctgggaacaagagcgaaactctgactaaaaaagaaagaaagaaagaaaaaaattagttgggcacggtggcaggcgcctgtaatcccaggtactcaggaggctgaggcaggagaattgcttgaacccgggaggcagaggtcgcagtgagccgagattgcaccactgccctccagcctgggtgacagagcaagactccgtctcaaaaaaaaaaaaaaaaaaaattggatacattgtaatacctcaaatacttgtaagtgaagcaccccagttcccatagagctgccgcactcagaggcttctgtaacctgcctgctcccagcattctatttagggtctggtatgtccagaatttgcagacacagcaattcctgcagcagcagtgcaccatgtggaaggggccccatgaccagcccactgtgagctcacacgtgatgactgaggcttcttcacacagcagggctctgggtgtgatacccagggcacacgcgtttgcacaggcacaggccacacaagttctcacatgctcagccccataagccgtgctggacaggcatggccatttacacccaggatcctgctgagaacagcaaccaactcaccaccctcgcatcatgatccttgccacacaggggctctggtggctttggtggcctgggctgtggctctgctgccagccaccttgagtgaagatccgggttctctgggtgctactcagctgctatgtggggagctggcccctggggtgatgagggcccttcccaacccgccctcagcccttggacagccaggatcacccggggctgtctgcatacagacttctcaggggagttctcagcttggacccttatctccccagaatcctggaacctgctccttctgctctcgtgactgactgtgttctctatgcaacttccaataaaacctcttcatttgaaaggaaaaaa

SEQ ID NO: 14293 - DNA, 1468 bp, Homo sapiens
  source 1..1468: mol_type = unassigned DNA
gccacgggcaggggcaactcggactgtggggcgtggaaaggactggggaagactggatgagaagggtagaagagggtgggtgtgggatggggaggggagagtggaaaggccctgggcagaccctggcagaaggggcacggggcagggtgtgagttccccactagcagggccaggtgagctatggtgctgcacctactgctcttcttgctgctgaccccacagggtgggcacagctgccaggggctggagctggcccgggaacttgttctggccaaggtgagggccctgttcttggatgccttggggccccccgcggtgaccagggaaggtggggaccctggagtcaggcggctgccccgaagacatgccctggggggcttcacacacaggggctctgagcccgaggaagaggaggatgtctcccaagccatccttttcccagccacagatgccagctgtgaggacaagtcagctgccagagggctggcccaggaggctgaggagggcctcttcagatacatgttccggccatcccagcatacacgcagccgccaggtgacttcagcccagctgtggttccacaccgggctggacaggcagggcacagcagcctccaatagctctgagcccctgctaggcctgctggcactgtcaccgggaggacccgtggctgtgcccatgtctttgggccatgctccccctcactgggccgtgctgcacctggccacctctgctctctctctgctgacccaccccgtcctggtgctgctgctgcgctgtcccctctgtacctgctcagcccggcctgaggccacgcccttcctggtggcccacactcggaccagaccacccagtggaggggagagagcccgacgctcaactcccctgatgtcctggccttggtctccctctgctctgcgcctgctgcagaggcctccggaggaaccggctgcccatgccaactgccacagagtagcactgaacatctccttccaggagctgggctgggaacggtggatcgtgtaccctcccagtttcatcttccactactgtcatggtggttgtgggctgcacatcccaccaaacctgtcccttccagtccctggggctccccctaccccagcccagccctactccttgctgccaggggcccagccctgctgtgctgctctcccagggaccatgaggcccctacatgtccgcaccacctcggatggaggttactctttcaagtatgagacagtgcccaaccttctcacgcagcactgtgcttgtatctaagggtggggggtcttccttcttaatcccatggctggtggccacgcccccaccatcatcagctgggaggaaaggcagagttgggaaatagatggctcccactcctccctcctttcacttctctgcctatgggctaccctccccaccccacttctatctcaataaagaacacagtgcatatgacttgaca

SEQ ID NO: 14294 - DNA, 6064 bp, Homo sapiens
  source 1..6064: mol_type = unassigned DNA
agtacagtataaaacttcacagtgccaataccatgaagaggagctcagacagctcttaccacatgatacaagagccggctggtggaagagtggggaccagaaagagaatttgctgaagaggagaaggaaaaaaaaaacaccaaaaaaaaaaataaaaaaatccacacacacaaaaaaacctgcgcgtgaggggggaggaaaagcagggccttttaaaaaggcaatcacaacaacttttgctgccaggatgcccttgctttggctgagaggatttctgttggcaagttgctggattatagtgaggagttcccccaccccaggatccgaggggcacagcgcggcccccgactgtccgtcctgtgcgctggccgccctcccaaaggatgtacccaactctcagccagagatggtggaggccgtcaagaagcacattttaaacatgctgcacttgaagaagagacccgatgtcacccagccggtacccaaggcggcgcttctgaacgcgatcagaaagcttcatgtgggcaaagtcggggagaacgggtatgtggagatagaggatgacattggaaggagggcagaaatgaatgaacttatggagcagacctcggagatcatcacgtttgccgagtcaggaacagccaggaagacgctgcacttcgagatttccaaggaaggcagtgacctgtcagtggtggagcgtgcagaagtctggctcttcctaaaagtccccaaggccaacaggaccaggaccaaagtcaccatccgcctcttccagcagcagaagcacccgcagggcagcttggacacaggggaagaggccgaggaagtgggcttaaagggggagaggagtgaactgttgctctctgaaaaagtagtagacgctcggaagagcacctggcatgtcttccctgtctccagcagcatccagcggttgctggaccagggcaagagctccctggacgttcggattgcctgtgagcagtgccaggagagtggcgccagcttggttctcctgggcaagaagaagaagaaagaagaggagggggaagggaaaaagaagggcggaggtgaaggtggggcaggagcagatgaggaaaaggagcagtcgcacagacctttcctcatgctgcaggcccggcagtctgaagaccaccctcatcgccggcgtcggcggggcttggagtgtgatggcaaggtcaacatctgctgtaagaaacagttctttgtcagtttcaaggacatcggctggaatgactggatcattgctccctctggctatcatgccaactactgcgagggtgagtgcccgagccatatagcaggcacgtccgggtcctcactgtccttccactcaacagtcatcaaccactaccgcatgcggggccatagcccctttgccaacctcaaatcgtgctgtgtgcccaccaagctgagacccatgtccatgttgtactatgatgatggtcaaaacatcatcaaaaaggacattcagaacatgatcgtggaggagtgtgggtgctcatagagttgcccagcccagggggaaagggagcaagagttgtccagagaagacagtggcaaaatgaagaaatttttaaggtttctgagttaaccagaaaaatagaaattaaaaacaaaacaaaaaaaaaaacaaaaaaaaacaaaagtaaattaaaaacaaaacctgatgaaacagatgaaggaagatgtggaaaaaatccttagccagggctcagagatgaagcagtgaaagagacaggaattgggagggaaagggagaatggtgtaccctttatttcttctgaaatcacactgatgacatcagttgtttaaacggggtattgtcctttccccccttgaggttcccttgtgagccttgaatcaaccaatctagtctgcagtagtgtggactagaacaacccaaatagcatctagaaagccatgagtttgaaagggcccatcacaggcactttcctacccaattacccaggtcataaggtatgtctgtgtgacacttatctctgtgtatatcagcatacacacacacacacacacacacacacacacacacaggcatttccacacattacatatatacacatactggtaaaagaacaatcgtgtgcaggtggtcacacttcctttttctgtaccacttttgcaacaaaacaaaacaaacaacattaaaaaattgagaacaagtatggaaagaatgaaagatcaaggaaaaaagaataccaagttacatttcgttaaggtgcttatgatcttagaactatgcaacctaataggtttgaaactgtttacctgagagagaacaaaaagagagacttttttgtattggaagtaatctgattaatttttattttcttcaaggagagatacttgaaaggaatatgtttgtccatctgttggatccaaacatttctatattttgtaaatgttgttgttgttttttttttaatcgtttactatttgcactacaatggtgtttgacctgtctaatccttatttaacaagtattttctttggttgggggtgggggtggggtttaagagctgcacttaatgtgagctataaaagaactgctacagcacacaaaatagctatttttattattataattataattattattattattttgtaccttaaaaaatagacacatacaccaaagacatttgtgtgagcctttaaacagtctgtctgtggttggtatcattcaccatcaatgagtcaggggttgggattcaaggttgagtagtgtggattgtgttcaggcttaaaagacctgagaagtttggtttttgactccttttacatccatgaaacaggacatttcatactggatgtacagtagttgtacactgttggatatcaagttcaatcaaattcatggaactacatgcttgtatgtgtatatatacattgcttgtgcatatgcatatctgtatgtatatatacatgtattgtaccatgtccatacacattttaagcacttcaggctgtcattttttaatgttcttaaagcaatgaatgtttgtgtgcaaaacacagtatttttaagaaggataggctatagtttttgcttttactctgaactaggtgggcgcatttcaaaaattcggatgggaaaaagcctggaaattccagtgaatattcagcaaggccctctttcattgtacagggatcaaatttcctcctcttttttgtgccccctcccacttctacaagttatcccctgtggggaaaacaggatgataatcaaaactctgggctgatgtttttccaacttagtgtctattggaatcaatcttaaatcagaagctttttcagaaaaataatatttaggccagaattagagttgagtgtattttttaaaaatgattaaggcttggttgtgagaaatattacctgtaccagctgggaaaaataatgtcatcactaactaaaagataattaatttgagagaaagtgttaagagagggagagtaaggaagagaacagttaagaggaggcagaggtgagggcagtagtaaaaatctctaaaattttaatttacagccaaaattcttcatgtgtaaatttgtattgattcagatgcagaaatgaaaaaaaaacacctttgttttataaatatcaaagtacatgcttaaagccaagtttttatctagtttattctagtacttagcttgcctggaatagctaataaattattcatgtatgtgcttttgaaaatccagagccctatttttacacacttgtgtgaagttggcaaacattttgaaaaatggaaaaaagtttctaataattgggaacaattacattaattaatattttgtaaaatattgaagcttttagccctatgtcaatttgtagattaaaataaattaattataggaaaggaagataacagtgagaaaccaaacattacaaaaggtggtttagctctccttgaaaaatatactaagttggtatactataacacttggctatatgtaggcaatgtcactactgggcaaatacacttactgtgttctagaggcagccctttcttatgcagaaaatacaatacgcactgcatgagaagcttgagagtggattctaatccaggtctgtcgaccttggatatcatgcatgtgggaaggtgggtgtggtgagaaaagttttaaggcaagagtagatggccatgttcaactttacaaaatttcttggaaaactggcagtattttgaactgcatcttctttggtaccggaacctgcagaaacagtgtgagaaattaagtcctggttcactgcgcagtagcaaagatggtcaaggccatggaaaaagcagaaatttaccaagaaagctgatacccatgtatagttcccactcatctcaaatacatctgctatctttttaagctaagtcctagacatatcggggataacatgggggttgattagtgaccacagttatcagaagcagagaaatgtaattccatattttatttgaaacttattccatattttaattggatattgagtgattgggttatcaaacacccacaaactttaattttgttaaatttatatggctttgaaatagaagtataagttgctaccattttttgataacattgaaagatagtattttaccatctttaatcatcttggaaaatacaagtcctgtgaacaaccactctttcacctagcagcatgaggccaaaagtaaaggctttaaattataacatatgggattcttagtagtatgtttttttcttgaaactcagtggctctatctaaccttactatctcctcactctttctctaagactaaactctaggctcttaaaaatctgcccacaccaatcttagaagctctgaaaagaatttgtctttaaatatcttttaatagtaacatgtattttatggaccaaattgacattttcgactattttttccaaaaaagtcaggtgaatttcagcacactgagttgggaatttcttatcccagaagaccaaccaatttcatatttatttaagattgattccatactccgttttcaaggagaatccctgcagtctccttaaaggtagaacaaatactttctatttttttttcaccattgtgggattggactttaagaggtgactctaaaaaaacagagaacaaatatgtctcagttgtattaagcacggacccatattatcatattcacttaaaaaaatgatttcctgtgcaccttttggcaacttctcttttcaatgtagggaaaaacttagtcaccctgaaaacccacaaaataaataaaacttgtagatgtgggcagaaggtttgggggtggacattgtatgtgtttaaattaaaccctgtatcactgagaagctgttgtatgggtcagagaaaatgaatgcttagaagctgttcacatcttcaagagcagaagcaaaccacatgtctcagctatattattatttattttttatgcataaagtgaatcatttcttctgtattaatttccaaagggttttaccctctatttaaatgctttgaaaaacagtgcattgacaatgggttgatatttttctttaaaagaaaaatataattatgaaagccaagataatctgaagcctgttttattttaaaactttttatgttctgtggttgatgttgtttgtttgtttgtttctattttgttggttttttactttgttttttgttttgttttgttttgttttgcatactacatgcagttctttaaccaatgtctgtttggctaatgtaattaaagttgttaatttatatgagtgcatttcaactatgtcaatggtttcttaatatttattgtgtagaagtactggtaatttttttatttacaatatgtttaaagagataacagtttgatatgttttcatgtgtttatagcagaagttatttatttctatggcattccagcggatattttggtgtttgcgaggcatgcagtcaatattttgtacagttagtggacagtattcagcaacgcctgatagcttctttggccttatgttaaataaaaagacctgtttgggatgta

SEQ ID NO: 14295 - DNA, 1632 bp, Homo sapiens
  source 1..1632: mol_type = unassigned DNA
ctccctgacagccacaaacctacagcactgactgcattcagagaggaacctgcaaacaaaacttcacagaaaactttttgttcttgttccagagaatttgctgaagaggagaaggaaaaaaaaaacaccaaaaaaaaaaataaaaaaatccacacacacaaaaaaacctgcgcgtgaggggggaggaaaagcagggccttttaaaaaggcaatcacaacaacttttgctgccaggatgcccttgctttggctgagaggatttctgttggcaagttgctggattatagtgaggagttcccccaccccaggatccgaggggcacagcgcggcccccgactgtccgtcctgtgcgctggccgccctcccaaaggatgtacccaactctcagccagagatggtggaggccgtcaagaagcacattttaaacatgctgcacttgaagaagagacccgatgtcacccagccggtacccaaggcggcgcttctgaacgcgatcagaaagcttcatgtgggcaaagtcggggagaacgggtatgtggagatagaggatgacattggaaggagggcagaaatgaatgaacttatggagcagacctcggagatcatcacgtttgccgagtcaggaacagccaggaagacgctgcacttcgagatttccaaggaaggcagtgacctgtcagtggtggagcgtgcagaagtctggctcttcctaaaagtccccaaggccaacaggaccaggaccaaagtcaccatccgcctcttccagcagcagaagcacccgcagggcagcttggacacaggggaagaggccgaggaagtgggcttaaagggggagaggagtgaactgttgctctctgaaaaagtagtagacgctcggaagagcacctggcatgtcttccctgtctccagcagcatccagcggttgctggaccagggcaagagctccctggacgttcggattgcctgtgagcagtgccaggagagtggcgccagcttggttctcctgggcaagaagaagaagaaagaagaggagggggaagggaaaaagaagggcggaggtgaaggtggggcaggagcagatgaggaaaaggagcagtcgcacagacctttcctcatgctgcaggcccggcagtctgaagaccaccctcatcgccggcgtcggcggggcttggagtgtgatggcaaggtcaacatctgctgtaagaaacagttctttgtcagtttcaaggacatcggctggaatgactggatcattgctccctctggctatcatgccaactactgcgagggtgagtgcccgagccatatagcaggcacgtccgggtcctcactgtccttccactcaacagtcatcaaccactaccgcatgcggggccatagcccctttgccaacctcaaatcgtgctgtgtgcccaccaagctgagacccatgtccatgttgtactatgatgatggtcaaaacatcatcaaaaaggacattcagaacatgatcgtggaggagtgtgggtgctcatagagttgcccagcccagggggaaagggagcaagagttgtccagagaagacagtggcaaaatgaagaaatttttaaggtttctgagttaaccagaaaaatagaaattaaaaacaaaaca

SEQ ID NO: 14296 - DNA, 3204 bp, Homo sapiens
  source 1..3204: mol_type = unassigned DNA
actcggctcgcctcgcggcgggcgccctcgtcgccagcggcgcaccatggacgggctgcccggtcgggcgctgggggccgcctgccttctgctgctggcggccggctggctggggcctgaggcctggggctcacccacgcccccgccgacgcctgccgcgccgccgccacccccgccacccggatccccgggtggctcgcaggacacctgtacgtcgtgcggcggcttccggcggccagaggagctcggccgagtggacggcgacttcctggaggcggtgaagcggcacatcttgagccgcctgcagatgcggggccggcccaacatcacgcacgccgtgcctaaggccgccatggtcacggccctgcgcaagctgcacgcgggcaaggtgcgcgaggacggccgcgtggagatcccgcacctcgacggccacgccagcccgggcgccgacggccaggagcgcgtttccgaaatcatcagcttcgccgagacagatggcctcgcctcctcccgggtccgcctatacttcttcatctccaacgaaggcaaccagaacctgtttgtggtccaggccagcctgtggctttacctgaaactcctgccctacgtcctggagaagggcagccggcggaaggtgcgggtcaaagtgtacttccaggagcagggccacggtgacaggtggaacatggtggagaagagggtggacctcaagcgcagcggctggcataccttcccactcacggaggccatccaggccttgtttgagcggggcgagcggcgactcaacctagacgtgcagtgtgacagctgccaggagctggccgtggtgccggtgttcgtggacccaggcgaagagtcgcaccggccctttgtggtggtgcaggctcggctgggcgacagcaggcaccgcattcgcaagcgaggcctggagtgcgatggccggaccaacctctgttgcaggcaacagttcttcattgacttccgcctcatcggctggaacgactggatcatagcacccaccggctactacgggaactactgtgagggcagctgcccagcctacctggcaggggtccccggctctgcctcctccttccacacggctgtggtgaaccagtaccgcatgcggggtctgaaccccggcacggtgaactcctgctgcattcccaccaagctgagcaccatgtccatgctgtacttcgatgatgagtacaacatcgtcaagcgggacgtgcccaacatgattgtggaggagtgcggctgcgcctgacagtgcaaggcaggggcacggtggtggggcacggagggcagtcccgggtgggcttcttccagcccccgcgggaacgggggtacacggtgggctgagtacagtcattctgttgggctgtggagatagtgccagggtgcggcctgagatatttttctacagcttcatagagcaaccagtcaaaaccagagcgagaaccctcaactgacatgaaatactttaaaatgcacacgtagccacgcacagccagacgcatcctgccacccacacagcagcctccaggataccagcaaatggatgcggtgacaaatggcagcttagctacaaatgcctgtcagtcggagagaatggggtgagcagccaccattcccaccagctggcccggccactctgaattgcgccttccgagcacacataaaagcacaaagacagagacgcagagagagagagagagccacggagaggaaaagcagatgcaggggtggggagcgcagctcggcggaggctgcgtgtgccccgtggcttttaccaggcctgctctgcctggctcgatgtctgcttcttccccagcctgggatccttcgtgcttcaaggcctggggagcctgtccttccatgcccttgtcgagggaaagagacccagaaaggacacaacccgtcagagacctgggagcaggggcaatgaccgtttgactgtttgtggcttgggcctctgacatgacttatgtgtgtgtgtgtttttggggtggggagggagggagagaagagggggctaaatttgatgctttaactgatctccaacagttgacaggtcatccttgccagttgtataactgaaaaaggacttttctaccaggtatgaccttttaagtgaaaatctgaattgttctaaatggaaagaaaaaaagttgcaatctgtgcccttcattggggacattcctctaggactggtttggggacgggtgggaatgacccctaggcaaggggatgagaccgcaggaggaaatggcggggaggaggcattcttgaactgctgaggatggggggtgtcccctcagcggaggccaagggaggggagcagcctagttggtcttggagagatggggaaggctttcagctgatttgcagaagttgcccatgtgggccccagccatcagggctggccgtggacgtggcccctgcccactcacctgcccgcctgcccgcccgcccgcatagcacttgcagacctgcctgaacgcacatgacatagcacttgccgatctgcgtgtgtccagaagtggcccttggccgagcgccgaactcgctcgccctctagatgtccaagtgccacgtgaactatgcaatttaaagggttgacccacactagacgaaactggactcgtacgactctttttatattttttatacttgaaatgaaatcctttgcttcttttttaagcgaatgattgcttttaatgtttgcactgatttagttgcatgattagtcagaaactgccatttgaaaaaaagttatttttatagcagcaaaaaaaaaaaaaaaagaatacagttaaatgtattatacataattttggaaccaaagaggccaacagatcagttttaattttattagacggtgaggccatctgagatgaggtggacgttctgagcagtcccttgagtggcctgccaacgtttcagggtatgaatggattttgtttattcggtttgatgtgtcttttccatccttacacacccagaaggtagagtaaaaatgactatgatagaatgcaggtgtgtatccttaaatcctcatctttatgtttatttaataaagctccccttagattctgtttcataataatttaaaaccaaacaattttcccatagacttgctgttaaagtattgtacgtttgtgtacagtttaagaaaataaaagattgagtgccacgggc

SEQ ID NO: 14297 - DNA, 1992 bp, Homo sapiens
  source 1..1992: mol_type = unassigned DNA
caaggagccatgccagctggacacacacttcttccagggcctctggcagccaggacagagttgagaccacagctgttgagaccctgagccctgagtctgtattgctcaagaagggccttccccagcaatgacctcctcattgcttctggcctttctcctcctggctccaaccacagtggccactcccagagctggcggtcagtgtccagcatgtggggggcccaccttggaactggagagccagcgggagctgcttcttgatctggccaagagaagcatcttggacaagctgcacctcacccagcgcccaacactgaaccgccctgtgtccagagctgctttgaggactgcactgcagcacctccacggggtcccacagggggcacttctagaggacaacagggaacaggaatgtgaaatcatcagctttgctgagacaggcctctccaccatcaaccagactcgtcttgattttcacttctcctctgatagaactgctggtgacagggaggtccagcaggccagtctcatgttctttgtgcagctcccttccaataccacttggaccttgaaagtgagagtccttgtgctgggtccacataataccaacctcaccttggctactcagtacctgctggaggtggatgccagtggctggcatcaactccccctagggcctgaagctcaagctgcctgcagccaggggcacctgaccctggagctggtacttgaaggccaggtagcccagagctcagtcatcctgggtggagctgcccataggccttttgtggcagcccgggtgagagttgggggcaaacaccagattcaccgacgaggcatcgactgccaaggagggtccaggatgtgctgtcgacaagagttttttgtggacttccgtgagattggctggcacgactggatcatccagcctgagggctacgccatgaacttctgcatagggcagtgcccactacacatagcaggcatgcctggtattgctgcctcctttcacactgcagtgctcaatcttctcaaggccaacacagctgcaggcaccactggagggggctcatgctgtgtacccacggcccggcgccccctgtctctgctctattatgacagggacagcaacattgtcaagactgacatacctgacatggtagtagaggcctgtgggtgcagttagtctatgtgtggtatgggcagcccaaggttgcatgggaaaacacgcccctacagaagtgcacttccttgagaggagggaatgacctcattctctgtccagaatgtggactccctcttcctgagcatcttatggaaattaccccacctttgacttgaagaaaccttcatctaaagcaagtcactgtgccatcttcctgaccactaccctctttcctagggcatagtccatcccgctagtccatcccgctagccccactccagggactcagacccatctccaaccatgagcaatgccatctggttcccaggcaaagacacccttagctcacctttaatagaccccataacccactatgccttcctgtcctttctactcaatggtccccactccaagatgagttgacacaaccccttcccccaatttttgtggatctccagagaggcccttctttggattcaccaaagtttagatcactgctgcccaaaatagaggcttacctacccccctctttgttgtgagcccctgtccttcttagttgtccaggtgaactactaaagctctctttgcataccttcatccattttttgtccttctctgcctttctctatgcccttaagggctgacttgcctgagctctatcacctgagctcccctgccctctggcttcctgctgaggtcagggcatttcttatccctgttccctctctgtctaggtgtcatggttctgtgtaactgtggctattctgtgtccctacactacctggctacccccttccatggccccagctctgcctacattctgatat

SEQ ID NO: 14298 - DNA, 2429 bp, Homo sapiens
  source 1..2429: mol_type = unassigned DNA
agctgtgagggtcaagcacagctatccatcagatgatctactttcagccttcctgagtcccagacaatagaagacaggtggctgtacccttggccaagggtaggtgtggcagtggtgtctgctgtcactgtgccctcattggcccccagcaatcagactcaacagacggagcaactgccatccgaggctcctgaaccagggccattcaccaggagcatgcggctccctgatgtccagctctggctggtgctgctgtgggcactggtgcgagcacaggggacagggtctgtgtgtccctcctgtgggggctccaaactggcaccccaagcagaacgagctctggtgctggagctagccaagcagcaaatcctggatgggttgcacctgaccagtcgtcccagaataactcatcctccaccccaggcagcgctgaccagagccctccggagactacagccagggagtgtggctccagggaatggggaggaggtcatcagctttgctactgtcacagactccacttcagcctacagctccctgctcacttttcacctgtccactcctcggtcccaccacctgtaccatgcccgcctgtggctgcacgtgctccccacccttcctggcactctttgcttgaggatcttccgatggggaccaaggaggaggcgccaagggtcccgcactctcctggctgagcaccacatcaccaacctgggctggcataccttaactctgccctctagtggcttgaggggtgagaagtctggtgtcctgaaactgcaactagactgcagacccctagaaggcaacagcacagttactggacaaccgaggcggctcttggacacagcaggacaccagcagcccttcctagagcttaagatccgagccaatgagcctggagcaggccgggccaggaggaggacccccacctgtgagcctgcgacccccttatgttgcaggcgagaccattacgtagacttccaggaactgggatggcgggactggatactgcagcccgaggggtaccagctgaattactgcagtgggcagtgccctccccacctggctggcagcccaggcattgctgcctctttccattctgccgtcttcagcctcctcaaagccaacaatccttggcctgccagtacctcctgttgtgtccctactgcccgaaggcccctctctctcctctacctggatcataatggcaatgtggtcaagacggatgtgccagatatggtggtggaggcctgtggctgcagctagcaagaggacctggggctttggagtgaagagaccaagatgaagtttcccaggcacagggcatctgtgactggaggcatcagattcctgatccacaccccaacccaacaaccacctggcaatatgactcacttgacccctatgggacccaaatgggcactttcttgtctgagactctggcttattccaggttggctgatgtgttgggagatgggtaaagcgtttcttctaaaggggtctacccagaaagcatgatttcctgccctaagtcctgtgagaagatgtcagggactagggagggagggagggaaggcagagaaaaattacttagcctctcccaagatgagaaagtcctcaagtgaggggaggaggaagcagatagatggtccagcaggcttgaagcagggtaagcaggctggcccagggtaagggctgttgaggtaccttaagggaaggtcaagagggagatgggcaaggcgctgagggaggatgcttaggggacccccagaaacaggagtcaggaaaatgaggcactaagcctaagaagttccctggtttttcccaggggacaggacccactgggagacaagcatttatactttctttcttcttttttatttttttgagatcgagtctcgctctgtcaccaggctggagtgcagtgacacgatcttggctcactgcaacctccgtctcctgggttcaagtgattcttctgcctcagcctcccgagcagctgggattacaggcgcccactaatttttgtattcttagtagaaacgaggtttcaacatgttggccaggatggtctcaatctcttgacctcttgatccacccgacttggcctcccgaagtgatgagattataggcgtgagccaccgcgcctggcttatactttcttaataaaaaggagaaagaaaatcaacaaatgtgagtcataaagaagggttagggtgatggtccagagcaacagttcttcaagtgtactctgtaggcttctgggaggtcccttttcaggggtgtccacaaagtcaaagctattttcataataatactaacatgttatttgccttttgaattctcattatcttaaaattgtattgtggagttttccagaggccgtgtgacatgtgattacatcatctttctgacatcattgttaa

SEQ ID NO: 14299 - DNA, 6054 bp, Homo sapiens
  source 1..6054: mol_type = unassigned DNA
cttcctctacatccccgttcccgattcctgtagtagcggctgtattgcagccgcctgccgaactgacccgggtctggggactggcccctctggcgccgttcggtttctcttattgccttcactgaggatgagtccctttgtggctctatgtggaccctgcggaatccaccggcgcagtttcatctagcgactggtcacccttgcaattatggatatttaaaagggtcagacagtgtggagggggagttcccctcctcactcccccttggtgcttgactccaggaataatttataaactgtggaatttttttaaatgaagaacttgtatttgatatgaactttatagagctatttataatttttttgatttaagtgccaaaaaattgtataaagatatatagttttatactattgtcaggaggatttaaattatcctaaaaaggtaatttattctctgtaacttcctcaatagcacctttgtgtcctggctttttcattttttaaaattagttttcacgattctgaagtaagtggtataaaaacagttaggatgagttcacccatgcctgactgcacatcaaagtgtcgatccctgaagcatgctttggatgtcctttctgtggtaacaaaggggagcgaaaaccagattaaggcctttctctccagtcattgttacaatgctgcaactatcaaggatgtttttggcaggaatgccctccaccttgtttcctcctgtggaaagaaaggagtgttagattggcttattcagaaaggagtggatctgttggtgaaagacaaagagtctggatggacagcattgcacagaagcattttttatggacatattgattgtgtttggtctctattgaagcatggtgttagtctgtatattcaagataaagaaggcttgtcagctttggatcttgtaatgaaggatagaccaactcatgtagtattcaagaatactgatcctacagatgtttatacttggggcgataatacaaattttaccctgggtcatggaagccagaatagcaaacatcatccagagttggtggatctgttctccaggagtgggatttatatcaagcaggtggtgctttgtaaatttcactccgtgtttctgtctcagaaagggcaggtttatacctgtggtcatggtcctggagggcgattaggacatggagatgaacagacatgcttggtccctcggcttgtggaaggactgaatggtcataattgttcccaagtggcagctgctaaggatcatactgttgtattaactgaagatggatgtgtttatacatttggtctaaacatttttcatcaattaggaattattccaccgccttccagttgtaatgtacccagacagatacaggcaaaatatctgaaaggaaggacaatcattggcgttgcagcaggcaggtttcatacagtcctatggactagagaagctgtttacactatgggactaaatggtggacaactgggttgtttgctagatcccaatggagaaaagtgtgtaactgctcctcgtcaggtctctgcccttcaccataaagacattgctctgtctttggttgctgcaagtgatggagctacagtctgtgttaccacaaggggagatatttacttacttgcagactatcagtgcaagaagatggcttctaaacagttgaacttgaaaaaagttcttgtgtctgggggtcatatggaatacaaggttgatcctgaacatttgaaagaaaatgggggtcaaaaaatttgcattcttgcaatggatggagctggaagggtgttttgctggagatcagtcaacagttctctgaagcagtgtcgatgggcctatccacgtcaggtcttcatttctgatattgctttaaatagaaatgaaattctatttgttacgcaagatggagaaggatttagagggagatggtttgaagagaaaagaaagagttctgaaaagaaagagattttatcaaaccttcacaattcctcatcagatgtgtcttatgtctctgatataaatagtgtgtatgaaagaattcgacttgagaaacttacctttgcacatagagctgttagtgtcagcacagatccaagtggatgcaactttgcaatcctgcagtcagatcctaaaacaagcctttatgaaattccagctgtgtcctcatcatccttttttgaagagtttggcaaactgttgagggaagcagatgaaatggacagcattcatgatgtgacatttcaagttggcaatagactcttccctgcacataaatatattttggcagtgcattctgatttttttcagaaattgtttctttcagatggtaatacttcagaatttacagatatttaccagaaagatgaagattctgcagggtgccatctctttgtggtagagaaggttcatcctgacatgtttgaataccttttacaatttatatacacagatacttgtgactttttaactcatggcttcaaaccaagaatacacttaaacaaaaacccagaagaatatcagggaactctgaattctcatttgaataaagtgaatttccatgaagatgataaccagaagtctgcatttgaagtttacaaaagtaatcaagctcaaacagttagtgagaggcagaagagcaaacctaaatcttgtaaaaaaggaaaaaatattagggaagatgatcctgtaagaatgttgcaaactgttgcaaagaaattcgacttcagtaatttgagtagtaggttagatggagtcagatttgaaaatgaaaaaattaatgttattgccaagaacactggtaataaactgaagctaagtcagaaaaaatgttcatttctgtgtgacgtgaccatgaaatcagtggatggaaaggaatttccttgtcataaatgtgttctttgtgctagacttgaatattttcatagtatgctgagtagctcatggattgaggcttccagttgtgcagctctggaaatgccaatacattctgatatattaaaagttattttggactacctctatactgatgaagctgtggtgataaaagaatctcaaaatgtagattttatttgtagtgttcttgtggtggctgatcaacttctcataacccggttgaaagagatttgtgaagtagcattaactgaaaaacttaccctgaagaatgctgctatgctactggaatttgcagcaatgtatagtgcaaaacagttgaaactgtcttgtttacagtttataggattgaatatggcagctttacttgaagcaaggtctcttgatgttttaagcgatggtgttttgaaggatctttctgagttttaccggaaaatgattccagcaatggatagaagagtcattacaccatatcaagatggaccagatattagctatttggaagtagaagatggagatatcttcttgaaagaagaaataaatatggaacaaaatcattcggaaactatgttcaagaaagcaaaaacaaaagctaaaaagaagccacgtaaacgttcagatagttctggaggttataacctttcagatattattcagagtccatcatctacaggattattaaagtctggtaagaccaattctgtggaatctcttccagaactgttgacatcagactctgaaggaagctatgcaggagtgggtagtcctagagatttacagtcccctgatttcacaacaggatttcattcagataagattgaggcgaaagtcaaaccgtatgttaatggtacatctcctgtgtattctagggaagatttaaaaccatgggaaaagtcaccaatacttaaaatatctgctccacagcctattcccagtaacagaattgatactaccagctctgccagttgggttgctggttctttcagtcctgtcagccctcctgttgtggatctcagaactatcatggaaatagaagaaagtagacaaaaatgtggagctacaccaaagtcacatttaggcaaaacagtttctcatggagttaaactttctcagaagcaacgaaaaatgattgcattgactaccaaggaaaacaattcaggaatgaatagcatggaaacagttttattcactccttcaaaagcccccaaaccagtgaatgcatgggcatcttctctgcattcagtttcatccaagtcattccgggatttcttactagaagaaaaaaagtctgttactagccatagttcaggcgatcatgtcaaaaaagtttcttttaaaggaattgaaaattctcaggcaccaaaaattgtcagatgctctacccatggtaccccaggaccagaaggcaaccatatttcagatttaccacttctagacagtcccaatccctggctatcttcttcagtgactgctccatccatggtagccccagtcacttttgcatctattgtagaagaagaactacaacaagaagcagctcttattagaagtcgagaaaaaccgttggctctgattcagattgaggagcatgccatacaagatttattggttttctatgaggcatttggcaaccctgaagagtttgtcattgttgaaaggacaccgcagggaccactggcagtacctatgtggaataagcatggatgctagttcactgtggagttgagatgcattttacataattatgagtttgttcatataaagaaaagctgtggaaaagagtcttagagattttgtaatatcattctaaatagattaagaaaagatataatttctttactgcagttaaatcatataatgtttgtatgattaaaaataaatttctcagaattgtgattttagtaactttatataaaatgtgtgagacaaaaacttattaaggttaaatagaattgtttcttctgaataatctaacaaaggaaaatataagtgattgaatcataagatataaggggggtaaagtattaaaaataacttttttgtttgataacttgagaatttagaagattttgccaagtatgtgttgttgcttgacttcttaaatatggcattgatgaatttaaagtaggagcatcagttattacttctgattcattaatggccagaattttgtgtttggtgtaatagttgtgtcaccattcttgttgctttttaaaaatcaggctaatcatgtggtccatgtctcttcaaagcttgacctgcacaaatgccatatttctatttggaccacatattctccattttgcattgagcagtagagtacagtggaaagggaataagaatactgattattctgaacagtttagtcccaagagaatagcgttttaaaaaagaaaaacaagatttggagtcattgtgggttatttttggtgggatggaggatcttaaaaatgcctaattgtgagagaatcaattgctgaaagtgttaaaatttctgaaaataaatgcttaattacatatacaggaattaaatagtttggaagagggttggattatcattacctttacaatactgtataatcagaagttctctgaacctcaattgtatatctagacataaaaattgttttctgtataggatgttgtttggtttgtttctgagtgtttaaattttgcaaaaacaaatgttaaatttgtgcttcagtacctagataaattggaaaggttaatgttctagtttctggaaggtaagcctgggagacacataagcaattcactgctataatttagttgatgtaaaatgacggaaactgactcaatatgtcaggtttaactctgcccaaaagcagcagacatgtaagcagatgtgcaataaaaaatgatcttgatccatttcactaatgtgtgcttgacattttttactatattgacatttattatggaaagagttaataattattttttctgatgtgctacactagtggccagtatatggttaagttgatgctgtatttattctaagacggatttaaaaaggcagttttctaaatatgaacttgtgaatttttgtatgtgtgtttgagtaaattgagaaatgaattttataaatgttctattgatgttgcagtaaagaagccttttgaagtaattga

SEQ ID NO: 14300 - DNA, 2041 bp, Homo sapiens
  source 1..2041: mol_type = unassigned DNA
gcgcgctgagtgacggcgcggttgccatggcagccgcctgagcggcgccgcgaggacaaggctgcagggcggcgtgaatgggcggcgtcacgcgcctggcgccagagagtctgctccggggctccggctccggccccgccgcggcctggcccgcgcgccgccgccgccgccaccgccgccgccaattcatcacctgtcagggatcactcgcggggtcacgggcggaatggacacagctgtgagaacaaaacccgggaaagaaaggcgaacgctccccattgcgccagatgtgcagggaggaccttgagacgcgccccccgcccccgcaggctcctcccgccccccggcgcatcacgcgggggtggcaaaggcggcctggccagcgcggagctcccggcccggagctgcttctgattaccgcgaggggcccggacgcgagagccgccgcggggcctgccctagaggcggagtgatgaactgtggcttcccccctgcggtgctgaactcgcccgtgtagctgtgattttagagctgccgacagctctaagctgggctcgcgccccgcccaccccgcggggattggctgcgaacgcggaagaaccaagcccacgccccgcgcccgcgcccaccaatggaagcgcccgctcgtcttgatagacgtgccaccttccgccaatggggacgaagggaagctccagcgtgtggccccggcgagtgcggataaaagccgccccgccgggctcgggcttcattctgagccgagcccggtgccaagcgcagctagctcagcaggcggcagcggcggcctgagcttcagggcagccagctccctcccggtctcgccttccctcgcggtcagcatgaaagccttcagtcccgtgaggtccgttaggaaaaacagcctgtcggaccacagcctgggcatctcccggagcaaaacccctgtggacgacccgatgagcctgctatacaacatgaacgactgctactccaagctcaaggagctggtgcccagcatcccccagaacaagaaggtgagcaagatggaaatcctgcagcacgtcatcgactacatcttggacctgcagatcgccctggactcgcatcccactattgtcagcctgcatcaccagagacccgggcagaaccaggcgtccaggacgccgctgaccaccctcaacacggatatcagcatcctgtccttgcaggcttctgaattcccttctgagttaatgtcaaatgacagcaaagcactgtgtggctgaataagcggtgttcatgatttcttttattctttgcacaacaacaacaacaacaaattcacggaatcttttaagtgctgaacttatttttcaaccatttcacaaggaggacaagttgaatggacctttttaaaaagaaaaaaaaaatggaaggaaaactaagaatgatcatcttcccagggtgttctcttacttggactgtgatattcgttatttatgaaaaagacttttaaatgccctttctgcagttggaaggttttctttatatactattcccaccatggggagcgaaaacgttaaaatcacaaggaattgcccaatctaagcagactttgccttttttcaaaggtggagcgtgaataccagaaggatccagtattcagtcacttaaatgaagtcttttggtcagaaattacctttttgacacaagcctactgaatgctgtgtatatatttatatataaatatatctatttgagtgaaaccttgtgaactctttaattagagttttcttgtatagtggcagagatgtctatttctgcattcaaaagtgtaatgatgtacttattcatgctaaactttttataaaagtttagttgtaaacttaacccttttatacaaaataaatcaagtgtgtttattgaatggtgattgcctgctttatttcagaggaccagtgctttgatttttattatgctatgttataactgaacccaaataaatacaagttcaaatttatgtagactgtataagattataataaaacatgtctgaagtcaa

SEQ ID NO: 14301 - DNA, 623 bp, Homo sapiens
  source 1..623: mol_type = unassigned DNA
attctgagccgagcccggtgccaagcgcagctagctcagcaggcggcagcggcggcctgagcttcagggcagccagctccctcccggtctcgccttccctcgcggtcagcatgaaagccttcagtcccgtgaggtccgttaggaaaaacagcctgtcggaccacagcctgggcatctcccggagcaaaacccctgtggacgacccgatgagcctgctatacaacatgaacgactgctactccaagctcaaggagctggtgcccagcatcccccagaacaagaaggtgagcaagatggaaatcctgcagcacgtcatcgactacatcttggacctgcagatcgccctggactcgcatcccactattgtcagcctgcatcaccagagacccgggcagaaccaggcgtccaggacgccgctgaccaccctcaacacggatatcagcatcctgtccttgcaggcttctgaattcccttctgagttaatgtcaaatgacagcaaagcactgtgtggctgaataagcggtgagtgtttgcttgtgccacccgtgggtaaactgcccctcggtgtgtgtgcgcgcgcgcgcatgtgtttttgcttgtgtatctataaaatgtctgatttg

SEQ ID NO: 14302 - DNA, 1362 bp, Homo sapiens
  source 1..1362: mol_type = unassigned DNA
ggggacgaagggaagctccagcgtgtggccccggcgagtgcggataaaagccgccccgccgggctcgggcttcattctgagccgagcccggtgccaagcgcagctagctcagcaggcggcagcggcggcctgagcttcagggcagccagctccctcccggtctcgccttccctcgcggtcagcatgaaagccttcagtcccgtgaggtccgttaggaaaaacagcctgtcggaccacagcctgggcatctcccggagcaaaacccctgtggacgacccgatgagcctgctatacaacatgaacgactgctactccaagctcaaggagctggtgcccagcatcccccagaacaagaaggtgagcaagatggaaatcctgcagcacgtcatcgactacatcttggacctgcagatcgccctggactcgcatcccactattgtcagcctgcatcaccagagacccgggcagaaccaggcgtccaggacgccgctgaccaccctcaacacggatatcagcatcctgtccttgcaggcttctgaattcccttctgagttaatgtcaaatgacagcaaagcactgtgtggctgaataagcggtgttcatgatttcttttattctttgcacaacaacaacaacaacaaattcacggaatcttttaagtgctgaacttatttttcaaccatttcacaaggaggacaagttgaatggacctttttaaaaagaaaaaaaaaatggaaggaaaactaagaatgatcatcttcccagggtgttctcttacttggactgtgatattcgttatttatgaaaaagacttttaaatgccctttctgcagttggaaggttttctttatatactattcccaccatggggagcgaaaacgttaaaatcacaaggaattgcccaatctaagcagactttgccttttttcaaaggtggagcgtgaataccagaaggatccagtattcagtcacttaaatgaagtcttttggtcagaaattacctttttgacacaagcctactgaatgctgtgtatatatttatatataaatatatctatttgagtgaaaccttgtgaactctttaattagagttttcttgtatagtggcagagatgtctatttctgcattcaaaagtgtaatgatgtacttattcatgctaaactttttataaaagtttagttgtaaacttaacccttttatacaaaataaatcaagtgtgtttattgaatggtgattgcctgctttatttcagaggaccagtgctttgatttttattatgctatgttataactgaacccaaataaatacaagttcaaatttatgtagactgtataagattataataaaacatgtctgaagtc

SEQ ID NO: 14303 - DNA, 1251 bp, Homo sapiens
  source 1..1251: mol_type = unassigned DNA
gatctggggtgctgccaggaaaaagcaaattctggaagttaatggttttgagtgatttttaaatccttgctggcggagaggcccgcctctccccggtatcagcgcttcctcattctttgaatccgcggctccgcggtcttcggcgtcagaccagccggaggaagcctgtttgcaatttaagcgggctgtgaacgcccagggccggcgggggcagggccgaggcgggccattttgaataaagaggcgtgccttccaggcaggctctataagtgaccgccgcggcgagcgtgcgcgcgttgcaggtcactgtagcgggacttcttttggttttctttctctttggggcacctctggactcactccccagcatgaaggcgctgagcccggtgcgcggctgctacgaggcggtgtgctgcctgtcggaacgcagtctggccatcgcccggggccgagggaagggcccggcagctgaggagccgctgagcttgctggacgacatgaaccactgctactcccgcctgcgggaactggtacccggagtcccgagaggcactcagcttagccaggtggaaatcctacagcgcgtcatcgactacattctcgacctgcaggtagtcctggccgagccagcccctggaccccctgatggcccccaccttcccatccagacagccgagctcactccggaacttgtcatctccaacgacaaaaggagcttttgccactgactcggccgtgtcctgacacctccagaacgcaggtgctggcgcccgttctgcctgggaccccgggaacctctcctgccggaagccggacggcagggatgggccccaacttcgccctgcccacttgacttcaccaaatcccttcctggagactaaacctggtgctcaggagcgaaggactgtgaacttgtggcctgaagagccagagctagctctggccaccagctgggcgacgtcaccctgctcccaccccacccccaagttctaaggtctcttcagagcgtggaggtgtggaaggagtggctgctctccaaactatgccaaggcggcggcagagctggtcttctggtctccttggagaaaggttctgttgccctgatttatgaactctataatagagtatataggttttgtaccttttttacaggaaggtgactttctgtaacaatgcgatgtatattaaactttttataaaagttaacattttgcataataaacgatttttaaacacttgtgtatatgatga

SEQ ID NO: 14304 - DNA, 2344 bp, Homo sapiens
  source 1..2344: mol_type = unassigned DNA
aggcgcggttgtgagtagtaccgggagtggggtgatcccgggctaggggagcgcggcggccgcgatcgggcttagtcggagctccgaagggagtgactaggacacccgggtgggctacttttcttccggtgcttttgctttttttttcctttgggctcgggctgagtgtcgcccactgagcaaagattccctcgtaaaacccagagcgaccctcccgtcaattgttgggctcgggagtgtcgcggtgccccgagcgcgccgggcgcggaggcaaagggagcggagccggccgcggacggggcccggagcttgcctgcctccctcgctcgccccagcgggttcgctcgcgtagagcgcagggcgcgcgcgatgaaggcggtgagcccggtgcgcccctcgggccgcaaggcgccgtcgggctgcggcggcggggagctggcgctgcgctgcctggccgagcacggccacagcctgggtggctccgcagccgcggcggcggcggcggcggcagcgcgctgtaaggcggccgaggcggcggccgacgagccggcgctgtgcctgcagtgcgatatgaacgactgctatagccgcctgcggaggctggtgcccaccatcccgcccaacaagaaagtcagcaaagtggagatcctgcagcacgttatcgactacatcctggacctgcagctggcgctggagacgcacccggccctgctgaggcagccaccaccgcccgcgccgccacaccacccggccgggacctgtccagccgcgccgccgcggaccccgctcactgcgctcaacaccgacccggccggcgcggtgaacaagcagggcgacagcattctgtgccgctgagccgcgctgtccaggtgtgcggccgcctgagcccgagccaggagcactagagagggagggggaagagcagaagttagagaaaaaaagccaccggaggaaaggaaaaaacatcggccaacctagaaacgttttcattcgtcattccaagagagagagaggaaagaaaaatacaactttcattctttctttgcacgttcataaacattctacatacgtattctcttttgtctcttcatttataactgctgtgaattgtacatttctgtgttttttggaggtgcagttaaacttttaagcttaagtgtgacaggactgataaatagaagatcaagagtagatccgactttagaagcctactttgtgaccaaggagctcaatttttgttttgaagctttactaatctaccagagcattgtagatattttttttttacatctattgtttaaaatagatgattataacggggcagagaactttcttttctctgcaagaatgttacatattgtatagataaatgagtgacatttcataccatgtatatatagagatgttctataagtgtgagaaagtatatgctttaatagatactgtaattataagatatttttaattaaatatttttttgtaaatattatgtgtgtgtttttttttaatctatgggaatatttcttttggaaaatcatttttcagctcaattacagagctcttgatatcttgaatgtcttttctgtttggcctggctcttaatttgcttttgttttgcccagtatagactcggaagtaacagttatagctagtggtcttgcatgattgcatgagatgtttaatcacaaattaaacttgttctgagtccattcaaatgtgtttttttaaatgtagattgaaatctttgtatttgaagcatacatgttgaaaatacaccttatcagtttttaagtacagggttttatagtgtaatatatacagagtaagtgtttgtttttgtttttcaactgaggtcaaaatggattctgaatgattttgcatatgggatgaggaaatgcttggatccttaaggagtttacgaaatctgctgttttatcaaagtgaaaaaaaattgcttattactcttcattttacactaaagcttaatgtcactaagtttcatgtctgtacagattatttaaatcatggaaatgaaaaaaatgttctctgcttgctaccaaaggacaaactcttggaaatgaacactttctgctttccttcctccaaagaattaataggcaacagtgggagaaaaaaaaggcataatggcaaatccttcaagcagggataaaagtcgatcttcaaacattaacttaagcagaccaaaaattctgatgaccgcatctagattatttttttataaaaatgattttcactatagctatgttacgctaagctactgtccaatctcttgtgatgtgtaacttttacatgtgaatattaaagtagatttctctgtcttgta

SEQ ID NO: 14305 - DNA, 1189 bp, Homo sapiens
  source 1..1189: mol_type = unassigned DNA
cgcccctgggctggtgctgcgggggcggggagtgagggctgctctggggggagtggagatcggggagcgcggccgtgccctctcgagcggctgcggggtccccgcggcgccgggctgctgagctgagggcccgcggcggccgcggccggtgcatgtgcggctgctggatgcggaggcggcggcgacggcgcggatcggcaggatgttagggcagcagcagcagcaactgtactcgtcggccgcgctcctgaccggggagcggagccggctgctcacctgctacgtgcaggactaccttgagtgcgtggagtcgctgccccacgacatgcagaggaacgtgtctgtgctgcgagagctggacaacaaatatcaagaaacgttaaaggaaattgatgatgtctacgaaaaatataagaaagaagatgatttaaaccagaagaaacgtctacagcagcttctccagagagcactaattaatagtcaagaattgggagatgaaaaaatacagattgttacacaaatgctcgaattggtggaaaatcgggcaagacaaatggagttacactcacagtgtttccaagatcctgctgaaagtgaacgagcctcagataaagcaaagatggattccagccaaccagaaagatcttcaagaagaccccgcaggcagcggaccagtgaaagccgtgatttatgtcacatggcaaatgggattgaagactgtgatgatcagccacctaaagaaaagaaatccaagtcagcaaagaaaaagaaacgctccaaggccaagcaggaaagggaagcttcacctgttgagtttgcaatagatcctaatgaacctacatactgcttatgcaaccaagtgtcttatggggagatgataggatgtgacaatgaacagtgtccaattgaatggtttcacttttcatgtgtttcacttacctataaaccaaaggggaaatggtattgcccaaagtgcaggggagataatgagaaaacaatggacaaaagtactgaaaagacaaaaaaggatagaagatcgaggtagtaaaggccatccacattttaaagggttatttgtcttttatataattcgtttgctttcagaaaatgttttagggtaaatgcataagactatgcaataatttttaatcattagtattaatggtgtattaaaagttgttgtactttg

SEQ ID NO: 14306 - DNA, 783 bp, Homo sapiens
  source 1..783: mol_type = unassigned DNA
agtccgaatcggggtttgcagcatgttttgcggtgatgtttccaacctctttcccagtcaatggatcaggacggcgatcagcagctcggaccgtcgcggatcctggctccgcaaacgttaaaggaaattgatgatgtctacgaaaaatataagaaagaagatgatttaaaccagaagaaacgtctacagcagcttctccagagagcactaattaatagtcaagaattgggagatgaaaaaatacagattgttacacaaatgctcgaattggtggaaaatcgggcaagacaaatggagttacactcacagtgtttccaagatcctgctgaaagtgaacgagcctcagataaagcaaagatggattccagccaaccagaaagatcttcaagaagaccccgcaggcagcggaccagtgaaagccgtgatttatgtcacatggcaaatgggattgaagactgtgatgatcagccacctaaagaaaagaaatccaagtcagcaaagaaaaagaaacgctccaaggccaagcaggaaagggaagcttcacctgttgagtttgcaatagatcctaatgaacctacatactgcttatgcaaccaagtgtcttatggggagatgataggatgtgacaatgaacagtgtccaattgaatggtttcacttttcatgtgtttcacttacctataaaccaaaggggaaatggtattgcccaaagtgcaggggagataatgagaaaacaatggacaaaagtactgaaaagacaaaaaaggatagaagatcgaggtag

SEQ ID NO: 14307 - DNA, 3777 bp, Homo sapiens
  source 1..3777: mol_type = unassigned DNA
tttttttttttttctttttttttttttgccggagtcgagcgggtgctgctagcggaggcgccatattggaggggacaaaactccggcgacagcgagtgacacaaataaacccctggacccccttgttccctcagctctaagggccgcgatgttgtacctagaagactatctggaaatgattgagcagcttcctatggatctgcgggaccgcttcacggaaatgcgcgagatggacctgcaggtgcagaatgcaatggatcaactagaacaaagagtcagtgaattctttatgaatgcaaagaaaaataaacctgagtggagggaagagcaaatggcatccatcaaaaaagactactataaagctttggaagatgcagatgagaaggttcagttggcaaaccagatatatgacttggtagatcgacacttgagaaagctggatcaggaactggctaagtttaaaatggagctggaagctgataatgctggaattacagaaatattagagaggcgatctttggaattagacactccttcacagccagtgaacaatcaccatgctcattcacatactccagtggaaaaaaggaaatataatccaacttctcaccatacgacaacagatcatattcctgaaaagaaatttaaatctgaagctcttctatccacccttacgtcagatgcctctaaggaaaatacactaggttgtcgaaataataattccacagcctcttctaacaatgcctacaatgtgaattcctcccaacctctgggatcctataacattggctcgttatcttcaggaactggtgcaggggcaattaccatggcagctgctcaagcagttcaggctacagctcagatgaaggagggacgaagaacatcaagtttaaaagccagttatgaagcatttaagaataatgactttcagttgggaaaagaattttcaatggccagggaaacagttggctattcatcatcttcggcacttatgacaacattaacacagaatgccagttcatcagcagccgactcacggagtggtcgaaagagcaaaaacaacaacaagtcttcaagccagcagtcatcatcttcctcctcctcttcttccttatcatcgtgttcttcatcatcaactgttgtacaagaaatctctcaacaaacaactgtagtgccagaatctgattcaaatagtcaggttgattggacttacgacccaaatgaacctcgatactgcatttgtaatcaggtatcttatggtgagatggtgggatgtgataaccaagattgccctatagaatggttccattatggctgcgttggattgacagaggcaccaaaaggcaaatggtactgtccacagtgcactgctgcaatgaagagaagaggcagcagacacaaataaaggtggtccttttgtttgatgaagaaataaacttcagctgaagattttatataggactttaaaaagaagagaagagaaagaagaaacaatgcatttccaggcaaccacttaaaggatttacatagacaatcctataagatcttgaacttgaattttatgggttgtattttaataatgtaagtaaattatttatgcactcctggtgtgctatgaatattattccagttagccttggattatttcagtggccaacatatgcagacatttgtactcctcaaccattttctcaaagtaatgggcattctatgatttagacttcaaggaattccaatgatgaagattttaaggaaagtattttatattcaacaggtatattctgctgcatgtactgtactccagagctgttatgtaacactgtatataaatggttgcaaaaaaaaaaaaaagtcagtgcttctaaaaagaatttaagataatggtttttaaaatgcctttataataagctttgtttctttgtgaaactaattcagcaggctgaaggaaatggttcatgtgataatgtgggctggtatcctctagagtacctgggtacataaacagaaactcctgtaggtaaaaagtaatttgtgccattagtctttctatgtttctgcatccagatagagtgcagttcatgagggagggggcgggggactgaaggggaaagggcgttaaagtgatacatttttataccaaatgtgtttatttttttgtgcaagtaatccttaaaattgcaattgtattaggtgttaaaataaagtttttaaaaaattacttgtatttatactttacatacttaataatgaaaatttctgaattccaattaactttcaactttcataatctaaaaagaatcagagacccaggacacagaatactgtgtaatctgtgatgtctttaatgatgtttagagtttgtgatataagaatacaggaaagacatttttaatgtaaatttgaaatgccaatgtatttttttaagaacatcatctggcttttccttcagtctaaaagacatgaaagaagtgtaagtatagcagttaaaacgaaaataatggttatgggtgttttgactggaggcaatgtagccaaatagagtaaagagacccccctggtcgggagctccaaattgagctatttttgattctaccacttactgatatgacagttaattcaaattttgtatcactctgggccttactacaccagggtgatgctgactgcagaatagatcttattctaaggtgctatttaaattataaatttgcatagtggaggttttatttaaagtataatattgagtctggtcgatagaaaaatccttaacttttaagatacttaatatatcatatatattttatattgaaacttactgggtccatcagatttctgctttaattaaaccacttatgagcttcttagaacttattcagataacagtgtaaaatctatgcagtgctacccaaagggtgtgaggtagataggggatttcaaagatctcttccacctttgagatcccatgattctgagctgccacagtctgattatacaactctaccagctccctaaacaagttaggttcatttgtgagtactcatcatttcataatatcatgattatcacgatttcatgatactcaatattttgagattttataaccctttaagaagtgataaataatgtagtattcaattcgtttatcaaagtatattgcctggaaatgctcacatgtatcatttacatcctctatatattatgactattccaaactcattcattttatagaaatggtcaaaggaaaaagccttatgtacagccttatttgaagagaaagttctttgtctgagtcaggaacatcctgttatccagctgctacatcccctttcagtgtgaattccactccttaccaaatcacttagaaaacactttgacaagttttaaactcaaacactgaatattttatgaagcatgtgtaaagaaagaaaccaaaatttggtgcaggtatttagtaatgggtagaacctgttaatatctgagtcatatataatggggccaaacatggaactacctcatcaaccccccaaaaatgtggccaactattaatattctttgtgacatttacaccaaggggcatagtaagtatttttggtattataaaatacacattcaaaatctctgttgtacaaaactcatgtaacagttgggacaaaatatccaaatgtgggttcacagttcacaggtggtgaaaattgaggccttactgctatggagtgtatatcaaaatgttcatggtgacacatttgaagcaataaatggcttaattaaatgccaaaa

SEQ ID NO: 14308 - DNA, 1222 bp, Homo sapiens
  source 1..1222: mol_type = unassigned DNA
tttttttttttttgccggagtcgagcgggtgctgctagcggaggcgccatattggaggggacaaaactccggcgacagcgagtgacacaaataaacccctggacccccttgttccctcagctctaagggccgcgatgttgtacctagaagactatctggaaatgattgagcagcttcctatggatctgcgggaccgcttcacggaaatgcgcgagatggacctgcaggtgcagaatgcaatggatcaactagaacaaagagtcagtgaattctttatgaatgcaaagaaaaataaacctgagtggagggaagagcaaatggcatccatcaaaaaagactactataaagctttggaagatgcagatgagaaggttcagttggcaaaccagatatatgacttgcagcacttctaaaagattgaaaacaccaagaagatagatagaatattcactatttctcatattgatgcaattgtggtgctctttttcatttgaaacatcttctcctaaaatatacactttaagaaatagtcatttctgtttttgcattaaagtaaattaaagcagaaaacacatgctcacttttggctaacttcagtgtatagatttcatacttatgttgtctttcctgggtacagatttattactgaacaagtacgtgtaagtaaaatgtcattggtgagcaggacacaagataaaaggtgaacaccacatatggtgtgaattgtaaatgcttataccacaaacttgaaaatgtgtcatgtagagccatggaaaatgtctagttgtttttatgtagtacacacattttaatggtgctaacaacctgggctcttttgttcatagagttattctgaaaaaaatttcataaaagacactgcctaaagataggtagaataggctgtagcttgatttactgtggaataaaaaccaaaaaaaaaaaggtcttaattgtttcagtctttaattatgtctataaacttagaaaaaggcatttacatttgaatctagactaatttgtttagtaacattcttcctcatattcaatgactgtatgtatcagtccttatttagagactgcctgctttttaattcatatagctctttggttctattctttgttttgtttattattttgttgttttattgcttgttagacctttactaaagatattttgtgtatttagaaaaaatataacataaatatatgctttttaaatatg

SEQ ID NO: 14309 - DNA, 5196 bp, Homo sapiens
  source 1..5196: mol_type = unassigned DNA
gaccccgagcgcggccgcggacgaagatggcgaccgccatgtacttggagcactatctggacagtatcgagaaccttccctgcgaacttcagaggaacttccagctgatgcgagagctggaccagaggacggaagataagaaagcagagattgacatcctggctgcagagtacatctccacggtgaagacgctgtctccagaccagcgcgtggagcgcctgcagaagatccagaacgcctacagcaagtgcaaggaatacagtgacgacaaagtgcagctggccatgcagacctacgagatggtggataaacacattcgaaggcttgatgcagacctggcgcgctttgaagcagatctgaaggacaagatggagggcagtgattttgaaagctccggagggcgagggttaaaaaaaggccggggtcagaaagaaaaaagagggtcccggggccgaggcaggaggacatcagaggaagacacaccaaagaaaaagaagcacaaaggagggtctgagttcactgacaccatcctgtccgtgcacccctctgatgtgctggacatgcccgtggacccaaacgaacccacgtactgcctgtgccaccaggtctcctatggggagatgattggctgtgacaatccagactgtccaattgagtggtttcactttgcctgcgtggaccttaccacgaaacccaaaggaaaatggttctgtccacggtgtgtccaggaaaagaggaagaagaagtaggaggagctgtgtgcccggatccgaggagcaagttaatctgtcccttcattcgtgtcgcaatatttcccttccttttaaaactaccttgttcggttgatacttagtaactccgtggccagttgaagcgctggatgtttcctagaacaagaaccaccaaagcctgttcgcacagaagggcgaccttgcagggactcgccgccgcgacctcagtgtggcttttacaggactccccccgagcatcagcagggaccccggcggacgtgggcgggcgcgcgtgagctcgggctgcccggccgggcgtgcgggcggggacatggtaacctggtccacggagggcggccgccaccctcgcgtagctttcctgtggttttccaggactgtccggtacagcccgggctccgcgtgccccgcccgctggagcacctgccaccgaggcgcgcgtggggccactgccgtggcggcggctgccctcctcacactcggctccgcgccgcctccggccaccgtgcgctcccgcgtggggcgcctcggatgggcccgggagggctgggggctcttccctggaggaagcggcctccgcttcgctggcgccgcctttttagcttggacttcagtcctccctcggggactcacctccggagtaaacggctcttcattagcttggagtggccgcaggtcccgtgaccagcacccgcgagaccctgtgcgacagctgggctgatgctccgtttctctgggaattggtgattttttactgtgaagatgaaattaccctaatagcatgaagatcgtgggtctgtgtgtccgtgaagtgagtcccgtctgccaggagctgacgaaccacgaatgcttctgcctgtgctgtgcattcccaggcccgcagctcccggtcgaggggactccgatgtgaatttgttgtgaatttgttgtgccacaatagcagttctggaatgaagctaggaaactcgagtgtgctttttgtttaatgagcgttcaccaagctgagccggagccatcctttcggtggtagttggggaaggctatgcagatttgctctgttgtgacgcgttggtgacggtgcccagcctgcggttccccacagcatcgcaggcgctcggaaatcctctcccgtgcctttagaggaaggagaggattgctgaggaatgcagggacgcctgtttctgtcctcacaccacagaaagaaacctgagggaaaactgagacgtgaggttcctgatttaagaagcctgggtttcttcatggtggggggccatttggaatgacagcctcacttccttctgatggctacatctgtatcttttcctcctgtgtttaatgtttcactagggagaggaaataaagcagaaggaacgtgtgaagctctgtgtctcagacggggccctcccgtcgagaagctggtagtcagtgagtgagaacaagagaacaagaacaccctgaacagtcctggttgggatggtgtccacattcatgttctgcggttcttgaacacacggatgcctctgggccacctgtccttttccgagggtgtgggtgggagtggatcctccgggcgcaggtgccaggcaggtgcaggcgggcggtcggccactgctgctgctcgtccctgccagtgtctgggcctgaaggggctccctccaagcggtgccttcctgcggcttagaagggaaagcgccagagagggcaggctacagtgcttcacacccttcgccacggctgtgaaactggagatgggtgggttttgtatgttaatttttttttttgagacggagtcttgctctgtcacccaggctggagagcagtggcgtgatctcggctcactgcaagctccgcctcccgggttcacgccattctcctgcctcagcccccccgagtagctgggactacaggcgcccgccaccacgcctggctaattttttatatttttagtagagacagggtttcaccatgttaaccaggatggtctcgatctcctgacctcacgatttgcccgcctcggcttcccagagtgctgggattacaggcgtgagccaccgcgcctggccacccagctaagtttgtatttttgttggagacggggtttcaccatattggccagactggtctcaaactcctggggtcaaatgatccgcctgcgtcggcttcccagagtgctgggattacaggtgtcagccactgcgctcagctgggagatgaattttcatttaatgacttaactttttgttagcacaggttttgtgtgtgtgtgtgtgtgtgtgttttgttttttgttttgtgtttttgaaacggagttttgctctgtcacccaggctggaatgcaatggcaccatcttggctcactgcaacctctgcttcctgggttcaagtgattctcttgccttagcctcccgagcagctgggattataggcgtccaccaccacgcccagctaatttttgtatttttagtagaaatggggtttcaccatgtgtggccaggctggtctcgaactcctgacctgaagtgatccacccgcctcgacctcccaaagtgctgggatgacaggcatgagccaccgcacccggccaacacagatgtttattgatcgtggaggatacattgtggaaaatgtttttctctcttttaccatttttgggaagagggataggtaagtgcagggagtttgtgctgaaacagcgcctggcaatttttcagaaatgaatttgatattgcgctccacctttgagctgttcacacctgtggctacccctggaaagcgctggggttgttgatgcttttggctgcccggcttcctgaggtctcgctgctttttggggaaagatgactggcttccctgtgggacgcttttgtctgacacgtgatgatgtggtcctgcctgccactgtgcaccatcccaggtattgaattttgaccttttcttttcaagtttctgtgcttagtgtttttaatgtttacttttgccacttacaataatatcaccaaaataatatgcatagagttttggaagaaacatagaaaacatgagcagaatgagacaattccttgggctgtagtttggacccaactgaatcctgagtgctctgtggctgacgctgtctacccgtgggagagacacactcaggagtggccgtttggccagaaaagaaggtcatggcccctggcctggcccccgccctgcagggacacagaagccacaccatttgcaccatccacgccttgctccagaaggcctggccgccttctccctgggggtgattcaaggatttggtctcggaccagacccccctccacagctgcccggccccagacccatctcttggattgagggtgtgtgggctggaaccagtgggtcactgtggcagcttcatctgagccgaaggtgtgggtcctctgtggctgtgcgattgacctcgatgggaaggagcgttctacccattttccttgttttcagtgctgcggtatcagtcagtgatctgaggaaatcctgtaggggaaggcaggctgcagtgaaaacaggagctggtgaaaccgagccctctgcatctgcgaatgtgccctaggtgctgctgctggggacatggatgccaagcggaggcctgcgtggcctcctgagcagcagctgaccgcccgtctcatgctggacgggacccctgggcgggtggacatgagaccactgttggccagggacgccgtgcggaggcctacgtggctgcctgagcagcagctgaccgcccgtctcactgttggccagggctttgtggcgtgggtgttttccagtctgcctggagcagcgagaagcagctgtgcagactggtggcggtgggagggtttgctgggactgatggggacaccggccagcttgtctggtgtccagcagccctgccggacttggcctcctgtcctgtcgttgggagccctggctggggctgctttgagcaatgacgctggcccagagcagcttcccacatgaccccagagccgagggtctgccctgtcctaggttaggtcttcatggtttagagtaaaaccgtgagggatgttaattatgggcattgaagacttaaggttttcttaaatttttagtgagcagtgattggccttcaatacttgtgctgagaggaattttaagccaggggaagtgtaagaaaatgttcccattcaggagagattgtgttggagtttctttcttcctctgtatgtattttgtggtgtccacctttaaccacgtttcatccaaaacgatgatgcagctttaacatgaatgttacatttttattttcaaggaattattatctatgttccctttgtaaaggaaagataatgttgtaaatctttttattagataatgtaaagatgtatatcagtatttttggatcatgttatagattatggatatattgtttaataaataaagtattttttggaacaaa

SEQ ID NO: 14310 - DNA, 946 bp, Homo sapiens
  source 1..946: mol_type = unassigned DNA
gagcgcggccgcggacgaagatggcgaccgccatgtacttggagcactatctggacagtatcgagaaccttccctgcgaacttcagaggaacttccagctgatgcgagagctggaccagaggacggaagataagaaagcagagattgacatcctggctgcagagtacatctccacggtgaagacgctgtctccagaccagcgcgtggagcgcctgcagaagatccagaacgcctacagcaagtgcaaggaatacagtgacgacaaagtgcagctggccatgcagacctacgagatggtggataaacacattcgaaggcttgatgcagacctggcgcgctttgaagcagatctgaaggacaagatggagggcagtgattttgaaagctccggagggcgagggttaaaaaaaggccggggtcagaaagaaaaaagagggtcccggggccgaggcaggaggacatcagaggaagacacaccaaagaaaaagaagcacaaaggagggtctgagttcactgacaccatcctgtccgtgcacccctctgatgtgctggacatgcccgtggacccaaacgaacccacgtactgcctgtgccaccaggtctcctatggggagatgattggctgtgacaatccagactgtccaattgagtggtttcactttgcctgcgtggaccttaccacgaaacccaaaggaaaatgatttcatttaaataaaaacctgtagtctgggcaacatcgggagaccccaactctacaaaaaatacaaaaattagctgggcgtggtggtgcgtgcctgtggtcccaactacctgggaggcggaggcgggaggatggcttgagcctggaagtccgaggcttcagtgagctgagatcgcgccactgcactccagcctgggcgagagagcaagaccctgtctcaaataaataaataaaaagataaaaacc

SEQ ID NO: 14311 - DNA, 2403 bp, Homo sapiens
  source 1..2403: mol_type = unassigned DNA
aagtgtttgaggaagtcgcgccgcgctgcccgcgttaagattcccgcattttaatgttttcaggggggtgtcatagccccgggtttggccgccccagccccgccttccccgccccggggagcccgccccctgccccgcgtccctgccgacaggaaacaggtgagcagattgccatcaagcagtgccggcaggagctcagcccccggaaccgagagcggtggtgcctggagatccagatcatgagaaggctgacccaccccaatgtggtggctgcccgagatgtccctgaggggatgcagaacttggcgcccaatgacctgcccctgctggccatggagtactgccaaggaggagatctccggaagtacctgaaccagtttgagaactgctgtggtctgcgggaaggtgccatcctcaccttgctgagtgacattgcctctgcgcttagataccttcatgaaaacagaatcatccatcgggatctaaagccagaaaacatcgtcctgcagcaaggagaacagaggttaatacacaaaattattgacctaggatatgccaaggagctggatcagggcagtctttgcacatcattcgtggggaccctgcagtacctggccccagagctactggagcagcagaagtacacagtgaccgtcgactactggagcttcggcaccctggcctttgagtgcatcacgggcttccggcccttcctccccaactggcagcccgtgcagtggcattcaaaagtgcggcagaagagtgaggtggacattgttgttagcgaagacttgaatggaacggtgaagttttcaagctctttaccctaccccaataatcttaacagtgtcctggctgagcgactggagaagtggctgcaactgatgctgatgtggcacccccgacagaggggcacggatcccacgtatgggcccaatggctgcttcaaggccctggatgacatcttaaacttaaagctggttcatatcttgaacatggtcacgggcaccatccacacctaccctgtgacagaggatgagagtctgcagagcttgaaggccagaatccaacaggacacgggcatcccagaggaggaccaggagctgctgcaggaagcgggcctggcgttgatccccgataagcctgccactcagtgtatttcagacggcaagttaaatgagggccacacattggacatggatcttgtttttctctttgacaacagtaaaatcacctatgagactcagatctccccacggccccaacctgaaagtgtcagctgtatccttcaagagcccaagaggaatctcgccttcttccagctgaggaaggtgtggggccaggtctggcacagcatccagaccctgaaggaagattgcaaccggctgcagcagggacagcgagccgccatgatgaatctcctccgaaacaacagctgcctctccaaaatgaagaattccatggcttccatgtctcagcagctcaaggccaagttggatttcttcaaaaccagcatccagattgacctggagaagtacagcgagcaaaccgagtttgggatcacatcagataaactgctgctggcctggagggaaatggagcaggctgtggagctctgtgggcgggagaacgaagtgaaactcctggtagaacggatgatggctctgcagaccgacattgtggacttacagaggagccccatgggccggaagcaggggggaacgctggacgacctagaggagcaagcaagggagctgtacaggagactaagggaaaaacctcgagaccagcgaactgagggtgacagtcaggaaatggtacggctgctgcttcaggcaattcagagcttcgagaagaaagtgcgagtgatctatacgcagctcagtaaaactgtggtttgcaagcagaaggcgctggaactgttgcccaaggtggaagaggtggtgagcttaatgaatgaggatgagaagactgttgtccggctgcaggagaagcggcagaaggagctctggaatctcctgaagattgcttgtagcaaggtccgtggtcctgtcagtggaagcccggatagcatgaatgcctctcgacttagccagcctgggcagctgatgtctcagccctccacggcctccaacagcttacctgagccagccaagaagagtgaagaactggtggctgaagcacataacctctgcaccctgctagaaaatgccatacaggacactgtgagggaacaagaccagagtttcacggccctagactggagctggttacagacggaagaagaagagcacagctgcctggagcaggcctcatgatgtggggggactcgaccccctgacatggggcagcccatagcaggccttgtgcagtggggggactcgaccccctgacatggggctg

SEQ ID NO: 14312 - DNA, 1654 bp, Homo sapiens
  source 1..1654: mol_type = unassigned DNA
aagggcgaccgcgaaactgggactttctcggagcgccggggccctaccagcgttcacagtccgccgctcccacccttctcacgtctgacggactctgctgacagcccttgccctgttggatgaataggcacctctggaagagccaactgtgtgagatggtgcagcccagtggtggcccggcagcagatcaggacgtactgggcgaagagtctcctctggggaagccagccatgctgcacctgccttcagaacagggcgctcctgagaccctccagcgctgcctggaggagaatcaagagctccgagatgccatccggcagagcaaccagattctgcgggagcgctgcgaggagcttctgcatttccaagccagccagagggaggagaaggagttcctcatgtgcaagttccaggaggccaggaaactggtggagagactcggcctggagaagctcgatctgaagaggcagaaggagcaggctctgcgggaggtggagcacctgaagagatgccagcagcagatggctgaggacaaggcctctgtgaaagcccaggtgacgtccttgctcggggagctgcaggagagccagagtcgcttggaggctgccactaaggaatgccaggctctggagggtcggaggaagctggcccagttgcaggtggcctatcaccagctcttccaagaatacgacaaccacatcaagagcagcgtggtgggcagtgagcggaagcgagcggatatctacaaggcggacttccaggctgagaggcaggcccgggagaagctggccgagaagaaggagctcctgcaggagcagctggagcagctgcagagggagtacagcaaactgaaggccagctgtcaggagtcggccaggatcgaggacatgaggaagcggcatgtcgaggtctcccaggcccccttgccccccgcccctgcctacctctcctctcccctggccctgcccagccagaggaggagcccccccgaggagccacctgacttctgctgtcccaagtgccagtatcaggcccctgatatggacaccctgcagatacatgtcatggagtgcattgagtagggccggccagtgcaaggccactgcctgccgaggacgtgcccgggaccgtgcagtctgcgctttcctctcccgcctgcctagcccaggatgaagggctgggtggccacaactgggatgccacctggagccccacccaggagctggccgcggcaccttacgcttcagctgttgatccgctggtcccctcttttggggtagatgcggccccgatcaggcctgactcgctgctctttttgttcccttctgtctgctcgaaccacttgcctcgggctaatccctccctcttcctccacccggcactggggaagtcaagaatggggcctggggctctcagggagaactgcttcccctggcagagctgggtggcagctcttcctcccaccggacaccgacccgcccgctgctgtgccctgggagtgctgccctcttaccatgcacacgggtgctctccttttgggctgcatgctattccattttgcagccagaccgatgtgtatttaaccagtcactattgatggacatttgggttgtttcccatctttttgttaccataaataatggcatagtaaaaa

SEQ ID NO: 14313 - DNA, 2778 bp, Homo sapiens
  source 1..2778: mol_type = unassigned DNA
agtgtttgaggaagtcgcgccgcgctgcccgcgttaagattcccgcattttaatgttttcaggggggtgtcatagccccgggtttggccgccccagccccgccttccccgccccggggagcccgccccctgccccgcgtccctgccgacagagttagcacgacatcagtatgagctggtcaccttccctgacaacgcagacatgtggggcctgggaaatgaaagagcgccttgggacagggggatttggaaatgtcatccgatggcacaatcaggcattcaaaagtgcggcagaagagtgaggtggacattgttgttagcgaagacttgaatggaacggtgaagttttcaagctctttaccctaccccaataatcttaacagtgtcctggctgagcgactggagaagtggctgcaactgatgctgatgtggcacccccgacagaggggcacggatcccacgtatgggcccaatggctgcttcaaggccctggatgacatcttaaacttaaagctggttcatatcttgaacatggtcacgggcaccatccacacctaccctgtgacagaggatgagagtctgcagagcttgaaggccagaatccaacaggacacgggcatcccagaggaggaccaggagctgctgcaggaagcgggcctggcgttgatccccgataagcctgccactcagtgtatttcagacggcaagttaaatgagggccacacattggacatggatcttgtttttctctttgacaacagtaaaatcacctatgagactcagatctccccacggccccaacctgaaagtgtcagctgtatccttcaagagcccaagaggaatctcgccttcttccagctgaggaaggtgtggggccaggtctggcacagcatccagaccctgaaggaagattgcaaccggctgcagcagggacagcgagccgccatgatgaatctcctccgaaacaacagctgcctctccaaaatgaagaattccatggcttccatgtctcagcagctcaaggccaagttggatttcttcaaaaccagcatccagattgacctggagaagtacagcgagcaaaccgagtttgggatcacatcagataaactgctgctggcctggagggaaatggagcaggctgtggagctctgtgggcgggagaacgaagtgaaactcctggtagaacggatgatggctctgcagaccgacattgtggacttacagaggagccccatgggccggaagcaggggggaacgctggacgacctagaggagcaagcaagggagctgtacaggagactaagggaaaaacctcgagaccagcgaactgagggtgacagtcaggaaatggtacggctgctgcttcaggcaattcagagcttcgagaagaaagtgcgagtgatctatacgcagctcagtaaaactgtggtttgcaagcagaaggcgctggaactgttgcccaaggtggaagaggtggtgagcttaatgaatgaggatgagaagactgttgtccggctgcaggagaagcggcagaaggagctctggaatctcctgaagattgcttgtagcaaggtccgtggtcctgtcagtggaagcccggatagcatgaatgcctctcgacttagccagcctgggcagctgatgtctcagccctccacggcctccaacagcttacctgagccagccaagaagagtgaagaactggtggctgaagcacataacctctgcaccctgctagaaaatgccatacaggacactgtgagggaacaagaccagagtttcacggccctagactggagctggttacagacggaagaagaagagcacagctgcctggagcaggcctcatgatgtggggggactcgaccccctgacatggggcagcccatagcaggccttgtgcagtggggggactcgaccccctgacatggggctgcctggagcaggccgcgtgacgtggggctgcctggccgcggctctcacatggtggttcctgctgcactgatggcccaggggtctctggtatccagatggagctctcgcttcctcagcagctgtgactttcacccaggacccaggacgcagccctccgtgggcactgccggcgccttgtctgcacactggaggtcctccattacagaggcccagcgcacatcgctggccccacaaacgttcaggggtacagccatggcagctccttcctctgccgtgagaaaagtgcttggagtacggtttgccacacacgtgactggacagtgtccaattcaaatctttcagggcagagtccgagcagcgcttggtgacagcctgtcctctcctgctctccaaaggccctgctccctgtcctctctcactttacagcttgtgtttcttctggattcagcttctcctaaacagacagtttaattatagttgcggcctggccccatcctcacttcctctttttatttcactgctgctaaaattgtgtttttacctactactttggtggttgtcctcttttcggcaaagttggagcgagtgccaagctctccatctgtggtcctttctgccaagagcgactcatagtaaccaggatgggagagcagctgccttattctgaatcccaaaaattacttgggggtgattgtcacagaggagggacagaaagggtatctgctgaccaccagcctgcctacccatgcccatgtctccattcctgctcaagcgtgtgtgctgggccggggagtccctgtctctcacagcatctagcagtattattaaatggattcatttt

SEQ ID NO: 14314 - DNA, 2501 bp, Homo sapiens
  source 1..2501: mol_type = unassigned DNA
ggaagtgtttgaggaagtcgcgccgcgctgcccgcgttaagattcccgcattttaatgttttcaggggggtgtcatagccccgggtttggccgccccagccccgccttccccgccccggggagcccgccccctgccccgcgtccctgccgacagagttagcacgacatcagtatgagctggtcaccttccctgacaacgcagacatgtggggcctgggaaatgaaagagcgccttgggacagggggatttggaaatgtcatccgatggcacaatcaggctgacccaccccaatgtggtggctgcccgagatgtccctgaggggatgcagaacttggcgcccaatgacctgcccctgctggccatggagtactgccaaggaggagatctccggaagtacctgaaccagtttgagaactgctgtggtctgcgggaaggtgccatcctcaccttgctgagtgacattgcctctgcgcttagataccttcatgaaaacagaatcatccatcgggatctaaagccagaaaacatcgtcctgcagcaaggagaacagaggttaatacacaaaattattgacctaggatatgccaaggagctggatcagggcagtctttgcacatcattcgtggggaccctgcagtacctggccccagagctactggagcagcagaagtacacagtgaccgtcgactactggagcttcggcaccctggcctttgagtgcatcacgggcttccggcccttcctccccaactggcagcccgtgcagtggcattcaaaagtgcggcagaagagtgaggtggacattgttgttagcgaagacttgaatggaacggtgaagttttcaagctctttaccctaccccaataatcttaacagtgtcctggctgagcgactggagaagtggctgcaactgatgctgatgtggcacccccgacagaggggcacggatcccacgtatgggcccaatggctgcttcaaggccctggatgacatcttaaacttaaagctggttcatatcttgaacatggtcacgggcaccatccacacctaccctgtgacagaggatgagagtctgcagagcttgaaggccagaatccaacaggacacgggcatcccagaggaggaccaggagctgctgcaggaagcgggcctggcgttgatccccgataagcctgccactcagtgtatttcagacggcaagttaaatgagggccacacattggacatggatcttgtttttctctttgacaacagtaaaatcacctatgagactcagatctccccacggccccaacctgaaagtgtcagctgtatccttcaagagcccaagaggaatctcgccttcttccagctgaggaaggtgtggggccaggtctggcacagcatccagaccctgaaggaagattgcaaccggctgcagcagggacagcgagccgccatgatgaatctcctccgaaacaacagctgcctctccaaaatgaagaattccatggcttccatgtctcagcagctcaaggccaagttggatttcttcaaaaccagcatccagattgacctggagaagtacagcgagcaaaccgagtttgggatcacatcagataaactgctgctggcctggagggaaatggagcaggctgtggagctctgtgggcgggagaacgaagtgaaactcctggtagaacggatgatggctctgcagaccgacattgtggacttacagaggagccccatgggccggaagcaggggggaacgctggacgacctagaggagcaagcaagggagctgtacaggagactaagggaaaaacctcgagaccagcgaactgagggtgacagtcaggaaatggtacggctgctgcttcaggcaattcagagcttcgagaagaaagtgcgagtgatctatacgcagctcagtaaaactgtggtttgcaagcagaaggcgctggaactgttgcccaaggtggaagaggtggtgagcttaatgaatgaggatgagaagactgttgtccggctgcaggagaagcggcagaaggagctctggaatctcctgaagattgcttgtagcaaggtccgtggtcctgtcagtggaagcccggatagcatgaatgcctctcgacttagccagcctgggcagctgatgtctcagccctccacggcctccaacagcttacctgagccagccaagaagagtgaagaactggtggctgaagcacataacctctgcaccctgctagaaaatgccatacaggacactgtgagggaacaagaccagagtttcacggccctagactggagctggttacagacggaagaagaagagcacagctgcctggagcaggcctcatgatgtggggggactcgaccccctgacatggggcagcccatagcaggccttgtgcagtggggggactcgaccccctgacatggggctgcctggagcaggccgcgtgacgtggggctgcctggccgcggctctcacatggtggttcctgctgcactg

SEQ ID NO: 14315 - DNA, 3086 bp, Homo sapiens
  source 1..3086: mol_type = unassigned DNA
gtgacgtcagagcaggaagtgtttgaggaagtcgcgccgcgctgcccgcgttaagattcccgcattttaatgttttcaggggggtgtcatagccccgggtttggccgccccagccccgccttccccgccccggggagcccgccccctgccccgcgtccctgccgacagagttagcacgacatcagtatgagctggtcaccttccctgacaacgcagacatgtggggcctgggaaatgaaagagcgccttgggacagggggatttggaaatgtcatccgatggcacaatcaggaaacaggtgagcagattgccatcaagcagtgccggcaggagctcagcccccggaaccgagagcggtggtgcctggagatccagatcatgagaaggctgacccaccccaatgtggtggctgcccgagatgtccctgaggggatgcagaacttggcgcccaatgacctgcccctgctggccatggagtactgccaaggaggagatctccggaagtacctgaaccagtttgagaactgctgtggtctgcgggaaggtgccatcctcaccttgctgagtgacattgcctctgcgcttagataccttcatgaaaacagaatcatccatcgggatctaaagccagaaaacatcgtcctgcagcaaggagaacagaggttaatacacaaaattattgacctaggatatgccaaggagctggatcagggcagtctttgcacatcattcgtggggaccctgcagtacctggccccagagctactggagcagcagaagtacacagtgaccgtcgactactggagcttcggcaccctggcctttgagtgcatcacgggcttccggcccttcctccccaactggcagcccgtgcagtggcattcaaaagtgcggcagaagagtgaggtggacattgttgttagcgaagacttgaatggaacggtgaagttttcaagctctttaccctaccccaataatcttaacagtgtcctggctgagcgactggagaagtggctgcaactgatgctgatgtggcacccccgacagaggggcacggatcccacgtatgggcccaatggctgcttcaaggccctggatgacatcttaaacttaaagctggttcatatcttgaacatggtcacgggcaccatccacacctaccctgtgacagaggatgagagtctgcagagcttgaaggccagaatccaacaggacacgggcatcccagaggaggaccaggagctgctgcaggaagcgggcctggcgttgatccccgataagcctgccactcagtgtatttcagacggcaagttaaatgagggccacacattggacatggatcttgtttttctctttgacaacagtaaaatcacctatgagactcagatctccccacggccccaacctgaaagtgtcagctgtatccttcaagagcccaagaggaatctcgccttcttccagctgaggaaggtgtggggccaggtctggcacagcatccagaccctgaaggaagattgcaaccggctgcagcagggacagcgagccgccatgatgaatctcctccgaaacaacagctgcctctccaaaatgaagaattccatggcttccatgtctcagcagctcaaggccaagttggatttcttcaaaaccagcatccagattgacctggagaagtacagcgagcaaaccgagtttgggatcacatcagataaactgctgctggcctggagggaaatggagcaggctgtggagctctgtgggcgggagaacgaagtgaaactcctggtagaacggatgatggctctgcagaccgacattgtggacttacagaggagccccatgggccggaagcaggggggaacgctggacgacctagaggagcaagcaagggagctgtacaggagactaagggaaaaacctcgagaccagcgaactgagggtgacagtcaggaaatggtacggctgctgcttcaggcaattcagagcttcgagaagaaagtgcgagtgatctatacgcagctcagtaaaactgtggtttgcaagcagaaggcgctggaactgttgcccaaggtggaagaggtggtgagcttaatgaatgaggatgagaagactgttgtccggctgcaggagaagcggcagaaggagctctggaatctcctgaagattgcttgtagcaaggtccgtggtcctgtcagtggaagcccggatagcatgaatgcctctcgacttagccagcctgggcagctgatgtctcagccctccacggcctccaacagcttacctgagccagccaagaagagtgaagaactggtggctgaagcacataacctctgcaccctgctagaaaatgccatacaggacactgtgagggaacaagaccagagtttcacggccctagactggagctggttacagacggaagaagaagagcacagctgcctggagcaggcctcatgatgtggggggactcgaccccctgacatggggcagcccatagcaggccttgtgcagtggggggactcgaccccctgacatggggctgcctggagcaggccgcgtgacgtggggctgcctggccgcggctctcacatggtggttcctgctgcactgatggcccaggggtctctggtatccagatggagctctcgcttcctcagcagctgtgactttcacccaggacccaggacgcagccctccgtgggcactgccggcgccttgtctgcacactggaggtcctccattacagaggcccagcgcacatcgctggccccacaaacgttcaggggtacagccatggcagctccttcctctgccgtgagaaaagtgcttggagtacggtttgccacacacgtgactggacagtgtccaattcaaatctttcagggcagagtccgagcagcgcttggtgacagcctgtcctctcctgctctccaaaggccctgctccctgtcctctctcactttacagcttgtgtttcttctggattcagcttctcctaaacagacagtttaattatagttgcggcctggccccatcctcacttcctctttttatttcactgctgctaaaattgtgtttttacctac

SEQ ID NO: 14316 - DNA, 5905 bp, Homo sapiens
  source 1..5905: mol_type = unassigned DNA
agtgctgcggctgcctagttgacgcacccattgagtcgctggcttctttgcagcgcttcagcgttttcccctggagggcgcctccatccttggaggcctagtgccgtcggagagagagcgggagccgcggacagagacgcgtgcgcaattcggagccgactctgggtgcggactgtgggagctgactctgggtagccggctgcgcgtggctggggaggcgaggccggacgcacctctgtttgggggtcctcagagattaatgattcatcaagggatagttgtacttgtctcgtgggaatcacttcatcatgcgaaatctgaaattatttcggaccctggagttcagggatattcaaggtccagggaatcctcagtgcttctctctccgaactgaacaggggacggtgctcattggttcagaacatggcctgatagaagtagaccctgtctcaagagaagtgaaaaatgaagtttctttggtggcagaaggctttctcccagaggatggaagtggccgcattgttggtgttcaggacttgctggatcaggagtctgtgtgtgtggccacagcctctggagacgtcatactctgcagtctcagcacacaacagctggagtgtgttgggagtgtagccagtggtatctctgttatgagttggagtcctgaccaagagctggtgcttcttgccacaggtcaacagaccctgattatgatgacaaaagattttgagccaatcctggagcagcagatccatcaggatgattttggtgaaagcaagtttatcactgttggatggggtaggaaggagacacagttccatggatcagaaggcagacaagcagcttttcagatgcaaatgcatgagtctgctttgccctgggatgaccatagaccacaagttacctggcggggggatggacagttttttgctgtgagtgttgtttgcccagaaacaggggctcggaaggtcagagtgtggaaccgagagtttgctttgcagtcaaccagtgagcctgtggcaggactgggaccagccctggcttggaaaccctcaggcagtttgattgcatctacacaagataaacccaaccagcaggatattgtgttttttgagaaaaatggactccttcatggacactttacacttcccttccttaaagatgaggttaaggtaaatgacttgctctggaatgcagattcctctgtgcttgcagtctggctggaagaccttcagagagaagaaagctccattccgaaaacctgtgttcagctctggactgttggaaactatcactggtatctcaagcaaagtttatccttcagcacctgtgggaagagcaagattgtgtctctgatgtgggaccctgtgaccccataccggctgcatgttctctgtcagggctggcattacctcgcctatgattggcactggacgactgaccggagcgtgggagataattcaagtgacttgtccaatgtggctgtcattgatggaaacagggtgttggtgacagtcttccggcagactgtggttccgcctcccatgtgcacctaccaactgctgttcccacaccctgtgaatcaagtcacattcttagcacaccctcaaaagagtaatgaccttgctgttctagatgccagtaaccagatttctgtttataaatgtggtgattgtccaagtgctgaccctacagtgaaactgggagctgtgggtggaagtggatttaaagtttgccttagaactcctcatttggaaaagagatacaaaatccagtttgagaataatgaagatcaagatgtaaacccgctgaaactaggccttctcacttggattgaagaagacgtcttcctggctgtaagccacagtgagttcagcccccggtctgtcattcaccatttgactgcagcttcttctgagatggatgaagagcatggacagctcaatgtcagttcatctgcagcggtggatggggtcataatcagtctatgttgcaattccaagaccaagtcagtagtattacagctggctgatggccagatatttaagtacctttgggagtcaccttctctggctattaaaccatggaagaactctggtggatttcctgttcggtttccttatccatgcacccagaccgaattggccatgattggagaagaggaatgtgtccttggtctgactgacaggtgtcgctttttcatcaatgacattgaggttgcgtcaaatatcacgtcatttgcagtatatgatgagtttttattgttgacaacccattcccatacctgccagtgtttttgcctgagggatgcttcatttaaaacattacaggccggcctgagcagcaatcatgtgtcccatggggaagttctgcggaaagtggagaggggttcacggattgtcactgttgtgccccaggacacaaagcttgtattacagatgccaaggggaaacttagaagttgttcatcatcgagccctggttttagctcagattcggaagtggttggacaaacttatgtttaaagaggcatttgaatgcatgagaaagctgagaatcaatctcaatctgatttatgatcataaccctaaggtgtttcttggaaatgtggaaaccttcattaaacagatagattctgtgaatcatattaacttgttttttacagaattgaaagaagaagatgtcacgaagaccatgtaccctgcaccagttaccagcagtgtctacctgtccagggatcctgacgggaataaaatagaccttgtctgcgatgctatgagagcagtcatggagagcataaatcctcataaatactgcctatccatacttacatctcatgtaaagaagacaaccccagaactggaaattgtactgcaaaaagtacacgagcttcaaggaaatgctccctctgatcctgatgctgtgagtgctgaagaggccttgaaatatttgctgcatctggtagatgttaatgaattatatgatcattctcttggcacctatgactttgatttggtcctcatggtagctgagaagtcacagaaggatcccaaagaatatcttccatttcttaatacacttaagaaaatggaaactaattatcagcggtttactatagacaaatacttgaaacgatatgaaaaagccattggccacctcagcaaatgtggacctgagtacttcccagaatgcttaaacttgataaaagataaaaacttgtataacgaagctctgaagttatattcaccaagctcacaacagtaccaggatatcagcattgcttatggggagcacctgatgcaggagcacatgtatgagccagcggggctcatgtttgcccgttgcggtgcccacgagaaagctctctcagcctttctgacatgtggcaactggaagcaagccctctgtgtggcagcccagcttaactttaccaaagaccagctggtgggcctcggcagaactctggcaggaaagctggttgagcagaggaagcacattgatgcggccatggttttggaagagtgtgcccaggattatgaagaagctgtgctcttgctgttagaaggagctgcctgggaagaagctttgaggctggtatacaaatataacagactggatattatagaaaccaacgtaaagccttccattttagaagcccagaaaaattatatggcatttctggactctcagacagccacattcagtcgccacaagaaacgtttattggtagttcgagagctcaaggagcaagcccagcaggcaggtctggatgatgaggtaccccacgggcaagagtcagacctcttctctgaaactagcagtgtcgtgagtggcagtgagatgagtggcaaatactcccatagtaactccaggatatcagcgagatcatccaagaatcgccgaaaagcggagcggaagaagcacagcctcaaagaaggcagtccgctggaggacctggccctcctggaggcactgagtgaagtggtgcagaacactgaaaacctgaaagatgaagtataccatattttaaaggtactctttctctttgagtttgatgaacaaggaagggaattacagaaggcctttgaagatacgctgcagttgatggaaaggtcacttccagaaatttggactcttacttaccagcagaattcagctaccccggttctaggtcccaattctactgcaaatagtatcatggcatcttatcagcaacagaagacttcggttcctgttcttgatgctgagctttttataccaccaaagatcaacagaagaacccagtggaagctgagcctgctagactgagtgactgcagttaggagggatccgacagagaagaccatttccactcattcctgttgtcctaccaccccttgctctttgagggctggctattgagaactggaaagagtaaaatgataacttaccttagcattgccaagaacttcagcagacaacaagcaattctatttattttatgttgtgtatacatcttgatcattagcaagacattaagctttaaccattatggcaccattttgtgagaatgattgttctttcacttgggctgtttgagagcataattatggtaatcatgagattaatgtttcatgatttctacctccaaagtgtgaagacaagtaaaacaatgtttctaaattgtcttattttgttggcggagaagattacaatggctattagtgctacatttggtcaaatgtaatcacttaaatagcttcttgtcaccttaaactaaagcagaataaaaagtatcctttgaaattataagccctcctttgctgacagctattattttgtaacatcttaccaggtcatgtgctttcagttataactgggctgagcctcctataattacaatgtctatagggactgttttactgcctgtgtattttctgctagagagttagcaatgttagagctagaacagattagaatttctaaacagtatcatgcacagttggtgtgagtgatcagtgtgcattgtatggcatgcatggttgtgaattattctctgttctccaaatactgtttctttaactcagatatttttgttagtgtctaggccacttcatttatttttcgtcatggtactttactgacttctctttattcaattctccacgccctcaccaaaaaaaactgtctcaaaatgagaatattttattttcatggtgagtctagaaaacgcccacttcattctgattaaaaattcttccatgttttaaatatcagaaccagacctttcttactgtgtatcttagcccatttgtgtctctataacaacaaccagctttcaaaggaactaatagagtgaaaactcactcattaccacgaggatggcacaagcgattcacgtaggatctgcccctgtgaccaaaacacctcccattgggccccacttccaacactggtgatcacatttcaacatgaggtttagggaaacaaatgcctaaactacagcactgtacataaactaacaggaaatgctgcttttgatcctcaaagaagtgatatagccaaaattgtaatttaagaagcctttcccagtatagcaagatgttaactatagaatcaatctaggagtattcactgtaaaattcaacttttctgtatgtttgaacattttcacaatctcataggagtttttaaaaagaagagaaagaagatatactttgctttggagaaatctactttttgacttacatgggtttgctgtaattaagtgcccaatattgaaaggctgcaagtactttgtaatcactctttggcatgggtaaataagcatggtaacttatattgaaatatagtgctcttgctttggataactgtaaagggacccatgctgatagactggaaatagaagtaaatgtgtttattgataa

SEQ ID NO: 14317 - DNA, 3823 bp, Homo sapiens
  source 1..3823: mol_type = unassigned DNA
gggtgcggactgtgggagctgactctgggtagccggctgcgcgtggctggggaggcgaggccggacgcacctctgtttgggggtcctcagaccctcaggcagtttgattgcatctacacaagataaacccaaccagcaggatattgtgttttttgagaaaaatggactccttcatggacactttacacttcccttccttaaagatgaggttaaggtaaatgacttgctctggaatgcagattcctctgtgcttgcagtctggctggaagaccttcagagagaagaaagctccattccgaaaacctgtgttcagctctggactgttggaaactatcactggtatctcaagcaaagtttatccttcagcacctgtgggaagagcaagattgtgtctctgatgtgggaccctgtgaccccataccggctgcatgttctctgtcagggctggcattacctcgcctatgattggcactggacgactgaccggagcgtgggagataattcaagtgacttgtccaatgtggctgtcattgatggaaacagggtgttggtgacagtcttccggcagactgtggttccgcctcccatgtgcacctaccaactgctgttcccacaccctgtgaatcaagtcacattcttagcacaccctcaaaagagtaatgaccttgctgttctagatgccagtaaccagatttctgtttataaatgtggtgattgtccaagtgctgaccctacagtgaaactgggagctgtgggtggaagtggatttaaagtttgccttagaactcctcatttggaaaagagatacaaaatccagtttgagaataatgaagatcaagatgtaaacccgctgaaactaggccttctcacttggattgaagaagacgtcttcctggctgtaagccacagtgagttcagcccccggtctgtcattcaccatttgactgcagcttcttctgagatggatgaagagcatggacagctcaatgtcagttcatctgcagcggtggatggggtcataatcagtctatgttgcaattccaagaccaagtcagtagtattacagctggctgatggccagatatttaagtacctttgggagtcaccttctctggctattaaaccatggaagaactctggtggatttcctgttcggtttccttatccatgcacccagaccgaattggccatgattggagaagaggaatgtgtccttggtctgactgacaggtgtcgctttttcatcaatgacattgaggttgcgtcaaatatcacgtcatttgcagtatatgatgagtttttattgttgacaacccattcccatacctgccagtgtttttgcctgagggatgcttcatttaaaacattacaggccggcctgagcagcaatcatgtgtcccatggggaagttctgcggaaagtggagaggggttcacggattgtcactgttgtgccccaggacacaaagcttgtattacagatgccaaggggaaacttagaagttgttcatcatcgagccctggttttagctcagattcggaagtggttggacaaacttatgtttaaagaggcatttgaatgcatgagaaagctgagaatcaatctcaatctgatttatgatcataaccctaaggtgtttcttggaaatgtggaaaccttcattaaacagatagattctgtgaatcatattaacttgttttttacagaattgaaagaagaagatgtcacgaagaccatgtaccctgcaccagttaccagcagtgtctacctgtccagggatcctgacgggaataaaatagaccttgtctgcgatgctatgagagcagtcatggagagcataaatcctcataaatactgcctatccatacttacatctcatgtaaagaagacaaccccagaactggaaattgtactgcaaaaagtacacgagcttcaaggaaatgctccctctgatcctgatgctgtgagtgctgaagaggccttgaaatatttgctgcatctggtagatgttaatgaattatatgatcattctcttggcacctatgactttgatttggtcctcatggtagctgagaagtcacagaaggatcccaaagaatatcttccatttcttaatacacttaagaaaatggaaactaattatcagcggtttactatagacaaatacttgaaacgatatgaaaaagccattggccacctcagcaaatgtggacctgagtacttcccagaatgcttaaacttgataaaagataaaaacttgtataacgaagctctgaagttatattcaccaagctcacaacagtaccaggatatcagcattgcttatggggagcacctgatgcaggagcacatgtatgagccagcggggctcatgtttgcccgttgcggtgcccacgagaaagctctctcagcctttctgacatgtggcaactggaagcaagccctctgtgtggcagcccagcttaactttaccaaagaccagctggtgggcctcggcagaactctggcaggaaagctggttgagcagaggaagcacattgatgcggccatggttttggaagagtgtgcccaggattatgaagaagctgtgctcttgctgttagaaggagctgcctgggaagaagctttgaggctggtatacaaatataacagactggatattatagaaaccaacgtaaagccttccattttagaagcccagaaaaattatatggcatttctggactctcagacagccacattcagtcgccacaagaaacgtttattggtagttcgagagctcaaggagcaagcccagcaggcaggtctggatgatgaggtaccccacgggcaagagtcagacctcttctctgaaactagcagtgtcgtgagtggcagtgagatgagtggcaaatactcccatagtaactccaggatatcagcgagatcatccaagaatcgccgaaaagcggagcggaagaagcacagcctcaaagaaggcagtccgctggaggacctggccctcctggaggcactgagtgaagtggtgcagaacactgaaaacctgaaagatgaagtataccatattttaaaggtactctttctctttgagtttgatgaacaaggaagggaattacagaaggcctttgaagatacgctgcagttgatggaaaggtcacttccagaaatttggactcttacttaccagcagaattcagctaccccggttctaggtcccaattctactgcaaatagtatcatggcatcttatcagcaacagaagacttcggttcctgttcttgatgctgagctttttataccaccaaagatcaacagaagaacccagtggaagctgagcctgctagactgagtgactgcagttaggagggatccgacagagaagaccatttccactcattcctgttgtcctaccaccccttgctctttgagggctggctattgagaactggaaagagtaaaatgataacttaccttagcattgccaagaacttcagcagacaacaagcaattctatttattttatgttgtgtatacatcttgatcattagcaagacattaagctttaaccattatggcaccattttgtgagaatgattgttctttcacttgggctgtttgagagcataattatggtaatcatgagattaatgtttcatgatttctacctccaaagtgtgaagacaagtaaaacaatgtttctaaattgtcttattttgttggcggagaagattacaatggctattagtgctacatttggtcaaatgtaatcacttaaatagcttcttgtcaccttaaactaaagcagaataaaaagtatcctttg

SEQ ID NO: 14318 - DNA, 3269 bp, Homo sapiens
  source 1..3269: mol_type = unassigned DNA
agtgcgagagagctgagagccaggactcagtgctgagcttggtgtcccaccgccacaaggaggcagggaagaaacccactagtcccagctcctggggtggcacagacattgcaactggccctgcctgtgggtcctaggggcccttggctaccaggaggctaagaacactgctcatgaatgacagtgagccctgaaagctctgggggtgtcacccagtcccacaagcctgcatcccctgcagtggagatgggctcagctcctggacgtgccacagacagaaagcataacatacactcgccaggaagagcctttgcctgactcagggcagctcagagtgtggggcagaaggtgaccagccagctcagggcaggagatgcagagcacagccaattacctgtggcacacagatgacctgctggggcagggggccactgccagtgtgtacaaggcccgcaacaagaaatccggagagctggttgctgtgaaggtcttcaacactaccagctacctgcggccccgcgaggtgcaagtgagggagtttgaggtcctgcggaagctgaaccaccagaacattgtcaagctctttgcggtggaggagacgggcggaagccggcagaaggtactggtgatggagtactgctccagtgggagcctgctgagtgtgctggagagccctgagaatgcctttgggctgcctgaggatgagttcctggtggtgctgcgctgtgtggtggccggcatgaaccacctgcgggagaacggcattgtgcatcgcgacatcaagccggggaacatcatgcgcctcgtaggggaggaggggcagagcatctacaagctgacagacttcggcgctgcccgggagctggatgatgatgagaagttcgtctcggtctatgggactgaggagtacctgcatcccgacatgtatgagcgggcggtgcttcgaaagccccagcaaaaagcgttcggggtgactgtggatctctggagcattggagtgaccttgtaccatgcagccactggcagcctgcccttcatcccctttggtgggccacggcggaacaaggagatcatgtaccggatcaccacggagaagccggctggggccattgcaggtgcccagaggcgggagaacgggcccctggagtggagctacaccctccccatcacctgccagctgtcactggggctgcagagccagctggtgcccatcctggccaacatcctggaggtggagcaggccaagtgctggggcttcgaccagttctttgcggagaccagtgacatcctgcagcgagttgtcgtccatgtcttctccctgtcccaggcagtcctgcaccacatctatatccatgcccacaacacgatagccattttccaggaggccgtgcacaagcagaccagtgtggccccccgacaccaggagtacctctttgagggtcacctctgtgtcctcgagcccagcgtctcagcacagcacatcgcccacacgacggcaagcagccccctgaccctcttcagcacagccatccctaaggggctggccttcagggaccctgctctggacgtccccaagttcgtccccaaagtggacctgcaggcggattacaacactgccaagggcgtgttgggcgccggctaccaggccctgcggctggcacgggccctgctggatgggcaggagctaatgtttcgggggctgcactgggtcatggaggtgctccaggccacatgcagacggactctggaagtggcaaggacatccctcctctacctcagcagcagcctgggaactgagaggttcagcagcgtggctggaacgcctgagatccaggaactgaaggcggctgcagaactgaggtccaggctgcggactctagcggaggtcctctccagatgctcccaaaatatcacggagacccaggagagcctgagcagcctgaaccgggagctggtgaagagccgggatcaggtacatgaggacagaagcatccagcagattcagtgctgtttggacaagatgaacttcatctacaaacagttcaagaagtctaggatgaggccagggcttggctacaacgaggagcagattcacaagctggataaggtgaatttcagtcatttagccaaaagactcctgcaggtgttccaggaggagtgcgtgcagaagtatcaagcgtccttagtcacacacggcaagaggatgagggtggtgcacgagaccaggaaccacctgcgcctggttggctgttctgtggctgcctgtaacacagaagcccagggggtccaggagagtctcagcaagctcctggaagagctatctcaccagctccttcaggaccgagcaaagggggctcaggcctcgccgcctcccatagctccttaccccagccctacacgaaaggacctgcttctccacatgcaagagctctgcgaggggatgaagctgctggcatctgacctcctggacaacaaccgcatcatcgaacggctaaatagagtcccagcacctcctgatgtctgagctccatggggcacatgaggcatcctgaagcattagaatgattccaacactgctcttctgcaccatgagaccaacccagggcaagatcccatcccatcacatcagcctacctccctcctggctgctggccaggatgtcgccagcattaccttccactgcctttctccctgggaagcagcacagctgagactgggcaccaggccacctctgttgggacccacaggaaagagtgtggcagcaactgcctggctgacctttctatcttctctaggctcaggtactgctcctccatgcccatggctgggccgtggggagaagaagctctcatacgccttcccactccctctggtttataggacttcactccctagccaacaggagaggaggcctcctggggtttccccagggcagtaggtcaaacgacctcatcacagtcttccttcctcttcaagcgtttcatgttgaacacagctctctccgctcccttgtgatttctgagggtcaccactgccagcctcaggcaacatagagagcctcctgttctttctatgcttggtctgactgagcctaaagttgagaaaatgggtggccaaggccagtgccagtgtcttggggcccctttggctctccctcactctctgaggctccagctggtcctgggacatgcagccaggactgtgagtctgggcaggtccaaggcctgcaccttcaagaagtggaataaatgtggcctttgcttctgttt

SEQ ID NO: 14319 - DNA, 2487 bp, Homo sapiens
  source 1..2487: mol_type = unassigned DNA
caccgccacaaggaggcagggaagaaacccactagtcccagctcctggggtggcacagacattgcaactggccctgcctgtgggtcctaggggcccttggctaccaggaggctaagaacactgctcatgaatgacagtgagccctgaaagctctgggggtgtcacccagtcccacaagcctgcatcccctgcagtggagatgggctcagctcctggacgtgccacagacagaaagcataacatacactcgccaggaagagcctttgcctgactcagggcagctcagagtgtgggaaatccggagagctggttgctgtgaaggtcttcaacactaccagctacctgcggccccgcgaggtgcaagtgagggagtttgaggtcctgcggaagctgaaccaccagaacattgtcaagctctttgcggtggaggagacgggcggaagccggcagaaggtactggtgatggagtactgctccagtgggagcctgctgagtgtgctggagagccctgagaatgcctttgggctgcctgaggatgagttcctggtggtgctgcgctgtgtggtggccggcatgaaccacctgcgggagaacggcattgtgcatcgcgacatcaagccggggaacatcatgcgcctcgtaggggaggaggggcagagcatctacaagctgacagacttcggcgctgcccgggagctggatgatgatgagaagttcgtctcggtctatgggactgaggagtacctgcatcccgacatgtatgagcgggcggtgcttcgaaagccccagcaaaaagcgttcggggtgactgtggatctctggagcattggagtgaccttgtaccatgcagccactggcagcctgcccttcatcccctttggtgggccacggcggaacaaggagatcatgtaccggatcaccacggagaagccggctggggccattgcaggtgcccagaggcgggagaacgggcccctggagtggagctacaccctccccatcacctgccagctgtcactggggctgcagagccagctggtgcccatcctggccaacatcctggaggtggagcaggccaagtgctggggcttcgaccagttctttgcggagaccagtgacatcctgcagcgagttgtcgtccatgtcttctccctgtcccaggcagtcctgcaccacatctatatccatgcccacaacacgatagccattttccaggaggccgtgcacaagcagaccagtgtggccccccgacaccaggagtacctctttgagggtcacctctgtgtcctcgagcccagcgtctcagcacagcacatcgcccacacgacggcaagcagccccctgaccctcttcagcacagccatccctaaggggctggccttcagggaccctgctctggacgtccccaagttcgtccccaaagtggacctgcaggcggattacaacactgccaagggcgtgttgggcgccggctaccaggccctgcggctggcacgggccctgctggatgggcaggagctaatgtttcgggggctgcactgggtcatggaggtgctccaggccacatgcagacggactctggaagtggcaaggacatccctcctctacctcagcagcagcctgggaactgagaggttcagcagcgtggctggaacgcctgagatccaggaactgaaggcggctgcagaactgaggtccaggctgcggactctagcggaggtcctctccagatgctcccaaaatatcacggagacccaggagagcctgagcagcctgaaccgggagctggtgaagagccgggatcaggtacatgaggacagaagcatccagcagattcagtgctgtttggacaagatgaacttcatctacaaacagttcaagaagtctaggatgaggccagggcttggctacaacgaggagcagattcacaagctggataaggtgaatttcagtcatttagccaaaagactcctgcaggtgttccaggaggagtgcgtgcagaagtatcaagcgtccttagtcacacacggcaagaggatgagggtggtgcacgagaccaggaaccacctgcgcctggttggctgttctgtggctgcctgtaacacagaagcccagggggtccaggagagtctcagcaagctcctggaagagctatctcaccagctccttcaggaccgagcaaagggggctcaggcctcgccgcctcccatagctccttaccccagccctacacgaaaggacctgcttctccacatgcaagagctctgcgaggggatgaagctgctggcatctgacctcctggacaacaaccgcatcatcgaacggctaaatagagtcccagcacctcctgatgtctgagctccatggggcacatgaggcatcctgaagcattagaatgattccaacactgctcttctgcaccatgagaccaacccagggcaagatcccatcccatcacatcagcctacctccctcctggctgctggc

SEQ ID NO: 14320 - DNA, 1751 bp, Homo sapiens
  source 1..1751: mol_type = unassigned DNA
tggtagggaagggcgaccgcgaaactgggactttctcggagcgccggggccctaccagcgttcacagtccgccgctcccacccttctcacgtctgacggactctgctgacagcccttgccctgttggatgaataggcacctctggaagagccaactgtgtgagatggtgcagcccagtggtggcccggcagcagatcaggacgtactgggcgaagagtctcctctggggaagccagccatgctgcacctgccttcagaacagggcgctcctgagaccctccagcgctgcctggaggagaatcaagagctccgagatgccatccggcagagcaaccagattctgcgggagcgctgcgaggagcttctgcatttccaagccagccagagggaggagaaggagttcctcatgtgcaagttccaggaggccaggaaactggtggagagactcggcctggagaagctcgatctgaagaggcagaaggagcaggctctgcgggaggtggagcacctgaagagatgccagcagcagatggctgaggacaaggcctctgtgaaagcccaggtgacgtccttgctcggggagctgcaggagagccagagtcgcttggaggctgccactaaggaatgccaggctctggagggtcggaggaagctggcccagttgcaggtggcctatcaccagctcttccaagaatacgacaaccacatcaagagcagcgtggtgggcagtgagcggaagcgaggaatgcagctggaagatctcaaacagcagctccagcaggccgaggaggccctggtggccaaacaggaggtgatcgataagctgaaggaggaggccgagcagcacaagattgtgatggagaccgttccggtgctgaaggcccaggcggatatctacaaggcggacttccaggctgagaggcaggcccgggagaagctggccgagaagaaggagctcctgcaggagcagctggagcagctgcagagggagtacagcaaactgaaggccagctgtcaggagtcggccaggatcgaggacatgaggaagcggcatgtcgaggtctcccaggcccccttgccccccgcccctgcctacctctcctctcccctggccctgcccagccagaggaggagcccccccgaggagccacctgacttctgctgtcccaagtgccagtatcaggcccctgatatggacaccctgcagatacatgtcatggagtgcattgagtagggccggccagtgcaaggccactgcctgccgaggacgtgcccgggaccgtgcagtctgcgctttcctctcccgcctgcctagcccaggatgaagggctgggtggccacaactgggatgccacctggagccccacccaggagctggccgcggcaccttacgcttcagctgttgatccgctggtcccctcttttggggtagatgcggccccgatcaggcctgactcgctgctctttttgttcccttctgtctgctcgaaccacttgcctcgggctaatccctccctcttcctccacccggcactggggaagtcaagaatggggcctggggctctcagggagaactgcttcccctggcagagctgggtggcagctcttcctcccaccggacaccgacccgcccgctgctgtgccctgggagtgctgccctcttaccatgcacacgggtgctctccttttgggctgcatgctattccattttgcagccagaccgatgtgtatttaaccagtcactattgatg

SEQ ID NO: 14321 - DNA, 2103 bp, Homo sapiens
  source 1..2103: mol_type = unassigned DNA
agcccgttcctgctccgcgcttctggagcactggccaaggcgggccgattcaggacccaggttacttgggcggcgagctggactgtttctactcctccctcctcctccactgcggggtctgaccctactccttgtgtgaggactcctctagttcagagacatattctgttcaccaaacttgactgcgctctatcgaggtcgttaaattcttcggaaatgcctcacatatagtttggcagctagcccttgccctgttggatgaataggcacctctggaagagccaactgtgtgagatggtgcagcccagtggtggcccggcagcagatcaggacgtactgggcgaagagtctcctctggggaagccagccatgctgcacctgccttcagaacagggcgctcctgagaccctccagcgctgcctggaggagaatcaagagctccgagatgccatccggcagagcaaccagattctgcgggagcgctgcgaggagcttctgcatttccaagccagccagagggaggagaaggagttcctcatgtgcaagttccaggaggccaggaaactggtggagagactcggcctggagaagctcgatctgaagaggcagaaggagcaggctctgcgggaggtggagcacctgaagagatgccagcagcagatggctgaggacaaggcctctgtgaaagcccaggtgacgtccttgctcggggagctgcaggagagccagagtcgcttggaggctgccactaaggaatgccaggctctggagggtcgggcccgggcggccagcgagcaggcgcggcagctggagagtgagcgcgaggcgctgcagcagcagcacagcgtgcaggtggaccagctgcgcatgcagggccagagcgtggaggccgcgctccgcatggagcgccaggccgcctcggaggagaagaggaagctggcccagttgcaggtggcctatcaccagctcttccaagaatacgacaaccacatcaagagcagcgtggtgggcagtgagcggaagcgaggaatgcagctggaagatctcaaacagcagctccagcaggccgaggaggccctggtggccaaacaggaggtgatcgataagctgaaggaggaggccgagcagcacaagattgtgatggagaccgttccggtgctgaaggcccaggcggatatctacaaggcggacttccaggctgagaggcaggcccgggagaagctggccgagaagaaggagctcctgcaggagcagctggagcagctgcagagggagtacagcaaactgaaggccagctgtcaggagtcggccaggatcgaggacatgaggaagcggcatgtcgaggtctcccaggcccccttgccccccgcccctgcctacctctcctctcccctggccctgcccagccagaggaggagcccccccgaggagccacctgacttctgctgtcccaagtgccagtatcaggcccctgatatggacaccctgcagatacatgtcatggagtgcattgagtagggccggccagtgcaaggccactgcctgccgaggacgtgcccgggaccgtgcagtctgcgctttcctctcccgcctgcctagcccaggatgaagggctgggtggccacaactgggatgccacctggagccccacccaggagctggccgcggcaccttacgcttcagctgttgatccgctggtcccctcttttggggtagatgcggccccgatcaggcctgactcgctgctctttttgttcccttctgtctgctcgaaccacttgcctcgggctaatccctccctcttcctccacccggcactggggaagtcaagaatggggcctggggctctcagggagaactgcttcccctggcagagctgggtggcagctcttcctcccaccggacaccgacccgcccgctgctgtgccctgggagtgctgccctcttaccatgcacacgggtgctctccttttgggctgcatgctattccattttgcagccagaccgatgtgtatttaaccagtcactattgatggacatttgggttgtttcccatctttttgttaccataaataatggcatagtaaaaatccttgtgcatta

SEQ ID NO: 14322 - DNA, 2286 bp, Homo sapiens
  source 1..2286: mol_type = unassigned DNA
gttcgcgggtcaagccggccctattgggcagtctcttcttgattcctcccccggagagggcggggcggccgagcgccccgaggctagacgccgccgtccgagagacgagggggcgtgtaggcggtgacgccctgcaaagtggccggcgtgcttatcattaccgagcttccgcgggcctgcagagcctggcggactcagacttctctccggagcgggatgcggccctaccgcggcctcacacttctcgccggcttcccgagttctcgggggcggggcttgtgtttttacttccggatcccacagctatgacaccggaagccggaagcgtggtagggaagggcgaccgcgaaactgggactttctcggagcgccggggccctaccagcgttcacagtccgccgctcccacccttctcacgtctgacggactctgctgacagcccttgccctgttggatgaataggcacctctggaagagccaactgtgtgagatggtgcagcccagtggtggcccggcagcagatcaggacgtactgggcgaagagtctcctctggggaagccagccatgctgcacctgccttcagaacagggcgctcctgagaccctccagcgctgcctggaggagaatcaagagctccgagatgccatccggcagagcaaccagattctgcgggagcgctgcgaggagcttctgcatttccaagccagccagagggaggagaaggagttcctcatgtgcaagttccaggaggccaggaaactggtggagagactcggcctggagaagctcgatctgaagaggcagaaggagcaggctctgcgggaggtggagcacctgaagagatgccagcagcagatggctgaggacaaggcctctgtgaaagcccaggtgacgtccttgctcggggagctgcaggagagccagagtcgcttggaggctgccactaaggaatgccaggctctggagggtcgggcccgggcggccagcgagcaggcgcggcagctggagagtgagcgcgaggcgctgcagcagcagcacagcgtgcaggtggaccagctgcgcatgcagggccagagcgtggaggccgcgctccgcatggagcgccaggccgcctcggaggagaagaggaagctggcccagttgcaggtggcctatcaccagctcttccaagaatacgacaaccacatcaagagcagcgtggtgggcagtgagcggaagcgaggaatgcagctggaagatctcaaacagcagctccagcaggccgaggaggccctggtggccaaacaggaggtgatcgataagctgaaggaggaggccgagcagcacaagattgtgatggagaccgttccggtgctgaaggcccaggcggatatctacaaggcggacttccaggctgagaggcaggcccgggagaagctggccgagaagaaggagctcctgcaggagcagctggagcagctgcagagggagtacagcaaactgaaggccagctgtcaggagtcggccaggatcgaggacatgaggaagcggcatgtcgaggtctcccaggcccccttgccccccgcccctgcctacctctcctctcccctggccctgcccagccagaggaggagcccccccgaggagccacctgacttctgctgtcccaagtgccagtatcaggcccctgatatggacaccctgcagatacatgtcatggagtgcattgagtagggccggccagtgcaaggccactgcctgccgaggacgtgcccgggaccgtgcagtctgcgctttcctctcccgcctgcctagcccaggatgaagggctgggtggccacaactgggatgccacctggagccccacccaggagctggccgcggcaccttacgcttcagctgttgatccgctggtcccctcttttggggtagatgcggccccgatcaggcctgactcgctgctctttttgttcccttctgtctgctcgaaccacttgcctcgggctaatccctccctcttcctccacccggcactggggaagtcaagaatggggcctggggctctcagggagaactgcttcccctggcagagctgggtggcagctcttcctcccaccggacaccgacccgcccgctgctgtgccctgggagtgctgccctcttaccatgcacacgggtgctctccttttgggctgcatgctattccattttgcagccagaccgatgtgtatttaaccagtcactattgatggacatttgggttgtttcccatctttttgttaccataaataatggcatagtaaaaa

SEQ ID NO: 14323 - DNA, 1972 bp, Homo sapiens
  source 1..1972: mol_type = unassigned DNA
catggcccttgtgatccaggtggggaaactaaggcccagagaagtgaggaccccgcagactatcaatcccagtctcttcccctcactccctgtgaagctctccagcatcatcgaggtcccatcagcccttgccctgttggatgaataggcacctctggaagagccaactgtgtgagatggtgcagcccagtggtggcccggcagcagatcaggacgtactgggcgaagagtctcctctggggaagccagccatgctgcacctgccttcagaacagggcgctcctgagaccctccagcgctgcctggaggagaatcaagagctccgagatgccatccggcagagcaaccagattctgcgggagcgctgcgaggagcttctgcatttccaagccagccagagggaggagaaggagttcctcatgtgcaagttccaggaggccaggaaactggtggagagactcggcctggagaagctcgatctgaagaggcagaaggagcaggctctgcgggaggtggagcacctgaagagatgccagcagcagatggctgaggacaaggcctctgtgaaagcccaggtgacgtccttgctcggggagctgcaggagagccagagtcgcttggaggctgccactaaggaatgccaggctctggagggtcgggcccgggcggccagcgagcaggcgcggcagctggagagtgagcgcgaggcgctgcagcagcagcacagcgtgcaggtggaccagctgcgcatgcagggccagagcgtggaggccgcgctccgcatggagcgccaggccgcctcggaggagaagaggaagctggcccagttgcaggtggcctatcaccagctcttccaagaatacgacaaccacatcaagagcagcgtggtgggcagtgagcggaagcgaggaatgcagctggaagatctcaaacagcagctccagcaggccgaggaggccctggtggccaaacaggaggtgatcgataagctgaaggaggaggccgagcagcacaagattgtgatggagaccgttccggtgctgaaggcccaggcggatatctacaaggcggacttccaggctgagaggcaggcccgggagaagctggccgagaagaaggagctcctgcaggagcagctggagcagctgcagagggagtacagcaaactgaaggccagctgtcaggagtcggccaggatcgaggacatgaggaagcggcatgtcgaggtctcccaggcccccttgccccccgcccctgcctacctctcctctcccctggccctgcccagccagaggaggagcccccccgaggagccacctgacttctgctgtcccaagtgccagtatcaggcccctgatatggacaccctgcagatacatgtcatggagtgcattgagtagggccggccagtgcaaggccactgcctgccgaggacgtgcccgggaccgtgcagtctgcgctttcctctcccgcctgcctagcccaggatgaagggctgggtggccacaactgggatgccacctggagccccacccaggagctggccgcggcaccttacgcttcagctgttgatccgctggtcccctcttttggggtagatgcggccccgatcaggcctgactcgctgctctttttgttcccttctgtctgctcgaaccacttgcctcgggctaatccctccctcttcctccacccggcactggggaagtcaagaatggggcctggggctctcagggagaactgcttcccctggcagagctgggtggcagctcttcctcccaccggacaccgacccgcccgctgctgtgccctgggagtgctgccctcttaccatgcacacgggtgctctccttttgggctgcatgctattccattttgcagccagaccgatgtgtatttaaccagtcactattgatggacatttgggttgtttcccatctttttgttaccataaataatggcatagtaaaaa

SEQ ID NO: 14324 - DNA, 2056 bp, Homo sapiens
  source 1..2056: mol_type = unassigned DNA
cctgaacgcccatcaagcccatggcccttgtgatccaggtggggaaactaaggcccagagaagtgaggaccccgcagactatcaatcccagtctcttcccctcactccctgtgaagctctccagcatcatcgaggtcccatcaggtggggaaagatgctgttccaggcgcacactagtctacaaggccagagctttctggaagggggcacccttgccctgttggatgaataggcacctctggaagagccaactgtgtgagatggtgcagcccagtggtggcccggcagcagatcaggacgtactgggcgaagagtctcctctggggaagccagccatgctgcacctgccttcagaacagggcgctcctgagaccctccagcgctgcctggaggagaatcaagagctccgagatgccatccggcagagcaaccagattctgcgggagcgctgcgaggagcttctgcatttccaagccagccagagggaggagaaggagttcctcatgtgcaagttccaggaggccaggaaactggtggagagactcggcctggagaagctcgatctgaagaggcagaaggagcaggctctgcgggaggtggagcacctgaagagatgccagcagcagatggctgaggacaaggcctctgtgaaagcccaggtgacgtccttgctcggggagctgcaggagagccagagtcgcttggaggctgccactaaggaatgccaggctctggagggtcgggcccgggcggccagcgagcaggcgcggcagctggagagtgagcgcgaggcgctgcagcagcagcacagcgtgcaggtggaccagctgcgcatgcagggccagagcgtggaggccgcgctccgcatggagcgccaggccgcctcggaggagaagaggaagctggcccagttgcaggtggcctatcaccagctcttccaagaatacgacaaccacatcaagagcagcgtggtgggcagtgagcggaagcgaggaatgcagctggaagatctcaaacagcagctccagcaggccgaggaggccctggtggccaaacaggaggtgatcgataagctgaaggaggaggccgagcagcacaagattgtgatggagaccgttccggtgctgaaggcccaggcggatatctacaaggcggacttccaggctgagaggcaggcccgggagaagctggccgagaagaaggagctcctgcaggagcagctggagcagctgcagagggagtacagcaaactgaaggccagctgtcaggagtcggccaggatcgaggacatgaggaagcggcatgtcgaggtctcccaggcccccttgccccccgcccctgcctacctctcctctcccctggccctgcccagccagaggaggagcccccccgaggagccacctgacttctgctgtcccaagtgccagtatcaggcccctgatatggacaccctgcagatacatgtcatggagtgcattgagtagggccggccagtgcaaggccactgcctgccgaggacgtgcccgggaccgtgcagtctgcgctttcctctcccgcctgcctagcccaggatgaagggctgggtggccacaactgggatgccacctggagccccacccaggagctggccgcggcaccttacgcttcagctgttgatccgctggtcccctcttttggggtagatgcggccccgatcaggcctgactcgctgctctttttgttcccttctgtctgctcgaaccacttgcctcgggctaatccctccctcttcctccacccggcactggggaagtcaagaatggggcctggggctctcagggagaactgcttcccctggcagagctgggtggcagctcttcctcccaccggacaccgacccgcccgctgctgtgccctgggagtgctgccctcttaccatgcacacgggtgctctccttttgggctgcatgctattccattttgcagccagaccgatgtgtatttaaccagtcactattgatggacatttgggttgtttcccatctttttgttaccataaataatggcatagtaaaaa

SEQ ID NO: 14325 - DNA, 940 bp, Homo sapiens
  source 1..940: mol_type = unassigned DNA
ccacgctccaggccgtttgttcctgctgctccctttgggattaactagagattgaaccggctcaccttgtttcagctcaggccctgcaaccgaccgaccgtctgctgggctccaagtcacctgagaggcgaggtgaggtggggaaactaaggcccagagaagtgaggaccccgcagactatcaatcccagtctcttcccctcactccctgtgaagctctccagcatcatcgaggtcccatcaggtggggaaagatgctgttccaggcgcacactagtctacaaggccagagctttctggaagggggcacccttgccctgttggatgaataggcacctctggaagagccaactgtgtgagatggtgcagcccagtggtggcccggcagcagatcaggacgtactgggcgaagagtctcctctggggaagccagccatgctgcacctgccttcagaacagggcgctcctgagaccctccagcgctgcctggaggagaatcaagagctccgagatgccatccggcagagcaaccagattctgcgggagcgctgcgaggagcttctgcatttccaagccagccagagggaggagaaggagttcctcatgtgcaagttccaggaggccaggaaactggtggagagactcggcctggagaagctcgatctgaagaggcagaaggagcaggctctgcgggaggtggagcacctgaagagatgccagcagcagatggctgaggacaaggcctctgtgaaagcccaggtgacgtccttgctcggggagctgcaggagagccagagtcgcttggaggctgccactaaggaatgccaggctctggagggtcgggcccgggcggccagcgagcaggcgcggcagctggagagtgagcgcgaggcgctgcagcagcagcacagcgtgcaggtggaccagctgcgcatgcaggg

SEQ ID NO: 14326 - DNA, 960 bp, Homo sapiens
  source 1..960: mol_type = unassigned DNA
acagactccagaaaggtactggtggcaggggactggtctgctgagtcacagcaaccccacgctccaggccgtttgttcctgctgctccctttgggattaactagagattgaaccggctcaccttgtttcagctcaggccctgcaaccgaccgaccgtctgctgggctccaagtcacctgagaggcgaggtgagcccttgccctgttggatgaataggcacctctggaagagccaactgtgtgagatggtgcagcccagtggtggcccggcagcagatcaggacgtactgggcgaagagtctcctctggggaagccagccatgctgcacctgccttcagaacagggcgctcctgagaccctccagcgctgcctggaggagaatcaagagctccgagatgccatccggcagagcaaccagattctgcgggagcgctgcgaggagcttctgcatttccaagccagccagagggaggagaaggagttcctcatgtgcaagttccaggaggccaggaaactggtggagagactcggcctggagaagctcgatctgaagaggcagaaggagcaggctctgcgggaggtggagcacctgaagagatgccagcagcagatggctgaggacaaggcctctgtgaaagcccaggtgacgtccttgctcggggagctgcaggagagccagagtcgcttggaggctgccactaaggaatgccaggctctggagggtcgggcccgggcggccagcgagcaggcgcggcagctggagagtgagcgcgaggcgctgcagcagcagcacagcgtgcaggtggaccagctgcgcatgcagggccagagcgtggaggccgcgctccgcatggagcgccaggccgcctcggaggagaagaggaagctggcccagttgcaggtggcctatcaccagctcttccaagaatacgacaaccacatcaagagcagcgtggtggg

SEQ ID NO: 14327 - DNA, 693 bp, Homo sapiens
  source 1..693: mol_type = unassigned DNA
gagctcaacttagcagagcctgtggggccctgcaacaattagttggaaaagctgaggcatggagcaggcacttcctggcttttaagattggggcctgggagatactcaccgatgcacccatgatgatgaatatgtgtgtatccgactgatggaaggcatcgccctggaaaagctcttcccgcaggatcccgcacacctgggtccggctcagggccacctgctctgccatgacgctgtctggtggaagaaaggctcgttaacaagcccttgccctgttggatgaataggcacctctggaagagccaactgtgtgagatggtgcagcccagtggtggcccggcagcagatcaggacgtactgggcgaagagtctcctctggggaagccagccatgctgcacctgccttcagaacagggcgctcctgagaccctccagcgctgcctggaggagaatcaagagctccgagatgccatccggcagagcaaccagattctgcgggagcgctgcgaggagcttctgcatttccaagccagccagagggaggagaaggagttcctcatgtgcaagttccaggaggccaggaaactggtggagagactcggcctggagaagctcgatctgaagaggcagaaggagcaggctctgcgggaggtggagcacctgaagagatgccagcagcagatggctgaggac

SEQ ID NO: 14328 - DNA, 1949 bp, Homo sapiens
  source 1..1949: mol_type = unassigned DNA
gaagggcgaccgcgaaactgggactttctcggagcgccggggccctaccagcgttcacagtccgccgctcccacccttctcacgtctgacggactctgctgacagcccttgccctgttggatgaataggcacctctggaagagccaactgtgtgagatggtgcagcccagtggtggcccggcagcagatcaggacgtactgggcgaagagtctcctctggggaagccagccatgctgcacctgccttcagaacagggcgctcctgagaccctccagcgctgcctggaggagaatcaagagctccgagatgccatccggcagagcaaccagattctgcgggagcgctgcgaggagcttctgcatttccaagccagccagagggaggagaaggagttcctcatgtgcaagttccaggaggccaggaaactggtggagagactcggcctggagaagctcgatctgaagaggcagaaggagcaggctctgcgggaggtggagcacctgaagagatgccagcagatggctgaggacaaggcctctgtgaaagcccaggtgacgtccttgctcggggagctgcaggagagccagagtcgcttggaggctgccactaaggaatgccaggctctggagggtcgggcccgggcggccagcgagcaggcgcggcagctggagagtgagcgcgaggcgctgcagcagcagcacagcgtgcaggtggaccagctgcgcatgcagggccagagcgtggaggccgcgctccgcatggagcgccaggccgcctcggaggagaagaggaagctggcccagttgcaggtggcctatcaccagctcttccaagaatacgacaaccacatcaagagcagcgtggtgggcagtgagcggaagcgaggaatgcagctggaagatctcaaacagcagctccagcaggccgaggaggccctggtggccaaacaggaggtgatcgataagctgaaggaggaggccgagcagcacaagattgtgatggagaccgttccggtgctgaaggcccaggcggatatctacaaggcggacttccaggctgagaggcaggcccgggagaagctggccgagaagaaggagctcctgcaggagcagctggagcagctgcagagggagtacagcaaactgaaggccagctgtcaggagtcggccaggatcgaggacatgaggaagcggcatgtcgaggtctcccaggcccccttgccccccgcccctgcctacctctcctctcccctggccctgcccagccagaggaggagcccccccgaggagccacctgacttctgctgtcccaagtgccagtatcaggcccctgatatggacaccctgcagatacatgtcatggagtgcattgagtagggccggccagtgcaaggccactgcctgccgaggacgtgcccgggaccgtgcagtctgcgctttcctctcccgcctgcctagcccaggatgaagggctgggtggccacaactgggatgccacctggagccccacccaggagctggccgcggcaccttacgcttcagctgttgatccgctggtcccctcttttggggtagatgcggccccgatcaggcctgactcgctgctctttttgttcccttctgtctgctcgaaccacttgcctcgggctaatccctccctcttcctccacccggcactggggaagtcaagaatggggcctggggctctcagggagaactgcttcccctggcagagctgggtggcagctcttcctcccaccggacaccgacccgcccgctgctgtgccctgggagtgctgccctcttaccatgcacacgggtgctctccttttgggctgcatgctattccattttgcagccagaccgatgtgtatttaaccagtcactattgatggacatttgggttgtttcccatctttttgttaccataaataatggcatagtaaaaa

SEQ ID NO: 14329 - DNA, 2545 bp, Homo sapiens
  source 1..2545: mol_type = unassigned DNA
ctcgagtccaccagcagcgccgtccgcttgaccgagatgctgcgggcctgtcagttatcgggtgtgaccgccgccgcccagagttgtctctgtgggaagtttgtcctccgtccattgcgaccatgccgcagatactctacttcaggcagctctgggttgactactggcaaaattgctggagctggccttttgtttgttggtggaggtattggtggcactatcctatatgccaaatgggattcccatttccgggaaagtgtagagaaaaccataccttactcagacaaactcttcgagatggttcttggtcctgcagcttataatgttccattgccaaagaaatcgattcagtcgggtccactaaaaatctctagtgtatcagaagtaatgaaagaatctaaacagcctgcctcacaactccaaaaacaaaagggagatactccagcttcagcaacagcacctacagaagcggctcaaattatttctgcagcaggtgataccctgtcggtcccagcccctgcagttcagcctgaggaatctttaaaaactgatcaccctgaaattggtgaaggaaaacccacacctgcactttcagctctagccaagagcttagaagatgctctgaggcaaactgcaagtgtcactctgcaggctattgcagctcagaatgctgcggtccaggctgtcaatgcacactccaacatattgaaagccgccatggacaattctgagattgcaggcgagaagaaatctgctcagtggcgcacagtggagggtgcattgaaggaacgcagaaaggcagtagatgaagctgccgatgcccttctcaaagccaaagaagagttagagaagatgaaaagtgtgattgaaaatgcaaagaaaaaagaggttgctggggccaagcctcatataactgctgcagagggtaaacttcacaacatgatagttgatctggataatgtggtcaaaaaggtccaagcagctcagtctgaggctaaggttgtatctcagtatcatgagctggtggtccaagctcgggatgactttaaacgagagctggacagtattactccagaagtccttcctgggtggaaaggaatgagtgagtacaacttagctgacaagctctctactgatgatctgaactccctcattgctcatgcacatcgtcgtattgatcagctgaacagagagctggcagaacagaaggccaccgaaaagcagcacatcacgttagccttggagaaacaaaagctggaagaaaagcgggcatttgactctgcagtagcaaaagcattagaacatcacagaagtgaaatacaggctgaacaggacagaaagatagaagaagtcagagatgccatggaaaatgaaatgagaacccagcttcgccgacaggcagctgcccacactgatcacttgcgagatgtccttagggtacaagaacaggaattgaagtctgaatttgagcagaacctgtctgagaaactctctgaacaagaattacaatttcgtcgtctcagtcaagagcaagttgacaactttactctggatataaatactgcctatgccagactcagaggaatcgaacaggctgttcagagccatgcagttgctgaagaggaagccagaaaagcccaccaactctggctttcagtggaggcattaaagtacagcatgaagacctcatctgcagaaacacctactatcccgctgggtagtgcagttgaggccatcaaagccaactgttctgataatgaattcacccaagctttaaccgcagctatccctccagagtccctgacccgtggggtgtacagtgaagagacccttagagcccgtttctatgctgttcaaaaactggcccgaagggtagcaatgattgatgaaaccagaaatagcttgtaccagtacttcctctcctacctacagtccctgctcctattcccacctcagcaactgaagccgcccccagagctctgccctgaggatataaacacatttaaattactgtcatatgcttcctattgcattgagcatggtgatctggagctagcagcaaagtttgtcaatcagctgaagggggaatccagacgagtggcacaggactggctgaaggaagcccgaatgaccctagaaacgaaacagatagtggaaatcctgacagcatatgccagcgccgtaggaataggaaccactcaggtgcagccagagtgaggtttaggaagattttcataaagtcatatttcatgtcaaaggaaatcagcagtgatagatgaagggttcgcagcgagagtcccggacttgtctagaaatgagcaggtttacaagtactgttctaaatgttaacacctgttgcatttatattctttccatttgctatcatgtcagtgaacgccaggagtgctttctttgcaacttgtgtaacattttctgttttttcaggttttactgatgaggcttgtgaggccaatcaaaataatgtttgtgatctctactactgttgattttgccctcggagcaaactgaataaagcaacaagatg

SEQ ID NO: 14330 - DNA, 1520 bp, Homo sapiens
  source 1..1520: mol_type = unassigned DNA
gcacacacgcaagcacgcctccacttaactcgcgccgccgcggcagctcgagtccaccagcagcgccgtccgcttgaccgagatgctgcgggcctgtcagttatcgggtgtgaccgccgccgcccagagttgtctctgtgggaagtttgtcctccgtccattgcgaccatgccgcagatactctacttcaggcagctctgggttgactactggcaaaattgctggagctggccttttgtttgttggtggaggtattggtggcactatcctatatgccaaatgggattcccatttccgggaaagtgtagagaaaaccataccttactcagacaaactcttcgagatggttcttggtcctgcagcttataatgttccattgccaaagaaatcgattcagtcgggtccactaaaaatctctagtgtatcagaagtaatgaaagaatctaaacagcctgcctcacaactccaaaaacaaaagggagatactccagcttcagcaacagcaggtgataccctgtcggtcccagcccctgcagttcagcctgaggaatctttaaaaactgatcaccctgaaattggtgaaggaaaacccacacctgcactttcagaagcatcctcatcttctataagggagcgaccacctgaagaagttgcagctcgccttgcacaacaggaaaaacaagaacaagttaaaattgagtctctagccaagagcttagaagatgctctgaggcaaactgcaagtgtcactctgcaggctattgcagctatccctccagagtccctgacccgtggggtgtacagtgaagagacccttagagcccgtttctatgctgttcaaaaactggcccgaagggtagcaatgattgatgaaaccagaaatagcttgtaccagtacttcctctcctacctacagtccctgctcctattcccacctcagcaactgaagccgcccccagagctctgccctgaggatataaacacatttaaattactgtcatatgcttcctattgcattgagcatggtgatctggagctagcagcaaagtttgtcaatcagctgaagggggaatccagacgagtggcacaggactggctgaaggaagcccgaatgaccctagaaacgaaacagatagtggaaatcctgacagcatatgccagcgccgtaggaataggaaccactcaggtgcagccagagtgaggtttaggaagattttcataaagtcatatttcatgtcaaaggaaatcagcagtgatagatgaagggttcgcagcgagagtcccggacttgtctagaaatgagcaggtttacaagtactgttctaaatgttaacacctgttgcatttatattctttccatttgctatcatgtcagtgaacgccaggagtgctttctttgcaacttgtgtaacattttctgttttttcaggttttactgatgaggcttgtgaggccaatcaaaataatgtttgtgatctctactactgttgattttgccctcggagcaaactgaataaagc

SEQ ID NO: 14331 - DNA, 2088 bp, Homo sapiens
  source 1..2088: mol_type = unassigned DNA
caccagcagcgccgtccgcttgaccgagatgctgcgggcctgtcagttatcgggtgtgaccgccgccgcccagagttgtctctgtgggaagtttgtcctccgtccattgcgaccatgccgcagatactctacttcaggcagctctgggttgactactggcaaaattgctggagctggccttttgtttgttggtggaggtattggtggcactatcctatatgccaaatgggattcccatttccgggaaagtgtagagaaaaccataccttactcagacaaactcttcgagatggttcttggtcctgcagcttataatgttccattgccaaagaaatcgattcagtcgggtccactaaaaatctctagtgtatcagaagtaatgaaagaatctaaacagcctgcctcacaactccaaaaacaaaagggagatactccagcttcagcaacagctctagccaagagcttagaagatgctctgaggcaaactgcaagtgtcactctgcaggctattgcagctcagaatgctgcggtccaggctgtcaatgcacactccaacatattgaaagccgccatggacaattctgagattgcaggcgagaagaaatctgctcagtggcgcacagtggagggtgcattgaaggaacgcagaaaggcagtagatgaagctgccgatgcccttctcaaagccaaagaagagttagagaagatgaaaagtgtgattgaaaatgcaaagaaaaaagaggttgctggggccaagcctcatataactgctgcagagggtaaacttcacaacatgatagttgatctggataatgtggtccaagctcgggatgactttaaacgagagctggacagtattactccagaagtccttcctgggtggaaaggaatgagtgtttcagacttagctgacaagctctctactgatgatctgaactccctcattgctcatgcacatcgtcgtattgatcagctgaacagagagctggcagaacagaaggccaccgaaaagcagcacatcacgttagccttggagaaacaaaagctggaagaaaagcgggcatttgactctgcagtagcaaaagcattagaacatcacagaagtgaaatacaggctgaacaggacagaaagatagaagaagtcagagatgccatggaaaatgaaatgagaacccagcttcgccgacaggcagctgcccacactgatcacttgcgagatgtccttagggtacaagaacaggaattgaagtctgaatttgagcagaacctgtctgagaaactctctgaacaagaattacaatttcgtcgtctcagtcaagagcaagttgacaactttactctggatataaatactgcctatgccagactcagaggaatcgaacaggctgttcagagccatgcagttgctgaagaggaagccagaaaagcccaccaactctggctttcagtggaggcattaaagtacagcatgaagacctcatctgcagaaacacctactatcccgctgggtagtgcagttgaggccatcaaagccaactgttctgataatgaattcacccaagctttaaccgcagctatccctccagagtccctgacccgtggggtgtacagtgaagagacccttagagcccgtttctatgctgttcaaaaactggcccgaagggtagcaatgattgatgaaaccagaaatagcttgtaccagtacttcctctcctacctacagtccctgctcctattcccacctcagcaactgaagccgcccccagagctctgccctgaggatataaacacatttaaattactgtcatatgcttcctattgcattgagcatggtgatctggagctagcagcaaagtttgtcaatcagctgaagggggaatccagacgagtggcacaggactggctgaaggaagcccgaatgaccctagaaacgaaacagatagtggaaatcctgacagcatatgccagcgccgtaggaataggaaccactcaggtgcagccagagtgaggtttaggaagattttcataaagtcatatttcatgtcaaaggaaatcagcagtgatagatgaagggttcgcagcgagagt

SEQ ID NO: 14332 - DNA, 3001 bp, Homo sapiens
  source 1..3001: mol_type = unassigned DNA
aattctctttaagagtcacagctgtccattttccacgtgcggctgaagaatggatttcagagcgctctccctccggcagtgttcacctagtaaccccttccggataaggacctgcagcccgggcgcgacccggaaagggaatccgcccttttcgcctccttcgcgccaatcgcctggagttggcgtttccgcagccgggacacagcccaccctctaagagccgcggagtcggggacggtagaaggggccgcgcgtgcgcagtggcgtccgctgtgcttccggtgcgccgggcgcggacgcgggcacgcacacacgcaagcacgcctccacttaactcgcgccgccgcggcagctcgagtccaccagcagcgccgtccgcttgaccgagatgctgcgggcctgtcagttatcgggtgtgaccgccgccgcccagagttgtctctgtgggaagtttgtcctccgtccattgcgaccatgccgcagatactctacttcaggcagctctgggttgactactggcaaaattgctggagctggccttttgtttgttggtggaggtattggtggcactatcctatatgccaaatgggattcccatttccgggaaagtgtagagaaaaccataccttactcagacaaactcttcgagatggttcttggtcctgcagcttataatgttccattgccaaagaaatcgattcagtcgggtccactaaaaatctctagtgtatcagaagtaatgaaagaatctaaacagcctgcctcacaactccaaaaacaaaagggagatactccagcttcagcaacagcacctacagaagcggctcaaattatttctgcagcaggtgataccctgtcggtcccagcccctgcagttcagcctgaggaatctttaaaaactgatcaccctgaaattggtgaaggaaaacccacacctgcactttcagaagaagcatcctcatcttctataagggagcgaccacctgaagaagttgcagctcgccttgcacaacaggaaaaacaagaacaagttaaaattgagtctctagccaagagcttagaagatgctctgaggcaaactgcaagtgtcactctgcaggctattgcagctcagaatgctgcggtccaggctgtcaatgcacactccaacatattgaaagccgccatggacaattctgagattgcaggcgagaagaaatctgctcagtggcgcacagtggagggtgcattgaaggaacgcagaaaggcagtagatgaagctgccgatgcccttctcaaagccaaagaagagttagagaagatgaaaagtgtgattgaaaatgcaaagaaaaaagaggttgctggggccaagcctcatataactgctgcagagggtaaacttcacaacatgatagttgatctggataatgtggtcaaaaaggtccaagcagctcagtctgaggctaaggttgtatctcagtatcatgagctggtggtccaagctcgggatgactttaaacgagagctggacagtattactccagaagtccttcctgggtggaaaggaatgagtgtttcagacttagctgacaagctctctactgatgatctgaactccctcattgctcatgcacatcgtcgtattgatcagctgaacagagagctggcagaacagaaggccaccgaaaagcagcacatcacgttagccttggagaaacaaaagctggaagaaaagcgggcatttgactctgcagtagcaaaagcattagaacatcacagaagtgaaatacaggctgaacaggacagaaagatagaagaagtcagagatgccatggaaaatgaaatgagaacccagcttcgccgacaggcagctgcccacactgatcacttgcgagatgtccttagggtacaagaacaggaattgaagtctgaatttgagcagaacctgtctgagaaactctctgaacaagaattacaatttcgtcgtctcagtcaagagcaagttgacaactttactctggatataaatactgcctatgccagactcagaggaatcgaacaggctgttcagagccatgcagttgctgaagaggaagccagaaaagcccaccaactctggctttcagtggaggcattaaagtacagcatgaagacctcatctgcagaaacacctactatcccgctgggtagtgcagttgaggccatcaaagccaactgttctgataatgaattcacccaagctttaaccgcagctatccctccagagtccctgacccgtggggtgtacagtgaagagacccttagagcccgtttctatgctgttcaaaaactggcccgaagggtagcaatgattgatgaaaccagaaatagcttgtaccagtacttcctctcctacctacagtccctgctcctattcccacctcagcaactgaagccgcccccagagctctgccctgaggatataaacacatttaaattactgtcatatgcttcctattgcattgagcatggtgatctggagctagcagcaaagtttgtcaatcagctgaagggggaatccagacgagtggcacaggactggctgaaggaagcccgaatgaccctagaaacgaaacagatagtggaaatcctgacagcatatgccagcgccgtaggaataggaaccactcaggtgcagccagagtgaggtttaggaagattttcataaagtcatatttcatgtcaaaggaaatcagcagtgatagatgaagggttcgcagcgagagtcccggacttgtctagaaatgagcaggtttacaagtactgttctaaatgttaacacctgttgcatttatattctttccatttgctatcatgtcagtgaacgccaggagtgctttctttgcaacttgtgtaacattttctgttttttcaggttttactgatgaggcttgtgaggccaatcaaaataatgtttgtgatctctactactgttgattttgccctcggagcaaactgaataaagcaacaagatgaaaactga

SEQ ID NO: 14333 - DNA, 2627 bp, Homo sapiens
  source 1..2627: mol_type = unassigned DNA
agcgccgtccgcttgaccgagatgctgcgggcctgtcagttatcgggtgtgaccgccgccgcccagagttgtctctgtgggaagtttgtcctccgtccattgcgaccatgccgcagatactctacttcaggcagctctgggttgactactggcaaaattgctggagctggccttttgtttgttggtggaggtattggtggcactatcctatatgccaaatgggattcccatttccgggaaagtgtagagaaaaccataccttactcagacaaactcttcgagatggttcttggtcctgcagcttataatgttccattgccaaagaaatcgattcagtcgggtccactaaaaatctctagtgtatcagaagtaatgaaagaatctaaacagcctgcctcacaactccaaaaacaaaagggagatactccagcttcagcaacagcacctacagaagcggctcaaattatttctgcagcaggtgataccctgtcggtcccagcccctgcagttcagcctgaggaatctttaaaaactgatcaccctgaaattggtgaaggaaaacccacacctgcactttcagaagcatcctcatcttctataagggagcgaccacctgaagaagttgcagctcgccttgcacaacaggaaaaacaagaacaagttaaaattgagtctctagccaagagcttagaagatgctctgaggcaaactgcaagtgtcactctgcaggctattgcagctcagaatgctgcggtccaggctgtcaatgcacactccaacatattgaaagccgccatggacaattctgagattgcaggcgagaagaaatctgctcagtggcgcacagtggagggtgcattgaaggaacgcagaaaggcagtagatgaagctgccgatgcccttctcaaagccaaagaagagttagagaagatgaaaagtgtgattgaaaatgcaaagaaaaaagaggttgctggggccaagcctcatataactgctgcagagggtaaacttcacaacatgatagttgatctggataatgtggtcaaaaaggtccaagcagctcagtctgaggctaaggttgtatctcagtatcatgagctggtggtccaagctcgggatgactttaaacgagagctggacagtattactccagaagtccttcctgggtggaaaggaatgagtgtttcagacttagctgacaagctctctactgatgatctgaactccctcattgctcatgcacatcgtcgtattgatcagctgaacagagagctggcagaacagaaggccaccgaaaagcagcacatcacgttagccttggagaaacaaaagctggaagaaaagcgggcatttgactctgcagtagcaaaagcattagaacatcacagaagtgaaatacaggctgaacaggacagaaagatagaagaagtcagagatgccatggaaaatgaaatgagaacccagcttcgccgacaggcagctgcccacactgatcacttgcgagatgtccttagggtacaagaacaggaattgaagtctgaatttgagcagaacctgtctgagaaactctctgaacaagaattacaatttcgtcgtctcagtcaagagcaagttgacaactttactctggatataaatactgcctatgccagactcagaggaatcgaacaggctgttcagagccatgcagttgctgaagaggaagccagaaaagcccaccaactctggctttcagtggaggcattaaagtacagcatgaagacctcatctgcagaaacacctactatcccgctgggtagtgcagttgaggccatcaaagccaactgttctgataatgaattcacccaagctttaaccgcagctatccctccagagtccctgacccgtggggtgtacagtgaagagacccttagagcccgtttctatgctgttcaaaaactggcccgaagggtagcaatgattgatgaaaccagaaatagcttgtaccagtacttcctctcctacctacagtccctgctcctattcccacctcagcaactgaagccgcccccagagctctgccctgaggatataaacacatttaaattactgtcatatgcttcctattgcattgagcatggtgatctggagctagcagcaaagtttgtcaatcagctgaagggggaatccagacgagtggcacaggactggctgaaggaagcccgaatgaccctagaaacgaaacagatagtggaaatcctgacagcatatgccagcgccgtaggaataggaaccactcaggtgcagccagagtgaggtttaggaagattttcataaagtcatatttcatgtcaaaggaaatcagcagtgatagatgaagggttcgcagcgagagtcccggacttgtctagaaatgagcaggtttacaagtactgttctaaatgttaacacctgttgcatttatattctttccatttgctatcatgtcagtgaacgccaggagtgctttctttgcaacttgtgtaacattttctgttttttcaggttttactgatgaggcttgtgaggccaatcaaaataatgtttgtgatctctactactgttgattttgccctcggagcaaactgaataaagcaacaagatgaaaa

SEQ ID NO: 14334 - DNA, 2670 bp, Homo sapiens
  source 1..2670: mol_type = unassigned DNA
gcgggcacgcacacacgcaagcacgcctccacttaactcgcgccgccgcggcagctcgagtccaccagcagcgccgtccgcttgaccgagatgctgcgggcctgtcagttatcgggtgtgaccgccgccgcccagagttgtctctgtgggaagtttgtcctccgtccattgcgaccatgccgcagatactctacttcaggcagctctgggttgactactggcaaaattgctggagctggccttttgtttgttggtggaggtattggtggcactatcctatatgccaaatgggattcccatttccgggaaagtgtagagaaaaccataccttactcagacaaactcttcgagatggttcttggtcctgcagcttataatgttccattgccaaagaaatcgattcagtcgggtccactaaaaatctctagtgtatcagaagtaatgaaagaatctaaacagcctgcctcacaactccaaaaacaaaagggagatactccagcttcagcaacagcaggtgataccctgtcggtcccagcccctgcagttcagcctgaggaatctttaaaaactgatcaccctgaaattggtgaaggaaaacccacacctgcactttcagaagaagcatcctcatcttctataagggagcgaccacctgaagaagttgcagctcgccttgcacaacaggaaaaacaagaacaagttaaaattgagtctctagccaagagcttagaagatgctctgaggcaaactgcaagtgtcactctgcaggctattgcagctcagaatgctgcggtccaggctgtcaatgcacactccaacatattgaaagccgccatggacaattctgagattgcaggcgagaagaaatctgctcagtggcgcacagtggagggtgcattgaaggaacgcagaaaggcagtagatgaagctgccgatgcccttctcaaagccaaagaagagttagagaagatgaaaagtgtgattgaaaatgcaaagaaaaaagaggttgctggggccaagcctcatataactgctgcagagggtaaacttcacaacatgatagttgatctggataatgtggtcaaaaaggtccaagcagctcagtctgaggctaaggttgtatctcagtatcatgagctggtggtccaagctcgggatgactttaaacgagagctggacagtattactccagaagtccttcctgggtggaaaggaatgagtgtttcagacttagctgacaagctctctactgatgatctgaactccctcattgctcatgcacatcgtcgtattgatcagctgaacagagagctggcagaacagaaggccaccgaaaagcagcacatcacgttagccttggagaaacaaaagctggaagaaaagcgggcatttgactctgcagtagcaaaagcattagaacatcacagaagtgaaatacaggctgaacaggacagaaagatagaagaagtcagagatgccatggaaaatgaaatgagaacccagcttcgccgacaggcagctgcccacactgatcacttgcgagatgtccttagggtacaagaacaggaattgaagtctgaatttgagcagaacctgtctgagaaactctctgaacaagaattacaatttcgtcgtctcagtcaagagcaagttgacaactttactctggatataaatactgcctatgccagactcagaggaatcgaacaggctgttcagagccatgcagttgctgaagaggaagccagaaaagcccaccaactctggctttcagtggaggcattaaagtacagcatgaagacctcatctgcagaaacacctactatcccgctgggtagtgcagttgaggccatcaaagccaactgttctgataatgaattcacccaagctttaaccgcagctatccctccagagtccctgacccgtggggtgtacagtgaagagacccttagagcccgtttctatgctgttcaaaaactggcccgaagggtagcaatgattgatgaaaccagaaatagcttgtaccagtacttcctctcctacctacagtccctgctcctattcccacctcagcaactgaagccgcccccagagctctgccctgaggatataaacacatttaaattactgtcatatgcttcctattgcattgagcatggtgatctggagctagcagcaaagtttgtcaatcagctgaagggggaatccagacgagtggcacaggactggctgaaggaagcccgaatgaccctagaaacgaaacagatagtggaaatcctgacagcatatgccagcgccgtaggaataggaaccactcaggtgcagccagagtgaggtttaggaagattttcataaagtcatatttcatgtcaaaggaaatcagcagtgatagatgaagggttcgcagcgagagtcccggacttgtctagaaatgagcaggtttacaagtactgttctaaatgttaacacctgttgcatttatattctttccatttgctatcatgtcagtgaacgccaggagtgctttctttgcaacttgtgtaacattttctgttttttcaggttttactgatgaggcttgtgaggccaatcaaaataatgtttgtgatctctactactgttgattttgccctcggagcaaactgaataaagcaacaagatgaaaactga

SEQ ID NO: 14335 - DNA, 2608 bp, Homo sapiens
  source 1..2608: mol_type = unassigned DNA
ctcgagtccaccagcagcgccgtccgcttgaccgagatgctgcgggcctgtcagttatcgggtgtgaccgccgccgcccagagttgtctctgtgggaagtttgtcctccgtccattgcgaccatgccgcagatactctacttcaggcagctctgggttgactactggcaaaattgctggagctggccttttgtttgttggtggaggtattggtggcactatcctatatgccaaatgggattcccatttccgggaaagtgtagagaaaaccataccttactcagacaaactcttcgagatggttcttggtcctgcagcttataatgttccattgccaaagaaatcgattcagtcgggtccactaaaaatctctagtgtatcagaagtaatgaaagaatctaaacagcctgcctcacaactccaaaaacaaaagggagatactccagcttcagcaacagcaggtgataccctgtcggtcccagcccctgcagttcagcctgaggaatctttaaaaactgatcaccctgaaattggtgaaggaaaacccacacctgcactttcagaagaagcatcctcatcttctataagggagcgaccacctgaagaagttgcagctcgccttgcacaacaggaaaaacaagaacaagttaaaattgagtctctagccaagagcttagaagatgctctgaggcaaactgcaagtgtcactctgcaggctattgcagctcagaatgctgcggtccaggctgtcaatgcacactccaacatattgaaagccgccatggacaattctgagattgcaggcgagaagaaatctgctcagtggcgcacagtggagggtgcattgaaggaacgcagaaaggcagtagatgaagctgccgatgcccttctcaaagccaaagaagagttagagaagatgaaaagtgtgattgaaaatgcaaagaaaaaagaggttgctggggccaagcctcatataactgctgcagagggtaaacttcacaacatgatagttgatctggataatgtggtcaaaaaggtccaagcagctcagtctgaggctaaggttgtatctcagtatcatgagctggtggtccaagctcgggatgactttaaacgagagctggacagtattactccagaagtccttcctgggtggaaaggaatgagtgagtacaacttagctgacaagctctctactgatgatctgaactccctcattgctcatgcacatcgtcgtattgatcagctgaacagagagctggcagaacagaaggccaccgaaaagcagcacatcacgttagccttggagaaacaaaagctggaagaaaagcgggcatttgactctgcagtagcaaaagcattagaacatcacagaagtgaaatacaggctgaacaggacagaaagatagaagaagtcagagatgccatggaaaatgaaatgagaacccagcttcgccgacaggcagctgcccacactgatcacttgcgagatgtccttagggtacaagaacaggaattgaagtctgaatttgagcagaacctgtctgagaaactctctgaacaagaattacaatttcgtcgtctcagtcaagagcaagttgacaactttactctggatataaatactgcctatgccagactcagaggaatcgaacaggctgttcagagccatgcagttgctgaagaggaagccagaaaagcccaccaactctggctttcagtggaggcattaaagtacagcatgaagacctcatctgcagaaacacctactatcccgctgggtagtgcagttgaggccatcaaagccaactgttctgataatgaattcacccaagctttaaccgcagctatccctccagagtccctgacccgtggggtgtacagtgaagagacccttagagcccgtttctatgctgttcaaaaactggcccgaagggtagcaatgattgatgaaaccagaaatagcttgtaccagtacttcctctcctacctacagtccctgctcctattcccacctcagcaactgaagccgcccccagagctctgccctgaggatataaacacatttaaattactgtcatatgcttcctattgcattgagcatggtgatctggagctagcagcaaagtttgtcaatcagctgaagggggaatccagacgagtggcacaggactggctgaaggaagcccgaatgaccctagaaacgaaacagatagtggaaatcctgacagcatatgccagcgccgtaggaataggaaccactcaggtgcagccagagtgaggtttaggaagattttcataaagtcatatttcatgtcaaaggaaatcagcagtgatagatgaagggttcgcagcgagagtcccggacttgtctagaaatgagcaggtttacaagtactgttctaaatgttaacacctgttgcatttatattctttccatttgctatcatgtcagtgaacgccaggagtgctttctttgcaacttgtgtaacattttctgttttttcaggttttactgatgaggcttgtgaggccaatcaaaataatgtttgtgatctctactactgttgattttgccctcggagcaaactgaataaagcaacaagatg

SEQ ID NO: 14336 - DNA, 5122 bp, Homo sapiens
  source 1..5122: mol_type = unassigned DNA
accagcaggccatggacagggcccaccgcttagggcagacaaagcaggttactgtgtaccggctcatctgtaaaggcaccattgaagaacgcattctgcaaagagccaaggagaagagtgagattcagcggatggtgatttcaggtgggaacttcaaaccagataccttgaaacccaaagaggtggttagtcttcttctagacgacgaagagttggagaagaaactgaggctgcggcaggaagagaaacggcaacaggaggaaaccaaccgagtgaaagagcgcaagcggaagcgggaaaagtatgcagagaagaagaaaaaagaagatgaattggatgggaaaaggagaaaagagggtgtgaacctggtgatcccatttgttccctcggctgataactccaacctctctgctgacggagatgactccttcattagcgtggactcagccatgccaagccctttcagtgagatctccatcagcagtgagctgcacactggctccattcccctggacgagagcagcagcctagccccagactctctggtccggaaacagggcaaaggcaccaacccctctggaggacggtaaccatctgggccctccgacttccttcaaccaaaccagggctagagtcctgacctgccagtggtctttggatggcttgccccgtgcagcatcttgcatcctgagtcagaagtggaaatgtccagcaggggaaggacaggcaggtggatggtgtgagcacttttatcatctgtgtctcatcaggagcatctggggtgcctgtaggaggaaggccacagggcatggatcagccccactgcatctcaagtgaactgtatagccaagtcttaaacctctcacggggcaagcctgacacagaccccctttagatgctcaggcatactgtttccatcccgattccactcttcggctctgacacgtcccttgcaaagtctccgcaggtgctgtgaagagccttccatggtagagatttctcttaagagtgtgatttctcatagggctagtaagggagattgtatacctgttgtccacagtcttcaggcagctccccaggtctctgaaccccagagtgtcatcattggagagagcagtgactgcgagagatggtggaggccgctaagcatggtagaggctagaggaagtctatccacaggcagttgtgttcccagcaattcctcccatcctgcatggttcacaccaagagaaccttcagatcctaccagcaaccgtagcaccttccacccaggggactcccagaagccagtagagagaccaggagccacctcaatcagcaggacagcctcactgcccctcttgcagagtcccctttgcccatcctgaatgcacagtctccctgctcatgcccttcagtcccctgcttggctgtatgcactgtctatattgcactgagagaggaagggacagcaggagtgaggtgaagagggcggagagagggggcaggctcggcaccggccctcccagcccggccagcctgagcttgctgccctccagtagagacagaggggcagtgtttgcatgggaggtgtttctgcctgtccctgcctgatgtccctggtggagcaggtacctccgggcgggcaagcctctgatttgcacacctgaaaatcgcggaattgagtttcgatagattgatttttaaaacttttttggagtagggggtataggggaatcatttaatttaaatcattaagattcccctgctcaaacccagattcctgtgtacagatgctatttagagggaatcagaaaaatgccaagccttttctctttgaatgtgctatttttataactgaacttgtacatatgtataaagagagacacatcttccttttactaactggataaaaaaatcttaaataaaatggagtgagataattttatgtaaattgaggtgtctgtggtctttgcagctgcccctccttggaggcaaactagagcccttggtggatgtggcaggatacagggaaagcagagccctcgcctgtgatcagagaggacaggggttggtgggacaaggagtggactgtgggtgtttccttagtagcagaattgattgggcttatgaatttgcctctggccatcagaaaggaagcttgaccaactgtctgacatgcagtggtcaacgcccttgtctccatggtgggctctttatgactcaggacttagaccccaggactgaggtgtgggcggcttggcctaggcgccattaagcagagctacatagtggtcatcttaatagtggcagtgttctcaaagttagctgcactcttaagaatcatgaaagaaaatggtgaaatacattcctaaggatgccagagacatccaggctgtgaaaacttaccttggtgatagttgggaaaagagccctagttcccagcctggcctggcagccagcgtttctctgactgggtgaaacactgataagctcttgtatcacttttgggtagggctcatgtggttcccaagtatgctggctgtgtggcctccctagccttgctcaccctgcacgctgttggtcagggtgggctggctcctgggcagctgatgcccaccacagtcacaaggatcagcctttcttcattgacatcaagtacattactagatactctggatcttgtttatcttgctggtgaacttgaccaaggcctcacacagaataaaccaacatcagaactaagcagctctgcctttacatgctatgtaaagatttttcataagaaaagatagtaatttgaaacctgaattgtcccttaaggcaacgcttctccagtgttaatgtgcacacaaatcaccttgagatcataacatgcaagttctgtttctgaaggtctaggttgaggcttgagactgagtttcttgagaagatcccaggtgatggccatgctgcttgctagtccttggactacccctggaataacaaggccctagggtgccttccagccctgccaagcaggaaaaatctctgctctttgcttatatgcccgcaccccagccaggaagcccggtgcaggaaatactttatttttcctcttacccagcttaatacacctgatgacagaaaatgaaatcctagcatttctagagaaattcaatcccttatatgttttctccatttttgttttgttttttcatttttaaactaactgttcatcattttctccatcacttcctgggtagcacctctgttgggcatgttaggtatgagagaaggcctcagatttgctactgtccctctcctgtgtggcctccaccaagatgcaatatgtcatgaagagtctgtgacccctggactcagtgtttcctgtgcctgtgtccttttattgtgaccaccagactcctggatcagtcatctttctcaactaattcctaagcccctctcagggggcatggagaccgtttggctgctctcccacgcttctctgagactaccagagagtcgcgaaacccccaactggggaggcagcgtgttgaccatgggtgcccagttcagccagcctcatggtgcacattcagaccacttagatggtggggtagggagaaggcaggttgtgttctagagaaagcagagacgtccggttgtcacgaaattgtgtgtccaagtactaaggcggcccactgcctcatcaaaggaccctgaggaagctgggtgcctcccttatctggcctcttcctgcgccctcatttctttcttgcttcaggtcctgggacttagctggcttccctttcctcttcaaaactgccaccacccactctctcgctccagtttctcccccaacccccacccccgtggcaagctgctgggggatggactcctggttctctcctagctgctgccagaagtgagcatcatgcttttcttttttttaaattaaggattttcttgctcatcacaacaaggacaccaggcaaaaacaatactgtatacagagaattacaaagcttgagatacttcacagtcctcacagaatccctgcctacagttcctggcacctttggtgagaaacaaggattcctgagggagaggctcctggactcttacctccttcctagagagctgagttctttcttccagaaaggcatatggaatgtgcatctgtgagtgcccacaaggcctctgctctcctgccacttgggatttcattgttctggcacacaaatctcaaagataaatatgtggcccaaggattggggaggcccctctgggtctgacttggcaacagcctcaggggaagaaggaagggggcacagaggttcaaagttggaggtggtggggagttttctaagtttgctcagctgatgcccccctaaagcagctctgggagagaatgcccggcctcagctcagaatgttccaccctcctaccacccccccagcacatcaccacaaaccccaccctgaactagaggcccaccccccaagctgttcctggctgccagagaagaaaggagctcccctcccatttcccagatgagaggtcccagaagacctatgctgctccatgccttgcacccttgaagagatggtgccagttacctggggatgtctgagcagagtggtggggagagttcaggtccaatggattgtcagtgcagttcagcttcagcagtcttagtttgccttcggcccggtggaattgggaagagcagcataaactcttacctagaatttttctgaatagctaagtctttcagagggctaacattttaacccggtattctaagcaccagaatttggcttggttagaactctcttttaaggatactgtgtcactgcatggctaaacagaacataccgaacataccttaacctttcctaagggcttggggtcatgtgggcatctggtgctctcaggcccactgggacgtactactgtttcccctggattaaatcatgccaacagctacactgccacaaattgtctgtgagacaggattttgctctgtcacccaggctggagtgcaatggtgcaataacagctcactgcagcctcgacctcccaggttcaagcaatcctccctgatcagcctctaccatagtgctggggttccagccacagttcttaagctctgaatagt

SEQ ID NO: 14337 - DNA, 6439 bp, Homo sapiens
  source 1..6439: mol_type = unassigned DNA
aggcgacgagcagtgagtgtgggcggggtgggggtaagccacccgtgtagcggctcgattgttctggcctggctatggcgcctctcctcccccccgccatggctccccgtgtccctgctccgctcctctcagtgagtgaaagtggccgccgccgccgccggcccagcgcccgcagccgcctcagcgccgccgccatcttggggtcccaggagccgcggagggagcgagctaggagcgtccacgcccaacgcagtcaccgtcccacggcctcagagagcgaaccgcggctccaccgtcggcggggcgacccccccctccggaccccgcccgcaccccgccccccctccgccgccgtcgcggcggcggggccaggcggcccgagccgtgcagtcggaggtccttgtgcatgaagacagatttgttctatggcctcggagttgggtgccagggatgatggaggctgcactgagctggcaaagcccctctatcttcagtacttggagagggccctccggttggaccattttctgcgacaaacgtcagctatcttcaataggaatatttctagtgatgacagtgaagatggactggatgacagtaatccattattgccccagtctggggatcccttaatacaagttaaggaagaacctccaaattcattgcttggtgaaacttctggagcaggcagttctggaatgttaaacacatattctctgaatggagttctacagtcagaatcaaaatgtgataaggggaatttatataatttctctaagctgaagaaaagcagaaagtggctaaagagcattctgctaagtgatgaatccagcgaggctgattctcagagtgaagacgatgatgaagaagaactcaatctcagcagagaagaacttcacaacatgcttcgactacacaaatataagaaacttcaccaaaataagtatagtaaagacaaggagttgcagcaatatcagtactacagtgcaggcctgctctccacatatgaccctttctatgagcaacaacggcacctacttggacccaagaaaaagaaatttaaggaggaaaagaaacttaaagctaagttgaaaaaagtgaagaaaaaaagacgaagagatgaagaactttcctctgaagaatcccctcgtcgccatcaccaccagaccaaagtctttgccaagttttctcacgatgcacctccccctggcactaagaaaaagcacttatccattgagcagctgaatgctcgtcgcaggaaagtatggctcagcattgtgaaaaaggaactaccaaaggcaaataagcagaaagcttcagctcgtaacctgtttctcaccaatagccgaaagcttgctcaccagtgcatgaaggaggtgcgtcgagctgccttgcaggcccagaagaactgtaaggaaaccttgcctcgtgcccgccgcctcaccaaggagatgcttctgtactggaagaaatatgagaaagtagagaaggagcaccgcaagagagcagagaaggaagctttggagcagcggaagttggatgaggaaatgcgggaggccaagaggcaacagcgaaaactcaacttcttaattacccagacagagttgtatgcccatttcatgagtcgcaaacgagatatgggtcatgatggtatccaggaagaaatcctaaggaaactggaagacagttctacccagagacaaatcgatataggtggaggagtggtagttaacatcacacaggaggattatgatagtaaccattttaaagcccaggccctgaagaatgctgaaaatgcttaccatattcaccaagctcggacaaggtcatttgatgaagatgcaaaagaaagtcgagcagctgccctacgggcagcaaacaagtctggcactgggtttggggagagttatagcctggctaacccatctatccgggctggtgaggatattccacagcccacaatttttaatggcaaattgaaaggttatcaactgaaaggcatgaattggttggccaatctatatgaacagggtattaatggcattcttgctgatgaaatgggccttggtaaaacagtacagagcattgcccttctggcccatctggctgagagagagaacatttggggacctttcttaataatttcacctgcgtctacacttaacaattggcaccaggagtttactagatttgttcctaaatttaaggtgctaccatattggggaaatcctcatgatagaaaagtcatcagaaggttctggagtcagaagaccctctacactcaggatgcccccttccatgtggttattaccagctatcagctggtggtgcaggatgtaaagtatttccagcgggtcaagtggcaatacatggtactggatgaggctcaggcgctcaagagtagttccagtgttcgttggaagatcctcttacagttccagtgtcggaatcggcttttgctaaccgggaccccaattcagaacaccatggcagagctttgggctctgctgcatttcattatgccaacattatttgattcacatgaggaatttaatgaatggttttccaaggacattgagagccatgccgaaaacaaatctgctattgatgagaatcaactttctcgcttacacatgattttgaagccatttatgctgaggagaatcaagaaagatgtggaaaatgaattatctgacaagattgagattctaatgtattgccaactgaccagccgacagaagctgctatatcaggcactaaagaacaaaatttccattgaggatttattgcagtcttctatgggctctacccaacaagcacagaacaccaccagcagcctcatgaatctggtcatgcagtttaggaaggtgtgtaatcacccggagttatttgaacggcaagaaacttggtctccatttcatatttccctaaagccataccacatttcaaagtttatctaccgtcatggacagatcagggtcttcaatcattcacgagacaggtggttaagggttctttctccatttgcaccagactatatccaacggtctctctttcacagaaaaggtattaatgaagaaagctgtttctctttccttcgctttattgatatatctccagcagaaatggcaaaccttatgcttcagggacttttggccagatggttagctcttttcctgtctctgaaagcctcctacaggctccatcagctacgctcctggggagcgccagaaggggagagccaccagagatacctgaggaacaaggatttccttcttggggttaattttccactctcctttccaaacctttgcagctgccctttgttaaagtctcttgttttcagcagccactgtaaagcagtgagtggctactcagaccaggttgtccatcagcggagatcagctacctcctcgctgcgtcgctgcctgctcactgagctgccatcttttttgtgtgtggccagtccacgagttaccgcagtgccattggattcttactgcaatgaccgaagtgcagaatatgaaaggcgagttctgaaggaaggagggagtctggcagccaagcagtgtttgttgaatggggcccctgaactggctgcagactggctaaatagacgatcacagttcttcccagagccagctggaggtctgtggagcatcagacctcagaatggctggtctttcatcaggattccaggcaaggagagcctcatcactgacagtggaaagctgtatgcccttgatgtcctgctgactcggctcaagtctcaagggcatagggtccttatctactcccagatgaccaggatgatagacctactggaggaatacatggtttacaggaagcatacctacatgaggcttgatggctcatccaagatctcggagaggcgagacatggttgctgattttcagaacaggaatgacatctttgtgttcctgttaagcacacgagctggaggactgggtatcaatctcactgctgcagacacagtgattttctatgatagcgactggaaccccactgtggaccagcaggccatggacagggcccaccgcttagggcagacaaagcaggttactgtgtaccggctcatctgtaaaggcaccattgaagaacgcattctgcaaagagccaaggagaagagtgagattcagcggatggtgatttcaggtgggaacttcaaaccagataccttgaaacccaaagaggtggttagtcttcttctagacgacgaagagttggagaagaaactgaggctgcggcaggaagagaaacggcaacaggaggaaaccaaccgagtgaaagagcgcaagcggaagcgggaaaagtatgcagagaagaagaaaaaagaagatgaattggatgggaaaaggagaaaagagggtgtgaacctggtgatcccatttgttccctcggctgataactccaacctctctgctgacggagatgactccttcattagcgtggactcagccatgccaagccctttcagtgagatctccatcagcagtgagctgcacactggctccattcccctggacgagagcagcagtgacatgctggtcattgtggatgacccagcctcctcagcccctcagtctcgagctaccaactctcccgcatccataacaggctccgtctcagataccgtgaatggaatttccattcaggaaatgccagctgcaggacgtggtcactcagcccgaagccgaggccgccccaaaggttcaggaagcacagccaaaggagcagggaagggccggagccgaaagtccacggcaggcagtgctgctgcaatggcaggagccaaagccggggctgcagcggcctctgcagctgcctatgccgcatacgggtacaacgtgtctaaaggaatctccgccagcagtcctctgcagacatcccttgttcggcctgctggccttgctgactttggaccttcaagcgcctcttctcctttgagttcccctttgagcaagggaaataatgttcctgggaatcccaagaacctccacatgaccagcagcctagccccagactctctggtccggaaacagggcaaaggcaccaacccctctggaggacggtaaccatctgggccctccgacttccttcaaccaaaccagggctagagtcctgacctgccagtggtctttggatggcttgccccgtgcagcatcttgcatcctgagtcagaagtggaaatgtccagcaggggaaggacaggcaggtggatggtgtgagcacttttatcatctgtgtctcatcaggagcatctggggtgcctgtaggaggaaggccacagggcatggatcagccccactgcatctcaagtgaactgtatagccaagtcttaaacctctcacggggcaagcctgacacagaccccctttagatgctcaggcatactgtttccatcccgattccactcttcggctctgacacgtcccttgcaaagtctccgcaggtgctgtgaagagccttccatggtagagatttctcttaagagtgtgatttctcatagggctagtaagggagattgtatacctgttgtccacagtcttcaggcagctccccaggtctctgaaccccagagtgtcatcattggagagagcagtgactgcgagagatggtggaggccgctaagcatggtagaggctagaggaagtctatccacaggcagttgtgttcccagcaattcctcccatcctgcatggttcacaccaagagaaccttcagatcctaccagcaaccgtagcaccttccacccaggggactcccagaagccagtagagagaccaggagccacctcaatcagcaggacagcctcactgcccctcttgcagagtcccctttgcccatcctgaatgcacagtctccctgctcatgcccttcagtcccctgcttggctgtatgcactgtctatattgcactgagagaggaagggacagcaggagtgaggtgaagagggcggagagagggggcaggctcggcaccggccctcccagcccggccagcctgagcttgctgccctccagtagagacagaggggcagtgtttgcatgggaggtgtttctgcctgtccctgcctgatgtccctggtggagcaggtacctccgggcgggcaagcctctgatttgcacacctgaaaatcgcggaattgagtttcgatagattgatttttaaaacttttttggagtagggggtataggggaatcatttaatttaaatcattaagattcccctgctcaaacccagattcctgtgtacagatgctatttagagggaatcagaaaaatgccaagccttttctctttgaatgtgctatttttataactgaacttgtacatatgtataaagagagacacatcttccttttactaactggataaaaaaatcttaaataaaatggagtgagataattttatgtaaa

SEQ ID NO: 14338 - DNA, 5989 bp, Homo sapiens
  source 1..5989: mol_type = unassigned DNA
ggtcccaggagccgcggagggagcgagctaggagcgtccacgcccaacgcagtcaccgtcccacggcctcagagagcgaaccgcggctccaccgtcggcggggcgacccccccctccggaccccgcccgcaccccgccccccctccgccgccgtcgcggcggcggggccaggcggcccgagccgtgcagtcggaggtccttgtgcatgaagacagatttgttctatggcctcggagttgggtgccagggatgatggaggctgcactgagctggcaaagcccctctatcttcagtacttggagagggccctccggttggaccattttctgcgacaaacgtcagctatcttcaataggaatatttctagtgatgacagtgaagatggactggatgacagtaatccattattgccccagtctggggatcccttaatacaagttaaggaagaacctccaaattcattgcttggtgaaacttctggagcaggcagttctggaatgttaaacacatattctctgaatggagttctacagtcagaatcaaaatgtgataaggggaatttatataatttctctaagctgaagaaaagcagaaagtggctaaagagcattctgctaagtgatgaatccagcgaggctgattctcagagtgaagacgatgatgaagaagaactcaatctcagcagagaagaacttcacaacatgcttcgactacacaaatataagaaacttcaccaaaataagtatagtaaagacaaggagttgcagcaatatcagtactacagtgcaggcctgctctccacatatgaccctttctatgagcaacaacggcacctacttggacccaagaaaaagaaatttaaggaggaaaagaaacttaaagctaagttgaaaaaagtgaagaaaaaaagacgaagagatgaagaactttcctctgaagaatcccctcgtcgccatcaccaccagaccaaagtctttgccaagttttctcacgatgcacctccccctggcactaagaaaaagcacttatccattgagcagctgaatgctcgtcgcaggaaagtatggctcagcattgtgaaaaaggaactaccaaaggcaaataagcagaaagcttcagctcgtaacctgtttctcaccaatagccgaaagcttgctcaccagtgcatgaaggaggtgcgtcgagctgccttgcaggcccagaagaactgtaaggaaaccttgcctcgtgcccgccgcctcaccaaggagatgcttctgtactggaagaaatatgagaaagtagagaaggagcaccgcaagagagcagagaaggaagctttggagcagcggaagttggatgaggaaatgcgggaggccaagaggcaacagcgaaaactcaacttcttaattacccagacagagttgtatgcccatttcatgagtcgcaaacgagatatgggtcatgatggtatccaggaagaaatcctaaggaaactggaagacagttctacccagagacaaatcgatataggtggaggagtggtagttaacatcacacaggaggattatgatagtaaccattttaaagcccaggccctgaagaatgctgaaaatgcttaccatattcaccaagctcggacaaggtcatttgatgaagatgcaaaagaaagtcgagcagctgccctacgggcagcaaacaagtctggcactgggtttggggagagttatagcctggctaacccatctatccgggctggtgaggatattccacagcccacaatttttaatggcaaattgaaaggttatcaactgaaaggcatgaattggttggccaatctatatgaacagggtattaatggcattcttgctgatgaaatgggccttggtaaaacagtacagagcattgcccttctggcccatctggctgagagagagaacatttggggacctttcttaataatttcacctgcgtctacacttaacaattggcaccaggagtttactagatttgttcctaaatttaaggtgctaccatattggggaaatcctcatgatagaaaagtcatcagaaggttctggagtcagaagaccctctacactcaggatgcccccttccatgtggttattaccagctatcagctggtggtgcaggatgtaaagtatttccagcgggtcaagtggcaatacatggtactggatgaggctcaggcgctcaagagtagttccagtgttcgttggaagatcctcttacagttccagtgtcggaatcggcttttgctaaccgggaccccaattcagaacaccatggcagagctttgggctctgctgcatttcattatgccaacattatttgattcacatgaggaatttaatgaatggttttccaaggacattgagagccatgccgaaaacaaatctgctattgatgagaatcaactttctcgcttacacatgattttgaagccatttatgctgaggagaatcaagaaagatgtggaaaatgaattatctgacaagattgagattctaatgtattgccaactgaccagccgacagaagctgctatatcaggcactaaagaacaaaatttccattgaggatttattgcagtcttctatgggctctacccaacaagcacagaacaccaccagcagcctcatgaatctggtcatgcagtttaggaaggtgtgtaatcacccggagttatttgaacggcaagaaacttggtctccatttcatatttccctaaagccataccacatttcaaagtttatctaccgtcatggacagatcagggtcttcaatcattcacgagacaggtggttaagggttctttctccatttgcaccagactatatccaacggtctctctttcacagaaaaggtattaatgaagaaagctgtttctctttccttcgctttattgatatatctccagcagaaatggcaaaccttatgcttcagggacttttggccagatggttagctcttttcctgtctctgaaagcctcctacaggctccatcagctacgctcctggggagcgccagaaggggagagccaccagagatacctgaggaacaaggatttccttcttggggttaattttccactctcctttccaaacctttgcagctgccctttgttaaagtctcttgttttcagcagccactgtaaagcagtgagtggctactcagaccaggttgtccatcagcggagatcagctacctcctcgctgcgtcgctgcctgctcactgagctgccatcttttttgtgtgtggccagtccacgagttaccgcagtgccattggattcttactgcaatgaccgaagtgcagaatatgaaaggcgagttctgaaggaaggagggagtctggcagccaagcagtgtttgttgaatggggcccctgaactggctgcagactggctaaatagacgatcacagttcttcccagagccagctggaggtctgtggagcatcagacctcagaatggctggtctttcatcaggattccaggcaaggagagcctcatcactgacagtggaaagctgtatgcccttgatgtcctgctgactcggctcaagtctcaagggcatagggtccttatctactcccagatgaccaggatgatagacctactggaggaatacatggtttacaggaagcatacctacatgaggcttgatggctcatccaagatctcggagaggcgagacatggttgctgattttcagaacaggaatgacatctttgtgttcctgttaagcacacgagctggaggactgggtatcaatctcactgctgcagacacagtgattttctatgatagcgactggaaccccactgtggaccagcaggccatggacagggcccaccgcttagggcagacaaagcaggttactgtgtaccggctcatctgtaaaggcaccattgaagaacgcattctgcaaagagccaaggagaagagtgagattcagcggatggtgatttcaggtgggaacttcaaaccagataccttgaaacccaaagaggtggttagtcttcttctagacgacgaagagttggagaagaaactgaggctgcggcaggaagagaaacggcaacaggaggaaaccaaccgagtgaaagagcgcaagcggaagcgggaaaagtatgcagagaagaagaaaaaagaagatgaattggatgggaaaaggagaaaagagggtgtgaacctggtgatcccatttgttccctcggctgataactccaacctctctgctgacggagatgactccttcattagcgtggactcagccatgccaagccctttcagtgagatctccatcagcagtgagctgcacactggctccattcccctggacgagagcagcagtgacatgctggtcattgtggatgacccagcctcctcagcccctcagtctcgagctaccaactctcccgcatccataacaggctccgtctcagataccgtgaatggaatttccattcaggaaatgccagctgcaggacgtggtcactcagcccgaagccgaggccgccccaaaggttcaggaagcacagccaaaggagcagggaagggccggagccgaaagtccacggcaggcagtgctgctgcaatggcaggagccaaagccggggctgcagcggcctctgcagctgcctatgccgcatacgggtacaacgtgtctaaaggaatctccgccagcagtcctctgcagacatcccttgttcggcctgctggccttgctgactttggaccttcaagcgcctcttctcctttgagttcccctttgagcaagggaaataatgttcctgggaatcccaagaacctccacatgaccagcagcctagccccagactctctggtccggaaacagggcaaaggcaccaacccctctggaggacggtaaccatctgggccctccgacttccttcaaccaaaccagggctagagtcctgacctgccagtggtctttggatggcttgccccgtgcagcatcttgcatcctgagtcagaagtggaaatgtccagcaggggaaggacaggcaggtggatggtgtgagcacttttatcatctgtgtctcatcaggagcatctggggtgcctgtaggaggaaggccacagggcatggatcagccccactgcatctcaagtgaactgtatagccaagtcttaaacctctcacggggcaagcctgacacagaccccctttagatgctcaggcatactgtttccatcccgattccactcttcggctctgacacgtcccttgcaaagtctccgcaggtgctgtgaagagccttccatggtagagatttctcttaagagtgtgatttctcatagggctagtaagggagattgtatacctgttgtccacagtcttcaggcagctccccaggtctctgaaccccagagtgtcatcattggagagagcagtgactgcgagagatggtggaggccgctaagcatggtagaggctagaggaagtctatccacaggcagttgtgttcccagcaattcctcccatcctgcatggttcacaccaagagaaccttcagatcctaccagcaaccgtagcaccttccacccaggggactcccagaagccagtagagagaccaggagccacctcaatcagcagtgtttgcatgggaggtgtttctgcctgtccctgcctgatgtccctggtggagcaggtacctccgggcgggcaagcctctgatttgcacacctgaaaatcgcggaattgagtttcgatagattgatttttaaaacttttttggagtagggggtataggggaatcatttaatttaaatcattaagattcccctgctcaaacccagattcctgtgtacagatgctatttagagggaatcagaaaaatgccaagccttttctctttgaatgtgctatttttataactgaacttgtacatatgtataaagagagacacatcttccttttactaactggataaaaaaatcttaaataaaatggagtgag

SEQ ID NO: 14339 - DNA, 1185 bp, Homo sapiens
  source 1..1185: mol_type = unassigned DNA
gcaaatcggacgctgtgggctaggccgccaccgcgagcccactcgcccgatacgcgccttggggtccgggtcggctttccccgggacccctggccggaaactgagccgttcacttccgccaccagccggaagttttctgtcactggacgccaaggagttttcggtggctcagctgggtaaccggggatcaccatggcggcctcattggtggggaagaagatcgtgtttgtaacggggaacgccaagaagctggaggaggtcgttcagattctaggagataagtttccatgcactttggtggcacagaaaattgacctgccggagtaccagggggagccggatgagatttccatacagaaatgtcaggaggcagttcgccaggtacaggggcccgtgctggttgaggacacttgtctgtgcttcaatgcccttggagggctccccggcccctacataaagtggtttctggagaagttaaagcctgaaggtctccaccagctcctggccgggttcgaggacaagtcagcctatgcgctctgcacgtttgcactcagcaccggggacccaagccagcccgtgcgcctgttcaggggccggacctcgggccggatcgtggcacccagaggctgccaggactttggctgggacccctgctttcagcctgatggatatgagcagacgtacgcagagatgcctaaggcggagaagaacgctgtctcccatcgcttccgggccctgctggagctgcaggagtactttggcagtttggcagcttgacttctgcagctggaggaggcccctcaggccggggatctggggagggctagcccaaaacctcccgcatcgggcaggcaccccctgaagtacttccttcagggtttcccctttgtgagggtgtcgagtagcctcaccggcctgtctggaggagcagctggctctgctctgagaaactctggcaagtggacgccattctcttgcccttaggattcactgctctctcctacagccgccaggcctggggtcctgaaaggaccttgggtggtaaagctgtacttggtgggagtgagggcgtggggaggaaccatgcaaatcgccttccatggtttttaaatgcagtaaataacatttctggatgagacttgtttccaaaataaaccagctatatctgttttgaaccctgcccca

SEQ ID NO: 14340 - DNA, 897 bp, Homo sapiens
  source 1..897: mol_type = unassigned DNA
ggctcagctgggtaaccggggatcaccatggcggcctcattggtggggaagaagatcgtgtttgtaacggggaacgccaagaagctggaggaggtacaggggcccgtgctggttgaggacacttgtctgtgcttcaatgcccttggagggctccccggcccctacataaagtggtttctggagaagttaaagcctgaaggtctccaccagctcctggccgggttcgaggacaagtcagcctatgcgctctgcacgtttgcactcagcaccggggacccaagccagcccgtgcgcctgttcaggggccggacctcgggccggatcgtggcacccagaggctgccaggactttggctgggacccctgctttcagcctgatggatatgagcagacgtacgcagagatgcctaaggcggagaagaacgctgtctcccatcgcttccgggccctgctggagctgcaggagtactttggcagtttggcagcttgacttctgcagctggaggaggcccctcaggccggggatctggggagggctagcccaaaacctcccgcatcgggcaggcaccccctgaagtacttccttcagggtttcccctttgtgagggtgtcgagtagcctcaccggcctgtctggaggagcagctggctctgctctgagaaactctggcaagtggacgccattctcttgcccttaggattcactgctctctcctacagccgccaggcctggggtcctgaaaggaccttgggtggtaaagctgtacttggtgggagtgagggcgtggggaggaaccatgcaaatcgccttccatggtttttaaatgcagtaaataacatttctggatgagacttgtttccaaaataaaccagctatatctgttttgaaccctgcccca

SEQ ID NO: 14341 - DNA, 1072 bp, Homo sapiens
  source 1..1072: mol_type = unassigned DNA
tacgcgccttggggtccgggtcggctttccccgggacccctggccggaaactgagccgttcacttccgccaccagccggaagttttctgtcactggacgccaaggagttttcggtggctcagctgggtaaccggggatcaccatggcggcctcattggtcgttcagattctaggagataagtttccatgcactttggtggcacagaaaattgacctgccggagtaccagggggagccggatgagatttccatacagaaatgtcaggaggcagttcgccaggtacaggggcccgtgctggttgaggacacttgtctgtgcttcaatgcccttggagggctccccggcccctacataaagtggtttctggagaagttaaagcctgaaggtctccaccagctcctggccgggttcgaggacaagtcagcctatgcgctctgcacgtttgcactcagcaccggggacccaagccagcccgtgcgcctgttcaggggccggacctcgggccggatcgtggcacccagaggctgccaggactttggctgggacccctgctttcagcctgatggatatgagcagacgtacgcagagatgcctaaggcggagaagaacgctgtctcccatcgcttccgggccctgctggagctgcaggagtactttggcagtttggcagcttgacttctgcagctggaggaggcccctcaggccggggatctggggagggctagcccaaaacctcccgcatcgggcaggcaccccctgaagtacttccttcagggtttcccctttgtgagggtgtcgagtagcctcaccggcctgtctggaggagcagctggctctgctctgagaaactctggcaagtggacgccattctcttgcccttaggattcactgctctctcctacagccgccaggcctggggtcctgaaaggaccttgggtggtaaagctgtacttggtgggagtgagggcgtggggaggaaccatgcaaatcgccttccatggtttttaaatgcagtaaataacatttctggatgagacttgtttccaaaataaaccagctatatctgttttg

SEQ ID NO: 14342 - DNA, 10197 bp, Homo sapiens
  source 1..10197: mol_type = unassigned DNA
gcagtaaccatgtggatgtgctgctgaagcgtttcctcaagctcgctggggtgggaggagaggaggaggaggaggtggtggtggaggaggaggcagggggtggagagagagaaagcgcacgccgagaggaggtgtgggtgttccgcttccatcctaacggaacgagctccctcttcgcggacatgggattacccagcggctgctaacccctctcctcgccctgctcccccaaaccggcgtggctccccgggcaccaaggagctgactacagaggagcaggatttgcacccctcgctgggcttgctttggcaacagagtgcctgacccaggtcaggattttcaagaaagacatgtctgacaaaatgtctagcttcctacatattggagacatttgttctctgtacgcggagggatcgacaaatggatttattagcaccttgggcctggttgatgatcgttgtgttgtacagccagaaaccggggaccttaacaatccacctaagaaattcagagactgcctctttaagctatgtcccatgaaccgctactctgcccaaaagcagttctggaaagccgctaagcctggggccaacagcaccacagacgcagtgctactcaacaaactgcaccacgctgcagacttggaaaagaagcagaatgagacagaaaacaggaaattgctggggaccgtaatccagtatggcaatgtgatccagctcctgcatttgaaaagtaataaatacctaacagtgaataagaggcttcctgctctgttggagaagaatgccatgagagtcacattggacgaggctggaaatgaagggtcctggttttatattcagccattctacaagctgcgatccattggagacagcgtggtcataggtgacaaggtggttctgaaccccgtcaatgctggtcagcccctacatgctagcagccatcaactggtagataacccaggctgcaatgaggtcaattccgtcaactgcaatacaagctggaaaatagtccttttcatgaaatggagtgataacaaagacgacatattaaaggggggtgacgtggtgaggctgtttcatgctgagcaggagaagtttctcacctgtgacgaacacaggaagaagcagcacgtcttcctgagaaccacgggccggcagtcggccacatctgccaccagttcaaaagccctgtgggaggtggaggtggtccagcatgacccatgtcggggcggagcagggtattggaacagccttttccgtttcaagcatctggccacggggcattacttggcagcagaggtggaccctgatcaggacgcctctcgaagtaggttgcggaatgcccaagaaaagatggtatactccctggtctctgtgcctgaaggcaatgacatctcctccattttcgagctagatcccaccactctgcgtggaggtgacagccttgtcccaaggaactcttatgttcggctcagacacctatgtactaatacctgggttcacagcacaaatattcctattgacaaggaagaagaaaagcccgtgatgctgaaaattggcacctctcctgtgaaggaggataaggaagcatttgccatagttccggtttctcctgctgaagttcgggacctggactttgccaatgatgccagcaaggtgctgggctccattgctgggaagctagagaagggcaccatcacccagaatgaaaggaggtctgtaaccaagctgctagaagatttggtttacttcgtcactggtggaactaattctggtcaagatgttctcgaagttgtcttctccaagcccaacagagaacggcagaaactgatgagagaacagaatattctcaagcagatcttcaagttgttacaagccccattcacagactgcggtgatggcccaatgcttcggctggaagagctcggggaccagcggcacgctcctttcagacacatctgccggctctgctacagggtgctgagacactcgcagcaagactacaggaagaaccaggagtatatagccaagcagtttggcttcatgcagaagcagattggctatgatgtgttggctgaagacactatcactgccctgctccacaataatcggaaactcctggaaaaacacattaccgcggcagagattgacacatttgtcagcctggtgcgaaagaacagggagcccagattcttagattacctctccgacctctgtgtctccatgaacaaatcaattccagtgacccaggaactgatatgtaaagctgtgctgaaccccaccaacgctgacatcctgattgagaccaagttggttctttctcgttttgaatttgaaggtgtctcttccactggagagaatgctctggaggcaggagaagacgaggaagaggtgtggctgttttggagggacagcaacaaagagattcgcagcaagagtgtgagggaattggctcaggatgctaaagaagggcagaaggaggaccgagacgttctcagctactacagatatcagctgaacctctttgcgaggatgtgtctggaccgccaatacctggccatcaacgaaatctcaggccagctggatgtcgatctcattctccgctgcatgtctgacgagaacctgccctatgacctcagggcgtccttctgccgcctcatgcttcacatgcatgtggaccgagatccccaggaacaagtcacccccgtgaaatatgcccgcctctggtcggagattccctcggagatcgccattgacgactatgatagtagtggagcttccaaagatgaaattaaggagagatttgctcagaccatggagtttgtggaggagtatttaagagatgtggtttgtcagaggttccctttctctgataaagagaagaataagcttacgtttgaggttgtaaatttagctaggaatctcatatactttggtttctacaacttctctgaccttctacgattaactaagatccttctggccatattggactgtgtacatgtgacaacaatcttccccattagcaagatggcgaaaggagaagagaataaaggtaacaatgatgtggagaagctgaagagcagtaacgtgatgagatctattcatggcgtgggagagctgatgacccaggtggtgctccggggaggaggctttttgcccatgactcccatggctgctgcccctgaaggcaatgtgaagcaggcagagcctgagaaggaggacatcatggtcatggacaccaagctgaagatcattgagatactccagtttattttgaatgtgaggttggattataggatctcctgcctcctgtgtatatttaagcgagagtttgatgaaagcaattcccagacttcagaaacatcctccggaaacagcagccaagaagggccaagtaatgtaccaggtgctcttgactttgaacacattgaagaacaagcagaaggcatctttggaggaagtgaggagaacaccccactggacttggatgaccacggcggcagaacctttctccgtgtcctgctccacttgacgatgcatgactacccacccctggtgtcaggggccctgcagctcctcttccggcacttcagccagaggcaggaggtgctccaggccttcaaacaggttcaactgctggttaccagccaagatgtggacaactacaaacagatcaaacaagacttggatcaactgaggtccatcgtggaaaagtcagagctttgggtgtacaaagggcagggccccgatgagactatggatggtgcatctggagaaaatgaacataagaaaacggaggagggaaataacaagccacaaaagcatgaaagcaccagcagctacaactacagagtggtcaaagagattttgattcggcttagcaaactctgtgttcaagagagtgcctcagtgagaaagagcaggaagcagcaacagcgtctgctccggaacatgggcgcgcacgccgtggtgctggagctgctgcagattccctatgagaaggccgaagataccaagatgcaagagataatgaggttggctcatgaatttttgcagaatttctgcgcaggcaaccagcagaatcaagctttgctacataaacacataaacctgtttctcaacccagggatcctggaggcagtaaccatgcagcacatcttcatgaacaatttccagctttgcagtgagatcaacgagagagttgttcagcacttcgttcactgcatagagactcacggtcggaatgtccagtatataaagttcttacagacaattgtcaaggcagaagggaaatttattaaaaaatgccaagacatggttatggccgagctggtcaattcgggagaggatgtcctcgtgttctacaacgacagagcctctttccagactctgatccagatgatgcggtcagaacgggatcggatggatgagaacagccctctcatgtaccacatccacttggtcgagctcctggctgtgtgcacggagggtaagaatgtctacacagagatcaagtgcaactccctgctcccgctggatgacatcgttcgcgtggtgacccacgaggactgcatccctgaggttaaaattgcatacattaacttcctgaatcactgctatgtggatacagaggtggaaatgaaggagatttataccagcaatcacatgtggaaattgtttgagaatttccttgtagacatctgcagggcctgtaacaacactagtgacaggaaacatgcagactcgattttggagaagtatgtcaccgaaatcgtcatgagtattgttactactttcttcagctctcccttctcagaccagagtacgactttgcagactcgccagcctgtctttgtgcaactgctgcaaggcgtgttcagggtttaccactgcaactggttaatgccaagccaaaaagcctccgtggagagctgtattcgggtgctgtctgatgtagccaagagccgggccattgccattcccgtggacctggacagccaagtcaacaacctctttctcaagtcccacagcattgtgcagaaaacagccatgaactggcggctctcagcccgcaatgccgcacgcagggactctgttctggcagcttccagagactaccggaatatcattgagagattgcaggacatcgtctccgcgctggaggaccgtctcaggcccctggtgcaggcagagttatctgtgctcgtggatgttctccacagacccgagctgcttttcccagagaacacagacgccagaaggaaatgtgaaagtggcggtttcatttgcaagttaataaagcatacaaaacagctgctagaagaaaatgaagagaagctctgcattaaggtcctacagaccctgagggaaatgatgaccaaagatagaggctatggagaaaagctaatttccattgatgaattggataatgctgagcttcctccagctccggattctgagaacgccactgaggagcttgaaccaagtccacccctgcggcagctggaagaccataaaaggggtgaggcgctcaggcaagttctggtcaaccgttactatggaaacgtcagaccttcgggacgaagagagagccttaccagctttggcaatggcccactgtcagcaggaggacccggcaagcccgggggaggagggggaggttccggatccagctctatgagcaggggtgagatgagtctggccgaggttcagtgtcaccttgacaaggagggggcttccaatctagttatcgacctcatcatgaacgcatccagtgaccgagtgttccatgaaagcattctcctggccattgcccttctggaaggaggcaacaccaccatccagcactcctttttctgtcgcttgacagaagataagaagtcagagaaattctttaaggtgttttatgaccggatgaaggtggcccagcaagaaatcaaagcaacagtgacagtgaacaccagtgacttgggaaataaaaagaaagacgatgaggtagacagggatgccccatcacggaaaaaagctaaagagcccacaacacagataacagaagaggtccgggatcagctcctggaggcctccgctgccaccaggaaagccttcaccactttcaggagggaggctgatcccgacgaccactaccagcctggagagggcacccaggccactgccgacaaggccaaggacgacctggagatgagcgcggtcatcaccatcatgcagcccatcctccgcttccttcagctcctgtgtgaaaaccacaaccgagacctgcagaacttcctccgttgccaaaataacaagaccaactacaatttggtatgtgagaccctgcagtttctggactgtatttgtggaagcacaactggaggccttggtcttctgggcttgtatataaatgaaaagaatgtagcgcttatcaaccaaaccctggaaagtctgaccgaatactgtcaaggaccttgccatgagaaccagaactgcatagccacccatgaatccaatggcattgacatcatcacagccctgatcctcaatgatatcaatcctttgggaaagaagaggatggaccttgtgttagaactgaagaacaatgcctcgaagttgctcctggccatcatggaaagcaggcacgacagtgaaaacgcagagaggatactttataacatgaggcccaaggaactggtggaagtgatcaagaaagcctacatgcaaggtgaagtggaatttgaggatggagaaaacggtgaggatggggcggcgtcccccaggaacgtggggcacaacatctacatattagcccatcagttggctcggcataacaaagaacttcagagcatgctgaaacctggtggccaagtggacggagatgaagccctggagttttatgccaagcacacggcgcagatagagattgtcagattagaccgaacaatggaacagatagtctttcccgtgcccagcatatgtgaattcctaaccaaggagtcaaaactacgaatttactatactacagagagagacgaacaaggcagcaaaatcaatgatttctttctgcggtctgaagacctcttcaatgaaatgaattggcagaagaaactgagagcccagcccgtgttgtactggtgtgcccgcaacatgtctttctggagcagcatttcgtttaacctggccgtcctgatgaacctgctggtggcgtttttctacccgtttaagggagtccgaggaggaaccctggagccccactggtcgggactcctgtggacagccatgctcatctctctggccatcgtcattgccctccccaagccccatggcatccgggccttaattgcctccacaattctacgactgatattttcagtcgggttacaacccacgttgtttcttctgggcgctttcaatgtatgcaataaaatcatctttctaatgagctttgtgggcaactgtgggacattcacaagaggctaccgagccatggttctggatgttgagttcctctatcatttgttgtatctggtgatctgtgccatggggctctttgtccatgaattcttctacagtctgctgctttttgatttagtgtacagagaagagactttgcttaatgtcattaaaagtgtcactcgcaatggacggtccatcatcctgacagcagttctggctctgatcctcgtttacctgttctcaatagtgggctatcttttcttcaaggatgactttatcttggaagtagataggctgcccaatgaaacagctgttccagaaaccggcgagagtttggcaagcgagttcctgttctccgatgtgtgtagggtggagagtggggagaactgctcctctcctgcacccagagaagagctggtccctgcagaagagacggaacaggataaagagcacacatgtgagacgctgctgatgtgcattgtcactgtgctgagtcacgggctgcggagcgggggtggagtaggagatgtactcaggaagccgtccaaagaggaacccctgtttgctgctagagttatttatgacctcttgttcttcttcatggtcatcatcattgttcttaacctgatttttggggttatcattgacacttttgctgacctgaggagtgagaagcagaagaaggaagagatcttgaagaccacgtgctttatctgtggcttggaaagagacaagtttgacaacaagactgtcacctttgaagagcacatcaaggaagaacacaacatgtggcactatctgtgcttcatcgtcctggtgaaagtaaaggactccaccgaatatactgggcctgagagttacgtggcagaaatgatcaaggaaagaaaccttgactggttccccaggatgagagccatgtcattggtcagcagtgattctgaaggagaacagaatgagctgagaaacctgcaggagaagctggagtccaccatgaaacttgtcacgaacctttctggccagctgtcggaattaaaggatcagatgacagaacaaaggaagcagaaacaaagaattggtcttctaggacatcctcctcacatgaatgtcaacccacaacaaccagcataagcaaatgaaagaaaggaattgtatttaccttttataattattattagtgtgggtatggctaatgagttctgattcacccacgaaggttacatttatgctgaatacatttgtaaatactcagttttatactgtatgtatatgattgctactctaaaggtttggatatatgtattgtaattagaattgttggcatgatgacatttcatttgtgccaaaaatattaaaaatgccttttttggaaggactaacagaaagcacctgatttgcacttgaaccagattatagatttaaaagtatatgacatgtattttgtatttaaaactagaatagccagtatttatgttttttataaaactgtgcaatacgaattatgcaatcacaatacatttgtagctcccgagtgtcctaaagggagtgcacttctttgaagctggtgtgttaatactatgtaataaatggttaactttcaaatgatgctgctgccaaaattatattaatagtgagtttcaggcccctgggcattttgtaccatgtaattatcctctggtgatgctgtttctcgttagtggcagtagtgcctccgtctcctagtgataatgctccaagtctatgaactgttaaatcagcattcattttaagaaaagcaactttagtttcaaagatacttttaagcttctaaattgatcatttaaactatttctttaaataagagagccaaattagaggctcatactttagcttgtgaagaagataatgaattttttaaagggaactttctatgcaatgttcaggataaatgcatactgctggccaatcagtgtcatctcctgggtaaattttgatgtcgcattataaagacatgcataattgatggtttctagattatctagtccaaacaatagagtttattttttcttcatctgaaccaacatgctacagtagctaagaagtattaaaactatatacatccatataaagatgaaatatgaactatctcattagaagtcatagttgaccacagacatgttattcttctgaaagagccacattttggttttatttcttgtcacatgatttcttttcttgatggatgaaaaatatgaaaggaaacttttatatctgttgcctagttttgtacatggatctcattttacaagagaatctctctgcaaaaaaaaaaaaaacagtttaaaaatgcattgaaagcagagttctgaaatgagtaaagtttgtaaatgcatatataaaaatatttaataaatgatgcagaatatacagtgactggttggtggctttcatttggcatttgtgacttaactgctattccatttatgtactttctttaggatcagtttgaagtacagtcggtttgattaccaggttaattcagaaaatgtttacctgattatttaaaaaaacacttgctgttgttatgacagctctgaggagaattattagaacaaacattggggagtatttagtacaacattcattcattcttctggattagtgactgccagccaggctgtcgggagcgccctactaaatctcctgtctcttctgcttttactgggggatctttaatttgctgtgtgccatgtggaagtatcgggaa

SEQ ID NO: 14343 - DNA, 10197 bp, Homo sapiens
  source 1..10197: mol_type = unassigned DNA
gcagtaaccatgtggatgtgctgctgaagcgtttcctcaagctcgctggggtgggaggagaggaggaggaggaggtggtggtggaggaggaggcagggggtggagagagagaaagcgcacgccgagaggaggtgtgggtgttccgcttccatcctaacggaacgagctccctcttcgcggacatgggattacccagcggctgctaacccctctcctcgccctgctcccccaaaccggcgtggctccccgggcaccaaggagctgactacagaggagcaggatttgcacccctcgctgggcttgctttggcaacagagtgcctgacccaggtcaggattttcaagaaagacatgtctgacaaaatgtctagcttcctacatattggagacatttgttctctgtacgcggagggatcgacaaatggatttattagcaccttgggcctggttgatgatcgttgtgttgtacagccagaaaccggggaccttaacaatccacctaagaaattcagagactgcctctttaagctatgtcccatgaaccgctactctgcccaaaagcagttctggaaagccgctaagcctggggccaacagcaccacagacgcagtgctactcaacaaactgcaccacgctgcagacttggaaaagaagcagaatgagacagaaaacaggaaattgctggggaccgtaatccagtatggcaatgtgatccagctcctgcatttgaaaagtaataaatacctaacagtgaataagaggcttcctgctctgttggagaagaatgccatgagagtcacattggacgaggctggaaatgaagggtcctggttttatattcagccattctacaagctgcgatccattggagacagcgtggtcataggtgacaaggtggttctgaaccccgtcaatgctggtcagcccctacatgctagcagccatcaactggtagataacccaggctgcaatgaggtcaattccgtcaactgcaatacaagctggaaaatagtccttttcatgaaatggagtgataacaaagacgacatattaaaggggggtgacgtggtgaggctgtttcatgctgagcaggagaagtttctcacctgtgacgaacacaggaagaagcagcacgtcttcctgagaaccacgggccggcagtcggccacatctgccaccagttcaaaagccctgtgggaggtggaggtggtccagcatgacccatgtcggggcggagcagggtattggaacagccttttccgtttcaagcatctggccacggggcattacttggcagcagaggtagaccctgactttgaggaagaatgcctggagtttcagccctcagtggaccctgatcaggacgcctctcgaagtaggttgcggaatgcccaagaaaagatggtatactccctggtctctgtgcctgaaggcaatgacatctcctccattttcgagctagatcccaccactctgcgtggaggtgacagccttgtcccaaggaactcttatgttcggctcagacacctatgtactaatacctgggttcacagcacaaatattcctattgacaaggaagaagaaaagcccgtgatgctgaaaattggcacctctcctgtgaaggaggataaggaagcatttgccatagttccggtttctcctgctgaagttcgggacctggactttgccaatgatgccagcaaggtgctgggctccattgctgggaagctagagaagggcaccatcacccagaatgaaaggaggtctgtaaccaagctgctagaagatttggtttacttcgtcactggtggaactaattctggtcaagatgttctcgaagttgtcttctccaagcccaacagagaacggcagaaactgatgagagaacagaatattctcaagcagatcttcaagttgttacaagccccattcacagactgcggtgatggcccaatgcttcggctggaagagctcggggaccagcggcacgctcctttcagacacatctgccggctctgctacagggtgctgagacactcgcagcaagactacaggaagaaccaggagtatatagccaagcagtttggcttcatgcagaagcagattggctatgatgtgttggctgaagacactatcactgccctgctccacaataatcggaaactcctggaaaaacacattaccgcggcagagattgacacatttgtcagcctggtgcgaaagaacagggagcccagattcttagattacctctccgacctctgtgtctccatgaacaaatcaattccagtgacccaggaactgatatgtaaagctgtgctgaaccccaccaacgctgacatcctgattgagaccaagttggttctttctcgttttgaatttgaaggtgtctcttccactggagagaatgctctggaggcaggagaagacgaggaagaggtgtggctgttttggagggacagcaacaaagagattcgcagcaagagtgtgagggaattggctcaggatgctaaagaagggcagaaggaggaccgagacgttctcagctactacagatatcagctgaacctctttgcgaggatgtgtctggaccgccaatacctggccatcaacgaaatctcaggccagctggatgtcgatctcattctccgctgcatgtctgacgagaacctgccctatgacctcagggcgtccttctgccgcctcatgcttcacatgcatgtggaccgagatccccaggaacaagtcacccccgtgaaatatgcccgcctctggtcggagattccctcggagatcgccattgacgactatgatagtagtggagcttccaaagatgaaattaaggagagatttgctcagaccatggagtttgtggaggagtatttaagagatgtggtttgtcagaggttccctttctctgataaagagaagaataagcttacgtttgaggttgtaaatttagctaggaatctcatatactttggtttctacaacttctctgaccttctacgattaactaagatccttctggccatattggactgtgtacatgtgacaacaatcttccccattagcaagatggcgaaaggagaagagaataaaggtaacaatgatgtggagaagctgaagagcagtaacgtgatgagatctattcatggcgtgggagagctgatgacccaggtggtgctccggggaggaggctttttgcccatgactcccatggctgctgcccctgaaggcaatgtgaagcaggcagagcctgagaaggaggacatcatggtcatggacaccaagctgaagatcattgagatactccagtttattttgaatgtgaggttggattataggatctcctgcctcctgtgtatatttaagcgagagtttgatgaaagcaattcccagacttcagaaacatcctccggaaacagcagccaagaagggccaagtaatgtaccaggtgctcttgactttgaacacattgaagaacaagcagaaggcatctttggaggaagtgaggagaacaccccactggacttggatgaccacggcggcagaacctttctccgtgtcctgctccacttgacgatgcatgactacccacccctggtgtcaggggccctgcagctcctcttccggcacttcagccagaggcaggaggtgctccaggccttcaaacaggttcaactgctggttaccagccaagatgtggacaactacaaacagatcaaacaagacttggatcaactgaggtccatcgtggaaaagtcagagctttgggtgtacaaagggcagggccccgatgagactatggatggtgcatctggagaaaatgaacataagaaaacggaggagggaaataacaagccacaaaagcatgaaagcaccagcagctacaactacagagtggtcaaagagattttgattcggcttagcaaactctgtgttcaagagagtgcctcagtgagaaagagcaggaagcagcaacagcgtctgctccggaacatgggcgcgcacgccgtggtgctggagctgctgcagattccctatgagaaggccgaagataccaagatgcaagagataatgaggttggctcatgaatttttgcagaatttctgcgcaggcaaccagcagaatcaagctttgctacataaacacataaacctgtttctcaacccagggatcctggaggcagtaaccatgcagcacatcttcatgaacaatttccagctttgcagtgagatcaacgagagagttgttcagcacttcgttcactgcatagagactcacggtcggaatgtccagtatataaagttcttacagacaattgtcaaggcagaagggaaatttattaaaaaatgccaagacatggttatggccgagctggtcaattcgggagaggatgtcctcgtgttctacaacgacagagcctctttccagactctgatccagatgatgcggtcagaacgggatcggatggatgagaacagccctctcatgtaccacatccacttggtcgagctcctggctgtgtgcacggagggtaagaatgtctacacagagatcaagtgcaactccctgctcccgctggatgacatcgttcgcgtggtgacccacgaggactgcatccctgaggttaaaattgcatacattaacttcctgaatcactgctatgtggatacagaggtggaaatgaaggagatttataccagcaatcacatgtggaaattgtttgagaatttccttgtagacatctgcagggcctgtaacaacactagtgacaggaaacatgcagactcgattttggagaagtatgtcaccgaaatcgtcatgagtattgttactactttcttcagctctcccttctcagaccagagtacgactttgcagactcgccagcctgtctttgtgcaactgctgcaaggcgtgttcagggtttaccactgcaactggttaatgccaagccaaaaagcctccgtggagagctgtattcgggtgctgtctgatgtagccaagagccgggccattgccattcccgtggacctggacagccaagtcaacaacctctttctcaagtcccacagcattgtgcagaaaacagccatgaactggcggctctcagcccgcaatgccgcacgcagggactctgttctggcagcttccagagactaccggaatatcattgagagattgcaggacatcgtctccgcgctggaggaccgtctcaggcccctggtgcaggcagagttatctgtgctcgtggatgttctccacagacccgagctgcttttcccagagaacacagacgccagaaggaaatgtgaaagtggcggtttcatttgcaagttaataaagcatacaaaacagctgctagaagaaaatgaagagaagctctgcattaaggtcctacagaccctgagggaaatgatgaccaaagatagaggctatggagaaaagctaatttccattgatgaattggataatgctgagcttcctccagctccggattctgagaacgccactgagaagggtgaggcgctcaggcaagttctggtcaaccgttactatggaaacgtcagaccttcgggacgaagagagagccttaccagctttggcaatggcccactgtcagcaggaggacccggcaagcccgggggaggagggggaggttccggatccagctctatgagcaggggtgagatgagtctggccgaggttcagtgtcaccttgacaaggagggggcttccaatctagttatcgacctcatcatgaacgcatccagtgaccgagtgttccatgaaagcattctcctggccattgcccttctggaaggaggcaacaccaccatccagcactcctttttctgtcgcttgacagaagataagaagtcagagaaattctttaaggtgttttatgaccggatgaaggtggcccagcaagaaatcaaagcaacagtgacagtgaacaccagtgacttgggaaataaaaagaaagacgatgaggtagacagggatgccccatcacggaaaaaagctaaagagcccacaacacagataacagaagaggtccgggatcagctcctggaggcctccgctgccaccaggaaagccttcaccactttcaggagggaggctgatcccgacgaccactaccagcctggagagggcacccaggccactgccgacaaggccaaggacgacctggagatgagcgcggtcatcaccatcatgcagcccatcctccgcttccttcagctcctgtgtgaaaaccacaaccgagacctgcagaacttcctccgttgccaaaataacaagaccaactacaatttggtatgtgagaccctgcagtttctggactgtatttgtggaagcacaactggaggccttggtcttctgggcttgtatataaatgaaaagaatgtagcgcttatcaaccaaaccctggaaagtctgaccgaatactgtcaaggaccttgccatgagaaccagaactgcatagccacccatgaatccaatggcattgacatcatcacagccctgatcctcaatgatatcaatcctttgggaaagaagaggatggaccttgtgttagaactgaagaacaatgcctcgaagttgctcctggccatcatggaaagcaggcacgacagtgaaaacgcagagaggatactttataacatgaggcccaaggaactggtggaagtgatcaagaaagcctacatgcaaggtgaagtggaatttgaggatggagaaaacggtgaggatggggcggcgtcccccaggaacgtggggcacaacatctacatattagcccatcagttggctcggcataacaaagaacttcagagcatgctgaaacctggtggccaagtggacggagatgaagccctggagttttatgccaagcacacggcgcagatagagattgtcagattagaccgaacaatggaacagatagtctttcccgtgcccagcatatgtgaattcctaaccaaggagtcaaaactacgaatttactatactacagagagagacgaacaaggcagcaaaatcaatgatttctttctgcggtctgaagacctcttcaatgaaatgaattggcagaagaaactgagagcccagcccgtgttgtactggtgtgcccgcaacatgtctttctggagcagcatttcgtttaacctggccgtcctgatgaacctgctggtggcgtttttctacccgtttaagggagtccgaggaggaaccctggagccccactggtcgggactcctgtggacagccatgctcatctctctggccatcgtcattgccctccccaagccccatggcatccgggccttaattgcctccacaattctacgactgatattttcagtcgggttacaacccacgttgtttcttctgggcgctttcaatgtatgcaataaaatcatctttctaatgagctttgtgggcaactgtgggacattcacaagaggctaccgagccatggttctggatgttgagttcctctatcatttgttgtatctggtgatctgtgccatggggctctttgtccatgaattcttctacagtctgctgctttttgatttagtgtacagagaagagactttgcttaatgtcattaaaagtgtcactcgcaatggacggtccatcatcctgacagcagttctggctctgatcctcgtttacctgttctcaatagtgggctatcttttcttcaaggatgactttatcttggaagtagataggctgcccaatgaaacagctgttccagaaaccggcgagagtttggcaagcgagttcctgttctccgatgtgtgtagggtggagagtggggagaactgctcctctcctgcacccagagaagagctggtccctgcagaagagacggaacaggataaagagcacacatgtgagacgctgctgatgtgcattgtcactgtgctgagtcacgggctgcggagcgggggtggagtaggagatgtactcaggaagccgtccaaagaggaacccctgtttgctgctagagttatttatgacctcttgttcttcttcatggtcatcatcattgttcttaacctgatttttggggttatcattgacacttttgctgacctgaggagtgagaagcagaagaaggaagagatcttgaagaccacgtgctttatctgtggcttggaaagagacaagtttgacaacaagactgtcacctttgaagagcacatcaaggaagaacacaacatgtggcactatctgtgcttcatcgtcctggtgaaagtaaaggactccaccgaatatactgggcctgagagttacgtggcagaaatgatcaaggaaagaaaccttgactggttccccaggatgagagccatgtcattggtcagcagtgattctgaaggagaacagaatgagctgagaaacctgcaggagaagctggagtccaccatgaaacttgtcacgaacctttctggccagctgtcggaattaaaggatcagatgacagaacaaaggaagcagaaacaaagaattggtcttctaggacatcctcctcacatgaatgtcaacccacaacaaccagcataagcaaatgaaagaaaggaattgtatttaccttttataattattattagtgtgggtatggctaatgagttctgattcacccacgaaggttacatttatgctgaatacatttgtaaatactcagttttatactgtatgtatatgattgctactctaaaggtttggatatatgtattgtaattagaattgttggcatgatgacatttcatttgtgccaaaaatattaaaaatgccttttttggaaggactaacagaaagcacctgatttgcacttgaaccagattatagatttaaaagtatatgacatgtattttgtatttaaaactagaatagccagtatttatgttttttataaaactgtgcaatacgaattatgcaatcacaatacatttgtagctcccgagtgtcctaaagggagtgcacttctttgaagctggtgtgttaatactatgtaataaatggttaactttcaaatgatgctgctgccaaaattatattaatagtgagtttcaggcccctgggcattttgtaccatgtaattatcctctggtgatgctgtttctcgttagtggcagtagtgcctccgtctcctagtgataatgctccaagtctatgaactgttaaatcagcattcattttaagaaaagcaactttagtttcaaagatacttttaagcttctaaattgatcatttaaactatttctttaaataagagagccaaattagaggctcatactttagcttgtgaagaagataatgaattttttaaagggaactttctatgcaatgttcaggataaatgcatactgctggccaatcagtgtcatctcctgggtaaattttgatgtcgcattataaagacatgcataattgatggtttctagattatctagtccaaacaatagagtttattttttcttcatctgaaccaacatgctacagtagctaagaagtattaaaactatatacatccatataaagatgaaatatgaactatctcattagaagtcatagttgaccacagacatgttattcttctgaaagagccacattttggttttatttcttgtcacatgatttcttttcttgatggatgaaaaatatgaaaggaaacttttatatctgttgcctagttttgtacatggatctcattttacaagagaatctctctgcaaaaaaaaaaaaaacagtttaaaaatgcattgaaagcagagttctgaaatgagtaaagtttgtaaatgcatatataaaaatatttaataaatgatgcagaatatacagtgactggttggtggctttcatttggcatttgtgacttaactgctattccatttatgtactttctttaggatcagtttgaagtacagtcggtttgattaccaggttaattcagaaaatgtttacctgattatttaaaaaaacacttgctgttgttatgacagctctgaggagaattattagaacaaacattggggagtatttagtacaacattcattcattcttctggattagtgactgccagccaggctgtcgggagcgccctactaaatctcctgtctcttctgcttttactgggggatctttaatttgctgtgtgccatgtggaagtatcgggaa

SEQ ID NO: 14344 - DNA, 10242 bp, Homo sapiens
  source 1..10242: mol_type = unassigned DNA
gcagtaaccatgtggatgtgctgctgaagcgtttcctcaagctcgctggggtgggaggagaggaggaggaggaggtggtggtggaggaggaggcagggggtggagagagagaaagcgcacgccgagaggaggtgtgggtgttccgcttccatcctaacggaacgagctccctcttcgcggacatgggattacccagcggctgctaacccctctcctcgccctgctcccccaaaccggcgtggctccccgggcaccaaggagctgactacagaggagcaggatttgcacccctcgctgggcttgctttggcaacagagtgcctgacccaggtcaggattttcaagaaagacatgtctgacaaaatgtctagcttcctacatattggagacatttgttctctgtacgcggagggatcgacaaatggatttattagcaccttgggcctggttgatgatcgttgtgttgtacagccagaaaccggggaccttaacaatccacctaagaaattcagagactgcctctttaagctatgtcccatgaaccgctactctgcccaaaagcagttctggaaagccgctaagcctggggccaacagcaccacagacgcagtgctactcaacaaactgcaccacgctgcagacttggaaaagaagcagaatgagacagaaaacaggaaattgctggggaccgtaatccagtatggcaatgtgatccagctcctgcatttgaaaagtaataaatacctaacagtgaataagaggcttcctgctctgttggagaagaatgccatgagagtcacattggacgaggctggaaatgaagggtcctggttttatattcagccattctacaagctgcgatccattggagacagcgtggtcataggtgacaaggtggttctgaaccccgtcaatgctggtcagcccctacatgctagcagccatcaactggtagataacccaggctgcaatgaggtcaattccgtcaactgcaatacaagctggaaaatagtccttttcatgaaatggagtgataacaaagacgacatattaaaggggggtgacgtggtgaggctgtttcatgctgagcaggagaagtttctcacctgtgacgaacacaggaagaagcagcacgtcttcctgagaaccacgggccggcagtcggccacatctgccaccagttcaaaagccctgtgggaggtggaggtggtccagcatgacccatgtcggggcggagcagggtattggaacagccttttccgtttcaagcatctggccacggggcattacttggcagcagaggtagaccctgactttgaggaagaatgcctggagtttcagccctcagtggaccctgatcaggacgcctctcgaagtaggttgcggaatgcccaagaaaagatggtatactccctggtctctgtgcctgaaggcaatgacatctcctccattttcgagctagatcccaccactctgcgtggaggtgacagccttgtcccaaggaactcttatgttcggctcagacacctatgtactaatacctgggttcacagcacaaatattcctattgacaaggaagaagaaaagcccgtgatgctgaaaattggcacctctcctgtgaaggaggataaggaagcatttgccatagttccggtttctcctgctgaagttcgggacctggactttgccaatgatgccagcaaggtgctgggctccattgctgggaagctagagaagggcaccatcacccagaatgaaaggaggtctgtaaccaagctgctagaagatttggtttacttcgtcactggtggaactaattctggtcaagatgttctcgaagttgtcttctccaagcccaacagagaacggcagaaactgatgagagaacagaatattctcaagcagatcttcaagttgttacaagccccattcacagactgcggtgatggcccaatgcttcggctggaagagctcggggaccagcggcacgctcctttcagacacatctgccggctctgctacagggtgctgagacactcgcagcaagactacaggaagaaccaggagtatatagccaagcagtttggcttcatgcagaagcagattggctatgatgtgttggctgaagacactatcactgccctgctccacaataatcggaaactcctggaaaaacacattaccgcggcagagattgacacatttgtcagcctggtgcgaaagaacagggagcccagattcttagattacctctccgacctctgtgtctccatgaacaaatcaattccagtgacccaggaactgatatgtaaagctgtgctgaaccccaccaacgctgacatcctgattgagaccaagttggttctttctcgttttgaatttgaaggtgtctcttccactggagagaatgctctggaggcaggagaagacgaggaagaggtgtggctgttttggagggacagcaacaaagagattcgcagcaagagtgtgagggaattggctcaggatgctaaagaagggcagaaggaggaccgagacgttctcagctactacagatatcagctgaacctctttgcgaggatgtgtctggaccgccaatacctggccatcaacgaaatctcaggccagctggatgtcgatctcattctccgctgcatgtctgacgagaacctgccctatgacctcagggcgtccttctgccgcctcatgcttcacatgcatgtggaccgagatccccaggaacaagtcacccccgtgaaatatgcccgcctctggtcggagattccctcggagatcgccattgacgactatgatagtagtggagcttccaaagatgaaattaaggagagatttgctcagaccatggagtttgtggaggagtatttaagagatgtggtttgtcagaggttccctttctctgataaagagaagaataagcttacgtttgaggttgtaaatttagctaggaatctcatatactttggtttctacaacttctctgaccttctacgattaactaagatccttctggccatattggactgtgtacatgtgacaacaatcttccccattagcaagatggcgaaaggagaagagaataaaggtaacaatgatgtggagaagctgaagagcagtaacgtgatgagatctattcatggcgtgggagagctgatgacccaggtggtgctccggggaggaggctttttgcccatgactcccatggctgctgcccctgaaggcaatgtgaagcaggcagagcctgagaaggaggacatcatggtcatggacaccaagctgaagatcattgagatactccagtttattttgaatgtgaggttggattataggatctcctgcctcctgtgtatatttaagcgagagtttgatgaaagcaattcccagacttcagaaacatcctccggaaacagcagccaagaagggccaagtaatgtaccaggtgctcttgactttgaacacattgaagaacaagcagaaggcatctttggaggaagtgaggagaacaccccactggacttggatgaccacggcggcagaacctttctccgtgtcctgctccacttgacgatgcatgactacccacccctggtgtcaggggccctgcagctcctcttccggcacttcagccagaggcaggaggtgctccaggccttcaaacaggttcaactgctggttaccagccaagatgtggacaactacaaacagatcaaacaagacttggatcaactgaggtccatcgtggaaaagtcagagctttgggtgtacaaagggcagggccccgatgagactatggatggtgcatctggagaaaatgaacataagaaaacggaggagggaaataacaagccacaaaagcatgaaagcaccagcagctacaactacagagtggtcaaagagattttgattcggcttagcaaactctgtgttcaagagagtgcctcagtgagaaagagcaggaagcagcaacagcgtctgctccggaacatgggcgcgcacgccgtggtgctggagctgctgcagattccctatgagaaggccgaagataccaagatgcaagagataatgaggttggctcatgaatttttgcagaatttctgcgcaggcaaccagcagaatcaagctttgctacataaacacataaacctgtttctcaacccagggatcctggaggcagtaaccatgcagcacatcttcatgaacaatttccagctttgcagtgagatcaacgagagagttgttcagcacttcgttcactgcatagagactcacggtcggaatgtccagtatataaagttcttacagacaattgtcaaggcagaagggaaatttattaaaaaatgccaagacatggttatggccgagctggtcaattcgggagaggatgtcctcgtgttctacaacgacagagcctctttccagactctgatccagatgatgcggtcagaacgggatcggatggatgagaacagccctctcatgtaccacatccacttggtcgagctcctggctgtgtgcacggagggtaagaatgtctacacagagatcaagtgcaactccctgctcccgctggatgacatcgttcgcgtggtgacccacgaggactgcatccctgaggttaaaattgcatacattaacttcctgaatcactgctatgtggatacagaggtggaaatgaaggagatttataccagcaatcacatgtggaaattgtttgagaatttccttgtagacatctgcagggcctgtaacaacactagtgacaggaaacatgcagactcgattttggagaagtatgtcaccgaaatcgtcatgagtattgttactactttcttcagctctcccttctcagaccagagtacgactttgcagactcgccagcctgtctttgtgcaactgctgcaaggcgtgttcagggtttaccactgcaactggttaatgccaagccaaaaagcctccgtggagagctgtattcgggtgctgtctgatgtagccaagagccgggccattgccattcccgtggacctggacagccaagtcaacaacctctttctcaagtcccacagcattgtgcagaaaacagccatgaactggcggctctcagcccgcaatgccgcacgcagggactctgttctggcagcttccagagactaccggaatatcattgagagattgcaggacatcgtctccgcgctggaggaccgtctcaggcccctggtgcaggcagagttatctgtgctcgtggatgttctccacagacccgagctgcttttcccagagaacacagacgccagaaggaaatgtgaaagtggcggtttcatttgcaagttaataaagcatacaaaacagctgctagaagaaaatgaagagaagctctgcattaaggtcctacagaccctgagggaaatgatgaccaaagatagaggctatggagaaaagctaatttccattgatgaattggataatgctgagcttcctccagctccggattctgagaacgccactgaggagcttgaaccaagtccacccctgcggcagctggaagaccataaaaggggtgaggcgctcaggcaagttctggtcaaccgttactatggaaacgtcagaccttcgggacgaagagagagccttaccagctttggcaatggcccactgtcagcaggaggacccggcaagcccgggggaggagggggaggttccggatccagctctatgagcaggggtgagatgagtctggccgaggttcagtgtcaccttgacaaggagggggcttccaatctagttatcgacctcatcatgaacgcatccagtgaccgagtgttccatgaaagcattctcctggccattgcccttctggaaggaggcaacaccaccatccagcactcctttttctgtcgcttgacagaagataagaagtcagagaaattctttaaggtgttttatgaccggatgaaggtggcccagcaagaaatcaaagcaacagtgacagtgaacaccagtgacttgggaaataaaaagaaagacgatgaggtagacagggatgccccatcacggaaaaaagctaaagagcccacaacacagataacagaagaggtccgggatcagctcctggaggcctccgctgccaccaggaaagccttcaccactttcaggagggaggctgatcccgacgaccactaccagcctggagagggcacccaggccactgccgacaaggccaaggacgacctggagatgagcgcggtcatcaccatcatgcagcccatcctccgcttccttcagctcctgtgtgaaaaccacaaccgagacctgcagaacttcctccgttgccaaaataacaagaccaactacaatttggtatgtgagaccctgcagtttctggactgtatttgtggaagcacaactggaggccttggtcttctgggcttgtatataaatgaaaagaatgtagcgcttatcaaccaaaccctggaaagtctgaccgaatactgtcaaggaccttgccatgagaaccagaactgcatagccacccatgaatccaatggcattgacatcatcacagccctgatcctcaatgatatcaatcctttgggaaagaagaggatggaccttgtgttagaactgaagaacaatgcctcgaagttgctcctggccatcatggaaagcaggcacgacagtgaaaacgcagagaggatactttataacatgaggcccaaggaactggtggaagtgatcaagaaagcctacatgcaaggtgaagtggaatttgaggatggagaaaacggtgaggatggggcggcgtcccccaggaacgtggggcacaacatctacatattagcccatcagttggctcggcataacaaagaacttcagagcatgctgaaacctggtggccaagtggacggagatgaagccctggagttttatgccaagcacacggcgcagatagagattgtcagattagaccgaacaatggaacagatagtctttcccgtgcccagcatatgtgaattcctaaccaaggagtcaaaactacgaatttactatactacagagagagacgaacaaggcagcaaaatcaatgatttctttctgcggtctgaagacctcttcaatgaaatgaattggcagaagaaactgagagcccagcccgtgttgtactggtgtgcccgcaacatgtctttctggagcagcatttcgtttaacctggccgtcctgatgaacctgctggtggcgtttttctacccgtttaagggagtccgaggaggaaccctggagccccactggtcgggactcctgtggacagccatgctcatctctctggccatcgtcattgccctccccaagccccatggcatccgggccttaattgcctccacaattctacgactgatattttcagtcgggttacaacccacgttgtttcttctgggcgctttcaatgtatgcaataaaatcatctttctaatgagctttgtgggcaactgtgggacattcacaagaggctaccgagccatggttctggatgttgagttcctctatcatttgttgtatctggtgatctgtgccatggggctctttgtccatgaattcttctacagtctgctgctttttgatttagtgtacagagaagagactttgcttaatgtcattaaaagtgtcactcgcaatggacggtccatcatcctgacagcagttctggctctgatcctcgtttacctgttctcaatagtgggctatcttttcttcaaggatgactttatcttggaagtagataggctgcccaatgaaacagctgttccagaaaccggcgagagtttggcaagcgagttcctgttctccgatgtgtgtagggtggagagtggggagaactgctcctctcctgcacccagagaagagctggtccctgcagaagagacggaacaggataaagagcacacatgtgagacgctgctgatgtgcattgtcactgtgctgagtcacgggctgcggagcgggggtggagtaggagatgtactcaggaagccgtccaaagaggaacccctgtttgctgctagagttatttatgacctcttgttcttcttcatggtcatcatcattgttcttaacctgatttttggggttatcattgacacttttgctgacctgaggagtgagaagcagaagaaggaagagatcttgaagaccacgtgctttatctgtggcttggaaagagacaagtttgacaacaagactgtcacctttgaagagcacatcaaggaagaacacaacatgtggcactatctgtgcttcatcgtcctggtgaaagtaaaggactccaccgaatatactgggcctgagagttacgtggcagaaatgatcaaggaaagaaaccttgactggttccccaggatgagagccatgtcattggtcagcagtgattctgaaggagaacagaatgagctgagaaacctgcaggagaagctggagtccaccatgaaacttgtcacgaacctttctggccagctgtcggaattaaaggatcagatgacagaacaaaggaagcagaaacaaagaattggtcttctaggacatcctcctcacatgaatgtcaacccacaacaaccagcataagcaaatgaaagaaaggaattgtatttaccttttataattattattagtgtgggtatggctaatgagttctgattcacccacgaaggttacatttatgctgaatacatttgtaaatactcagttttatactgtatgtatatgattgctactctaaaggtttggatatatgtattgtaattagaattgttggcatgatgacatttcatttgtgccaaaaatattaaaaatgccttttttggaaggactaacagaaagcacctgatttgcacttgaaccagattatagatttaaaagtatatgacatgtattttgtatttaaaactagaatagccagtatttatgttttttataaaactgtgcaatacgaattatgcaatcacaatacatttgtagctcccgagtgtcctaaagggagtgcacttctttgaagctggtgtgttaatactatgtaataaatggttaactttcaaatgatgctgctgccaaaattatattaatagtgagtttcaggcccctgggcattttgtaccatgtaattatcctctggtgatgctgtttctcgttagtggcagtagtgcctccgtctcctagtgataatgctccaagtctatgaactgttaaatcagcattcattttaagaaaagcaactttagtttcaaagatacttttaagcttctaaattgatcatttaaactatttctttaaataagagagccaaattagaggctcatactttagcttgtgaagaagataatgaattttttaaagggaactttctatgcaatgttcaggataaatgcatactgctggccaatcagtgtcatctcctgggtaaattttgatgtcgcattataaagacatgcataattgatggtttctagattatctagtccaaacaatagagtttattttttcttcatctgaaccaacatgctacagtagctaagaagtattaaaactatatacatccatataaagatgaaatatgaactatctcattagaagtcatagttgaccacagacatgttattcttctgaaagagccacattttggttttatttcttgtcacatgatttcttttcttgatggatgaaaaatatgaaaggaaacttttatatctgttgcctagttttgtacatggatctcattttacaagagaatctctctgcaaaaaaaaaaaaaacagtttaaaaatgcattgaaagcagagttctgaaatgagtaaagtttgtaaatgcatatataaaaatatttaataaatgatgcagaatatacagtgactggttggtggctttcatttggcatttgtgacttaactgctattccatttatgtactttctttaggatcagtttgaagtacagtcggtttgattaccaggttaattcagaaaatgtttacctgattatttaaaaaaacacttgctgttgttatgacagctctgaggagaattattagaacaaacattggggagtatttagtacaacattcattcattcttctggattagtgactgccagccaggctgtcgggagcgccctactaaatctcctgtctcttctgcttttactgggggatctttaatttgctgtgtgccatgtggaagtatcgggaa

SEQ ID NO: 14345 - DNA, 9858 bp, Homo sapiens
  source 1..9858: mol_type = unassigned DNA
agtaaccatgtggatgtgctgctgaagcgtttcctcaagctcgctggggtgggaggagaggaggaggaggaggtggtggtggaggaggaggcagggggtggagagagagaaagcgcacgccgagaggaggtgtgggtgttccgcttccatcctaacggaacgagctccctcttcgcggacatgggattacccagcggctgctaacccctctcctcgccctgctcccccaaaccggcgtggctccccgggcaccaaggagctgactacagaggagcaggatttgcacccctcgctgggcttgctttggcaacagagtgcctgacccaggtcaggattttcaagaaagacatgtctgacaaaatgtctagcttcctacatattggagacatttgttctctgtacgcggagggatcgacaaatggatttattagcaccttgggcctggttgatgatcgttgtgttgtacagccagaaaccggggaccttaacaatccacctaagaaattcagagactgcctctttaagctatgtcccatgaaccgctactctgcccaaaagcagttctggaaagccgctaagcctggggccaacagcaccacagacgcagtgctactcaacaaactgcaccacgctgcagacttggaaaagaagcagaatgagacagaaaacaggaaattgctggggaccgtaatccagtatggcaatgtgatccagctcctgcatttgaaaagtaataaatacctaacagtgaataagaggcttcctgctctgttggagaagaatgccatgagagtcacattggacgaggctggaaatgaagggtcctggttttatattcagccattctacaagctgcgatccattggagacagcgtggtcataggtgacaaggtggttctgaaccccgtcaatgctggtcagcccctacatgctagcagccatcaactggtagataacccaggctgcaatgaggtcaattccgtcaactgcaatacaagctggaaaatagtccttttcatgaaatggagtgataacaaagacgacatattaaaggggggtgacgtggtgaggctgtttcatgctgagcaggagaagtttctcacctgtgacgaacacaggaagaagcagcacgtcttcctgagaaccacgggccggcagtcggccacatctgccaccagttcaaaagccctgtgggaggtggaggtggtccagcatgacccatgtcggggcggagcagggtattggaacagccttttccgtttcaagcatctggccacggggcattacttggcagcagaggtagaccctgactttgaggaagaatgcctggagtttcagccctcagtggaccctgatcaggacgcctctcgaagtaggttgcggaatgcccaagaaaagatggtatactccctggtctctgtgcctgaaggcaatgacatctcctccattttcgagctagatcccaccactctgcgtggaggtgacagccttgtcccaaggaactcttatgttcggctcagacacctatgtactaatacctgggttcacagcacaaatattcctattgacaaggaagaagaaaagcccgtgatgctgaaaattggcacctctcctgtgaaggaggataaggaagcatttgccatagttccggtttctcctgctgaagttcgggacctggactttgccaatgatgccagcaaggtgctgggctccattgctgggaagctagagaagggcaccatcacccagaatgaaaggaggtctgtaaccaagctgctagaagatttggtttacttcgtcactggtggaactaattctggtcaagatgttctcgaagttgtcttctccaagcccaacagagaacggcagaaactgatgagagaacagaatattctcaagcagatcttcaagttgttacaagccccattcacagactgcggtgatggcccaatgcttcggctggaagagctcggggaccagcggcacgctcctttcagacacatctgccggctctgctacagggtgctgagacactcgcagcaagactacaggaagaaccaggagtatatagccaagcagtttggcttcatgcagaagcagattggctatgatgtgttggctgaagacactatcactgccctgctccacaataatcggaaactcctggaaaaacacattaccgcggcagagattgacacatttgtcagcctggtgcgaaagaacagggagcccagattcttagattacctctccgacctctgtgtctccatgaacaaatcaattccagtgacccaggaactgatatgtaaagctgtgctgaaccccaccaacgctgacatcctgattgagaccaagttggttctttctcgttttgaatttgaaggtgtctcttccactggagagaatgctctggaggcaggagaagacgaggaagaggtgtggctgttttggagggacagcaacaaagagattcgcagcaagagtgtgagggaattggctcaggatgctaaagaagggcagaaggaggaccgagacgttctcagctactacagatatcagctgaacctctttgcgaggatgtgtctggaccgccaatacctggccatcaacgaaatctcaggccagctggatgtcgatctcattctccgctgcatgtctgacgagaacctgccctatgacctcagggcgtccttctgccgcctcatgcttcacatgcatgtggaccgagatccccaggaacaagtcacccccgtgaaatatgcccgcctctggtcggagattccctcggagatcgccattgacgactatgatagtagtggagcttccaaagatgaaattaaggagagatttgctcagaccatggagtttgtggaggagtatttaagagatgtggtttgtcagaggttccctttctctgataaagagaagaataagcttacgtttgaggttgtaaatttagctaggaatctcatatactttggtttctacaacttctctgaccttctacgattaactaagatccttctggccatattggactgtgtacatgtgacaacaatcttccccattagcaagatggcgaaaggagaagagaataaaggcagtaacgtgatgagatctattcatggcgtgggagagctgatgacccaggtggtgctccggggaggaggctttttgcccatgactcccatggctgctgcccctgaaggcaatgtgaagcaggcagagcctgagaaggaggacatcatggtcatggacaccaagctgaagatcattgagatactccagtttattttgaatgtgaggttggattataggatctcctgcctcctgtgtatatttaagcgagagtttgatgaaagcaattcccagacttcagaaacatcctccggaaacagcagccaagaagggccaagtaatgtaccaggtgctcttgactttgaacacattgaagaacaagcagaaggcatctttggaggaagtgaggagaacaccccactggacttggatgaccacggcggcagaacctttctccgtgtcctgctccacttgacgatgcatgactacccacccctggtgtcaggggccctgcagctcctcttccggcacttcagccagaggcaggaggtgctccaggccttcaaacaggttcaactgctggttaccagccaagatgtggacaactacaaacagatcaaacaagacttggatcaactgaggtccatcgtggaaaagtcagagctttgggtgtacaaagggcagggccccgatgagactatggatggtgcatctggagaaaatgaacataagaaaacggaggagggaaataacaagccacaaaagcatgaaagcaccagcagctacaactacagagtggtcaaagagattttgattcggcttagcaaactctgtgttcaagagagtgcctcagtgagaaagagcaggaagcagcaacagcgtctgctccggaacatgggcgcgcacgccgtggtgctggagctgctgcagattccctatgagaaggccgaagataccaagatgcaagagataatgaggttggctcatgaatttttgcagaatttctgcgcaggcaaccagcagaatcaagctttgctacataaacacataaacctgtttctcaacccagggatcctggaggcagtaaccatgcagcacatcttcatgaacaatttccagctttgcagtgagatcaacgagagagttgttcagcacttcgttcactgcatagagactcacggtcggaatgtccagtatataaagttcttacagacaattgtcaaggcagaagggaaatttattaaaaaatgccaagacatggttatggccgagctggtcaattcgggagaggatgtcctcgtgttctacaacgacagagcctctttccagactctgatccagatgatgcggtcagaacgggatcggatggatgagaacagccctctcatgtaccacatccacttggtcgagctcctggctgtgtgcacggagggtaagaatgtctacacagagatcaagtgcaactccctgctcccgctggatgacatcgttcgcgtggtgacccacgaggactgcatccctgaggttaaaattgcatacattaacttcctgaatcactgctatgtggatacagaggtggaaatgaaggagatttataccagcaatcacatgtggaaattgtttgagaatttccttgtagacatctgcagggcctgtaacaacactagtgacaggaaacatgcagactcgattttggagaagtatgtcaccgaaatcgtcatgagtattgttactactttcttcagctctcccttctcagaccagagtacgactttgcagactcgccagcctgtctttgtgcaactgctgcaaggcgtgttcagggtttaccactgcaactggttaatgccaagccaaaaagcctccgtggagagctgtattcgggtgctgtctgatgtagccaagagccgggccattgccattcccgtggacctggacagccaagtcaacaacctctttctcaagtcccacagcattgtgcagaaaacagccatgaactggcggctctcagcccgcaatgccgcacgcagggactctgttctggcagcttccagagactaccggaatatcattgagagattgcaggacatcgtctccgcgctggaggaccgtctcaggcccctggtgcaggcagagttatctgtgctcgtggatgttctccacagacccgagctgcttttcccagagaacacagacgccagaaggaaatgtgaaagtggcggtttcatttgcaagttaataaagcatacaaaacagctgctagaagaaaatgaagagaagctctgcattaaggtcctacagaccctgagggaaatgatgaccaaagatagaggctatggagaaaagggtgaggcgctcaggcaagttctggtcaaccgttactatggaaacgtcagaccttcgggacgaagagagagccttaccagctttggcaatggcccactgtcagcaggaggacccggcaagcccgggggaggagggggaggttccggatccagctctatgagcaggggtgagatgagtctggccgaggttcagtgtcaccttgacaaggagggggcttccaatctagttatcgacctcatcatgaacgcatccagtgaccgagtgttccatgaaagcattctcctggccattgcccttctggaaggaggcaacaccaccatccagcactcctttttctgtcgcttgacagaagataagaagtcagagaaattctttaaggtgttttatgaccggatgaaggtggcccagcaagaaatcaaagcaacagtgacagtgaacaccagtgacttgggaaataaaaagaaagacgatgaggtagacagggatgccccatcacggaaaaaagctaaagagcccacaacacagataacagaagaggtccgggatcagctcctggaggcctccgctgccaccaggaaagccttcaccactttcaggagggaggctgatcccgacgaccactaccagcctggagagggcacccaggccactgccgacaaggccaaggacgacctggagatgagcgcggtcatcaccatcatgcagcccatcctccgcttccttcagctcctgtgtgaaaaccacaaccgagacctgcagaacttcctccgttgccaaaataacaagaccaactacaatttggtatgtgagaccctgcagtttctggactgtatttgtggaagcacaactggaggccttggtcttctgggcttgtatataaatgaaaagaatgtagcgcttatcaaccaaaccctggaaagtctgaccgaatactgtcaaggaccttgccatgagaaccagaactgcatagccacccatgaatccaatggcattgacatcatcacagccctgatcctcaatgatatcaatcctttgggaaagaagaggatggaccttgtgttagaactgaagaacaatgcctcgaagttgctcctggccatcatggaaagcaggcacgacagtgaaaacgcagagaggatactttataacatgaggcccaaggaactggtggaagtgatcaagaaagcctacatgcaaggtgaagtggaatttgaggatggagaaaacggtgaggatggggcggcgtcccccaggaacgtggggcacaacatctacatattagcccatcagttggctcggcataacaaagaacttcagagcatgctgaaacctggtggccaagtggacggagatgaagccctggagttttatgccaagcacacggcgcagatagagattgtcagattagaccgaacaatggaacagatagtctttcccgtgcccagcatatgtgaattcctaaccaaggagtcaaaactacgaatttactatactacagagagagacgaacaaggcagcaaaatcaatgatttctttctgcggtctgaagacctcttcaatgaaatgaattggcagaagaaactgagagcccagcccgtgttgtactggtgtgcccgcaacatgtctttctggagcagcatttcgtttaacctggccgtcctgatgaacctgctggtggcgtttttctacccgtttaagggagtccgaggaggaaccctggagccccactggtcgggactcctgtggacagccatgctcatctctctggccatcgtcattgccctccccaagccccatggcatccgggccttaattgcctccacaattctacgactgatattttcagtcgggttacaacccacgttgtttcttctgggcgctttcaatgtatgcaataaaatcatctttctaatgagctttgtgggcaactgtgggacattcacaagaggctaccgagccatggttctggatgttgagttcctctatcatttgttgtatctggtgatctgtgccatggggctctttgtccatgaattcttctacagtctgctgctttttgatttagtgtacagagaagagactttgcttaatgtcattaaaagtgtcactcgcaatggacggtccatcatcctgacagcagttctggctctgatcctcgtttacctgttctcaatagtgggctatcttttcttcaaggatgactttatcttggaagtagataggctgcccaatgaaacagctgttccagaaaccggcgagagtttggcaagcgagttcctgttctccgatgtgtgtagggtggagagtggggagaactgctcctctcctgcacccagagaagagctggtccctgcagaagagacggaacaggataaagagcacacatgtgagacgctgctgatgtgcattgtcactgtgctgagtcacgggctgcggagcgggggtggagtaggagatgtactcaggaagccgtccaaagaggaacccctgtttgctgctagagttatttatgacctcttgttcttcttcatggtcatcatcattgttcttaacctgatttttggggttatcattgacacttttgctgacctgaggagtgagaagcagaagaaggaagagatcttgaagaccacgtgctttatctgtggcttggaaagagacaagtttgacaacaagactgtcacctttgaagagcacatcaaggaagaacacaacatgtggcactatctgtgcttcatcgtcctggtgaaagtaaaggactccaccgaatatactgggcctgagagttacgtggcagaaatgatcaaggaaagaaaccttgactggttccccaggatgagagccatgtcattggtcagcagtgattctgaaggagaacagaatgagctgagaaacctgcaggagaagctggagtccaccatgaaacttgtcacgaacctttctggccagctgtcggaattaaaggatcagatgacagaacaaaggaagcagaaacaaagaattggtcttctaggacatcctcctcacatgaatgtcaacccacaacaaccagcataagcaaatgaaagaaaggaattgtatttaccttttataattattattagtgtgggtatggctaatgagttctgattcacccacgaaggttacatttatgctgaatacatttgtaaatactcagttttatactgtatgtatatgattgctactctaaaggtttggatatatgtattgtaattagaattgttggcatgatgacatttcatttgtgccaaaaatattaaaaatgccttttttggaaggactaacagaaagcacctgatttgcacttgaaccagattatagatttaaaagtatatgacatgtattttgtatttaaaactagaatagccagtatttatgttttttataaaactgtgcaatacgaattatgcaatcacaatacatttgtagctcccgagtgtcctaaagggagtgcacttctttgaagctggtgtgttaatactatgtaataaatggttaactttcaaatgatgctgctgccaaaattatattaatagtgagtttcaggcccctgggcattttgtaccatgtaattatcctctggtgatgctgtttctcgttagtggcagtagtgcctccgtctcctagtgataatgctccaagtctatgaactgttaaatcagcattcattttaagaaaagcaactttagtttcaaagatacttttaagcttctaaattgatcatttaaactatttctttaaataagagagccaaattagaggctcatactttagcttgtgaagaagataatgaattttttaaagggaactttctatgcaatgttcaggataaatgcatactgctggccaatcagtgtcatctcctgggtaaattttgatgtcgcattataaagacatgcataattgatggtttctagattatctagtccaaacaatagagtttattttttcttcatctgaaccaacatgctacagtagctaagaagtattaaaactatatacatccatataaagatgaaatatgaactatctcattagaagtcatagttgaccacagacatgttattcttctgaaagagccacattttggttttatttcttgtcacatgatttcttttcttgatggatgaaaaatatgaaaggaaacttttatatctgttgcctagttttgtacatggatctcattttacaagagaatctctctgcaaaaaaaaaaaaaacagtttaaaaatgcattgaaagcagagttctgaaatgagtaaagtttgtaaatgcatatataaaaatatttaataaatgatgcagaatatacagtgactggttggtggctttcatttggcatttgtgacttaactgctattccatttatgtactttctttaggatcagtttgaagtacagtcggtttgattac

SEQ ID NO: 14346 - DNA, 10098 bp, Homo sapiens
  source 1..10098: mol_type = unassigned DNA
gcagtaaccatgtggatgtgctgctgaagcgtttcctcaagctcgctggggtgggaggagaggaggaggaggaggtggtggtggaggaggaggcagggggtggagagagagaaagcgcacgccgagaggaggtgtgggtgttccgcttccatcctaacggaacgagctccctcttcgcggacatgggattacccagcggctgctaacccctctcctcgccctgctcccccaaaccggcgtggctccccgggcaccaaggagctgactacagaggagcaggatttgcacccctcgctgggcttgctttggcaacagagtgcctgacccaggtcaggattttcaagaaagacatgtctgacaaaatgtctagcttcctacatattggagacatttgttctctgtacgcggagggatcgacaaatggatttattagcaccttgggcctggttgatgatcgttgtgttgtacagccagaaaccggggaccttaacaatccacctaagaaattcagagactgcctctttaagctatgtcccatgaaccgctactctgcccaaaagcagttctggaaagccgctaagcctggggccaacagcaccacagacgcagtgctactcaacaaactgcaccacgctgcagacttggaaaagaagcagaatgagacagaaaacaggaaattgctggggaccgtaatccagtatggcaatgtgatccagctcctgcatttgaaaagtaataaatacctaacagtgaataagaggcttcctgctctgttggagaagaatgccatgagagtcacattggacgaggctggaaatgaagggtcctggttttatattcagccattctacaagctgcgatccattggagacagcgtggtcataggtgacaaggtggttctgaaccccgtcaatgctggtcagcccctacatgctagcagccatcaactggtagataacccaggctgcaatgaggtcaattccgtcaactgcaatacaagctggaaaatagtccttttcatgaaatggagtgataacaaagacgacatattaaaggggggtgacgtggtgaggctgtttcatgctgagcaggagaagtttctcacctgtgacgaacacaggaagaagcagcacgtcttcctgagaaccacgggccggcagtcggccacatctgccaccagttcaaaagccctgtgggaggtggaggtggtccagcatgacccatgtcggggcggagcagggtattggaacagccttttccgtttcaagcatctggccacggggcattacttggcagcagaggtagaccctgactttgaggaagaatgcctggagtttcagccctcagtggaccctgatcaggacgcctctcgaagtaggttgcggaatgcccaagaaaagatggtatactccctggtctctgtgcctgaaggcaatgacatctcctccattttcgagctagatcccaccactctgcgtggaggtgacagccttgtcccaaggaactcttatgttcggctcagacacctatgtactaatacctgggttcacagcacaaatattcctattgacaaggaagaagaaaagcccgtgatgctgaaaattggcacctctcctgtgaaggaggataaggaagcatttgccatagttccggtttctcctgctgaagttcgggacctggactttgccaatgatgccagcaaggtgctgggctccattgctgggaagctagagaagggcaccatcacccagaatgaaaggaggtctgtaaccaagctgctagaagatttggtttacttcgtcactggtggaactaattctggtcaagatgttctcgaagttgtcttctccaagcccaacagagaacggcagaaactgatgagagaacagaatattctcaagcagatcttcaagttgttacaagccccattcacagactgcggtgatggcccaatgcttcggctggaagagctcggggaccagcggcacgctcctttcagacacatctgccggctctgctacagggtgctgagacactcgcagcaagactacaggaagaaccaggagtatatagccaagcagtttggcttcatgcagaagcagattggctatgatgtgttggctgaagacactatcactgccctgctccacaataatcggaaactcctggaaaaacacattaccgcggcagagattgacacatttgtcagcctggtgcgaaagaacagggagcccagattcttagattacctctccgacctctgtgtctccatgaacaaatcaattccagtgacccaggaactgatatgtaaagctgtgctgaaccccaccaacgctgacatcctgattgagaccaagttggttctttctcgttttgaatttgaaggtgtctcttccactggagagaatgctctggaggcaggagaagacgaggaagaggtgtggctgttttggagggacagcaacaaagagattcgcagcaagagtgtgagggaattggctcaggatgctaaagaagggcagaaggaggaccgagacgttctcagctactacagatatcagctgaacctctttgcgaggatgtgtctggaccgccaatacctggccatcaacgaaatctcaggccagctggatgtcgatctcattctccgctgcatgtctgacgagaacctgccctatgacctcagggcgtccttctgccgcctcatgcttcacatgcatgtggaccgagatccccaggaacaagtcacccccgtgaaatatgcccgcctctggtcggagattccctcggagatcgccattgacgactatgatagtagtggagcttccaaagatgaaattaaggagagatttgctcagaccatggagtttgtggaggagtatttaagagatgtggtttgtcagaggttccctttctctgataaagagaagaataagcttacgtttgaggttgtaaatttagctaggaatctcatatactttggtttctacaacttctctgaccttctacgattaactaagatccttctggccatattggactgtgtacatgtgacaacaatcttccccattagcaagatggcgaaaggagaagagaataaaggcagtaacgtgatgagatctattcatggcgtgggagagctgatgacccaggtggtgctccggggaggaggctttttgcccatgactcccatggctgctgcccctgaaggcaatgtgaagcaggcagagcctgagaaggaggacatcatggtcatggacaccaagctgaagatcattgagatactccagtttattttgaatgtgaggttggattataggatctcctgcctcctgtgtatatttaagcgagagtttgatgaaagcaattcccagacttcagaaacatcctccggaaacagcagccaagaagggccaagtaatgtaccaggtgctcttgactttgaacacattgaagaacaagcagaaggcatctttggaggaaggaaagagaacaccccactggacttggatgaccacggcggcagaacctttctccgtgtcctgctccacttgacgatgcatgactacccacccctggtgtcaggggccctgcagctcctcttccggcacttcagccagaggcaggaggtgctccaggccttcaaacaggttcaactgctggttaccagccaagatgtggacaactacaaacagatcaaacaagacttggatcaactgaggtccatcgtggaaaagtcagagctttgggtgtacaaagggcagggccccgatgagactatggatggtgcatctggagaaaatgaacataagaaaacggaggagggaaataacaagccacaaaagcatgaaagcaccagcagctacaactacagagtggtcaaagagattttgattcggcttagcaaactctgtgttcaagagagtgcctcagtgagaaagagcaggaagcagcaacagcgtctgctccggaacatgggcgcgcacgccgtggtgctggagctgctgcagattccctatgagaaggccgaagataccaagatgcaagagataatgaggttggctcatgaatttttgcagaatttctgcgcaggcaaccagcagaatcaagctttgctacataaacacataaacctgtttctcaacccagggatcctggaggcagtaaccatgcagcacatcttcatgaacaatttccagctttgcagtgagatcaacgagagagttgttcagcacttcgttcactgcatagagactcacggtcggaatgtccagtatataaagttcttacagacaattgtcaaggcagaagggaaatttattaaaaaatgccaagacatggttatggccgagctggtcaattcgggagaggatgtcctcgtgttctacaacgacagagcctctttccagactctgatccagatgatgcggtcagaacgggatcggatggatgagaacagccctctcatgtaccacatccacttggtcgagctcctggctgtgtgcacggagggtaagaatgtctacacagagatcaagtgcaactccctgctcccgctggatgacatcgttcgcgtggtgacccacgaggactgcatccctgaggttaaaattgcatacattaacttcctgaatcactgctatgtggatacagaggtggaaatgaaggagatttataccagcaatcacatgtggaaattgtttgagaatttccttgtagacatctgcagggcctgtaacaacactagtgacaggaaacatgcagactcgattttggagaagtatgtcaccgaaatcgtcatgagtattgttactactttcttcagctctcccttctcagaccagagtacgactttgcagactcgccagcctgtctttgtgcaactgctgcaaggcgtgttcagggtttaccactgcaactggttaatgccaagccaaaaagcctccgtggagagctgtattcgggtgctgtctgatgtagccaagagccgggccattgccattcccgtggacctggacagccaagtcaacaacctctttctcaagtcccacagcattgtgcagaaaacagccatgaactggcggctctcagcccgcaatgccgcacgcagggactctgttctggcagcttccagagactaccggaatatcattgagagattgcaggacatcgtctccgcgctggaggaccgtctcaggcccctggtgcaggcagagttatctgtgctcgtggatgttctccacagacccgagctgcttttcccagagaacacagacgccagaaggaaatgtgaaagtggcggtttcatttgcaagttaataaagcatacaaaacagctgctagaagaaaatgaagagaagctctgcattaaggtcctacagaccctgagggaaatgatgaccaaagatagaggctatggagaaaagggtgaggcgctcaggcaagttctggtcaaccgttactatggaaacgtcagaccttcgggacgaagagagagccttaccagctttggcaatggcccactgtcagcaggaggacccggcaagcccgggggaggagggggaggttccggatccagctctatgagcaggggtgagatgagtctggccgaggttcagtgtcaccttgacaaggagggggcttccaatctagttatcgacctcatcatgaacgcatccagtgaccgagtgttccatgaaagcattctcctggccattgcccttctggaaggaggcaacaccaccatccagcactcctttttctgtcgcttgacagaagataagaagtcagagaaattctttaaggtgttttatgaccggatgaaggtggcccagcaagaaatcaaagcaacagtgacagtgaacaccagtgacttgggaaataaaaagaaagacgatgaggtagacagggatgccccatcacggaaaaaagctaaagagcccacaacacagataacagaagaggtccgggatcagctcctggaggcctccgctgccaccaggaaagccttcaccactttcaggagggaggctgatcccgacgaccactaccagcctggagagggcacccaggccactgccgacaaggccaaggacgacctggagatgagcgcggtcatcaccatcatgcagcccatcctccgcttccttcagctcctgtgtgaaaaccacaaccgagacctgcagaacttcctccgttgccaaaataacaagaccaactacaatttggtatgtgagaccctgcagtttctggactgtatttgtggaagcacaactggaggccttggtcttctgggcttgtatataaatgaaaagaatgtagcgcttatcaaccaaaccctggaaagtctgaccgaatactgtcaaggaccttgccatgagaaccagaactgcatagccacccatgaatccaatggcattgacatcatcacagccctgatcctcaatgatatcaatcctttgggaaagaagaggatggaccttgtgttagaactgaagaacaatgcctcgaagttgctcctggccatcatggaaagcaggcacgacagtgaaaacgcagagaggatactttataacatgaggcccaaggaactggtggaagtgatcaagaaagcctacatgcaaggtgaagtggaatttgaggatggagaaaacggtgaggatggggcggcgtcccccaggaacgtggggcacaacatctacatattagcccatcagttggctcggcataacaaagaacttcagagcatgctgaaacctggtggccaagtggacggagatgaagccctggagttttatgccaagcacacggcgcagatagagattgtcagattagaccgaacaatggaacagatagtctttcccgtgcccagcatatgtgaattcctaaccaaggagtcaaaactacgaatttactatactacagagagagacgaacaaggcagcaaaatcaatgatttctttctgcggtctgaagacctcttcaatgaaatgaattggcagaagaaactgagagcccagcccgtgttgtactggtgtgcccgcaacatgtctttctggagcagcatttcgtttaacctggccgtcctgatgaacctgctggtggcgtttttctacccgtttaagggagtccgaggaggaaccctggagccccactggtcgggactcctgtggacagccatgctcatctctctggccatcgtcattgccctccccaagccccatggcatccgggccttaattgcctccacaattctacgactgatattttcagtcgggttacaacccacgttgtttcttctgggcgctttcaatgtatgcaataaaatcatctttctaatgagctttgtgggcaactgtgggacattcacaagaggctaccgagccatggttctggatgttgagttcctctatcatttgttgtatctggtgatctgtgccatggggctctttgtccatgaattcttctacagtctgctgctttttgatttagtgtacagagaagagactttgcttaatgtcattaaaagtgtcactcgcaatggacggtccatcatcctgacagcagttctggctctgatcctcgtttacctgttctcaatagtgggctatcttttcttcaaggatgactttatcttggaagtagataggctgcccaatgaaacagctgttccagaaaccggcgagagtttggcaagcgagttcctgttctccgatgtgtgtagggtggagagtggggagaactgctcctctcctgcacccagagaagagctggtccctgcagaagagacggaacaggataaagagcacacatgtgagacgctgctgatgtgcattgtcactgtgctgagtcacgggctgcggagcgggggtggagtaggagatgtactcaggaagccgtccaaagaggaacccctgtttgctgctagagttatttatgacctcttgttcttcttcatggtcatcatcattgttcttaacctgatttttggggttatcattgacacttttgctgacctgaggagtgagaagcagaagaaggaagagatcttgaagaccacgtgctttatctgtggcttggaaagagacaagtttgacaacaagactgtcacctttgaagagcacatcaaggaagaacacaacatgtggcactatctgtgcttcatcgtcctggtgaaagtaaaggactccaccgaatatactgggcctgagagttacgtggcagaaatgatcaaggaaagaaaccttgactggttccccaggatgagagccatgtcattggtcagcagtgattctgaaggagaacagaatgagctgagaaacctgcaggagaagctggagtccaccatgaaacttgtcacgaacctttctggccagctgtcggaattaaaggatcagatgacagaacaaaggaagcagaaacaaagaattggtcttctaggacatcctcctcacatgaatgtcaacccacaacaaccagcataagcaaatgaaagaaaggaattgtatttaccttttataattattattagtgtgggtatggctaatgagttctgattcacccacgaaggttacatttatgctgaatacatttgtaaatactcagttttatactgtatgtatatgattgctactctaaaggtttggatatatgtattgtaattagaattgttggcatgatgacatttcatttgtgccaaaaatattaaaaatgccttttttggaaggactaacagaaagcacctgatttgcacttgaaccagattatagatttaaaagtatatgacatgtattttgtatttaaaactagaatagccagtatttatgttttttataaaactgtgcaatacgaattatgcaatcacaatacatttgtagctcccgagtgtcctaaagggagtgcacttctttgaagctggtgtgttaatactatgtaataaatggttaactttcaaatgatgctgctgccaaaattatattaatagtgagtttcaggcccctgggcattttgtaccatgtaattatcctctggtgatgctgtttctcgttagtggcagtagtgcctccgtctcctagtgataatgctccaagtctatgaactgttaaatcagcattcattttaagaaaagcaactttagtttcaaagatacttttaagcttctaaattgatcatttaaactatttctttaaataagagagccaaattagaggctcatactttagcttgtgaagaagataatgaattttttaaagggaactttctatgcaatgttcaggataaatgcatactgctggccaatcagtgtcatctcctgggtaaattttgatgtcgcattataaagacatgcataattgatggtttctagattatctagtccaaacaatagagtttattttttcttcatctgaaccaacatgctacagtagctaagaagtattaaaactatatacatccatataaagatgaaatatgaactatctcattagaagtcatagttgaccacagacatgttattcttctgaaagagccacattttggttttatttcttgtcacatgatttcttttcttgatggatgaaaaatatgaaaggaaacttttatatctgttgcctagttttgtacatggatctcattttacaagagaatctctctgcaaaaaaaaaaaaaacagtttaaaaatgcattgaaagcagagttctgaaatgagtaaagtttgtaaatgcatatataaaaatatttaataaatgatgcagaatatacagtgactggttggtggctttcatttggcatttgtgacttaactgctattccatttatgtactttctttaggatcagtttgaagtacagtcggtttgattaccaggttaattcagaaaatgtttacctgattatttaaaaaaacacttgctgttgttatgacagctctgaggagaattattagaacaaacattggggagtatttagtacaacattcattcattcttctggattagtgactgccagccaggctgtcgggagcgccctactaaatctcctgtctcttctgcttttactgggggatctttaatttgctgtgtgccatgtggaagtatcgggaa

SEQ ID NO: 14347 - DNA, 10211 bp, Homo sapiens
  source 1..10211: mol_type = unassigned DNA
gcagtaaccatgtggatgtgctgctgaagcgtttcctcaagctcgctggggtgggaggagaggaggaggaggaggtggtggtggaggaggaggcagggggtggagagagagaaagcgcacgccgagaggaggtgtgggtgttccgcttccatcctaacggaacgagctccctcttcgcggacatgggattacccagcggctgctaacccctctcctcgccctgctcccccaaaccggcgtggctccccgggcaccaaggagctgactacagaggagcaggatttgcacccctcgctgggcttgctttggcaacagagtgcctgacccaggtcaggattttcaagaaagacatgtctgacaaaatgtctagcttcctacatattggagacatttgttctctgtacgcggagggatcgacaaatggatttattagcaccttgggcctggttgatgatcgttgtgttgtacagccagaaaccggggaccttaacaatccacctaagaaattcagagactgcctctttaagctatgtcccatgaaccgctactctgcccaaaagcagttctggaaagccgctaagcctggggccaacagcaccacagacgcagtgctactcaacaaactgcaccacgctgcagacttggaaaagaagcagaatgagacagaaaacaggaaattgctggggaccgtaatccagtatggcaatgtgatccagctcctgcatttgaaaagtaataaatacctaacagtgaataagaggcttcctgctctgttggagaagaatgccatgagagtcacattggacgaggctggaaatgaagggtcctggttttatattcagccattctacaagctgcgatccattggagacagcgtggtcataggtgacaaggtggttctgaaccccgtcaatgctggtcagcccctacatgctagcagccatcaactggtagataacccaggctgcaatgaggtcaattccgtcaactgcaatacaagctggaaaatagtccttttcatgaaatggagtgataacaaagacgacatattaaaggggggtgacgtggtgaggctgtttcatgctgagcaggagaagtttctcacctgtgacgaacacaggaagaagcagcacgtcttcctgagaaccacgggccggcagtcggccacatctgccaccagttcaaaagccctgtgggaggtggaggtggtccagcatgacccatgtcggggcggagcagggtattggaacagccttttccgtttcaagcatctggccacggggcattacttggcagcagaggtagaccctgactttgaggaagaatgcctggagtttcagccctcagtggaccctgatcaggacgcctctcgaagtaggttgcggaatgcccaagaaaagatggtatactccctggtctctgtgcctgaaggcaatgacatctcctccattttcgagctagatcccaccactctgcgtggaggtgacagccttgtcccaaggaactcttatgttcggctcagacacctatgtactaatacctgggttcacagcacaaatattcctattgacaaggaagaagaaaagcccgtgatgctgaaaattggcacctctcctgtgaaggaggataaggaagcatttgccatagttccggtttctcctgctgaagttcgggacctggactttgccaatgatgccagcaaggtgctgggctccattgctgggaagctagagaagggcaccatcacccagaatgaaaggaggtctgtaaccaagctgctagaagatttggtttacttcgtcactggtggaactaattctggtcaagatgttctcgaagttgtcttctccaagcccaacagagaacggcagaaactgatgagagaacagaatattctcaagcagatcttcaagttgttacaagccccattcacagactgcggtgatggcccaatgcttcggctggaagagctcggggaccagcggcacgctcctttcagacacatctgccggctctgctacagggtgctgagacactcgcagcaagactacaggaagaaccaggagtatatagccaagcagtttggcttcatgcagaagcagattggctatgatgtgttggctgaagacactatcactgccctgctccacaataatcggaaactcctggaaaaacacattaccgcggcagagattgacacatttgtcagcctggtgcgaaagaacagggagcccagattcttagattacctctccgacctctgtgtctccatgaacaaatcaattccagtgacccaggaactgatatgtaaagctgtgctgaaccccaccaacgctgacatcctgattgagaccaagttggttctttctcgttttgaatttgaaggtgtctcttccactggagagaatgctctggaggcaggagaagacgaggaagaggtgtggctgttttggagggacagcaacaaagagattcgcagcaagagtgtgagggaattggctcaggatgctaaagaagggcagaaggaggaccgagacgttctcagctactacagatatcagctgaacctctttgcgaggatgtgtctggaccgccaatacctggccatcaacgaaatctcaggccagctggatgtcgatctcattctccgctgcatgtctgacgagaacctgccctatgacctcagggcgtccttctgccgcctcatgcttcacatgcatgtggaccgagatccccaggaacaagtcacccccgtgaaatatgcccgcctctggtcggagattccctcggagatcgccattgacgactatgatagtagtggagcttccaaagatgaaattaaggagagatttgctcagaccatggagtttgtggaggagtatttaagagatgtggtttgtcagaggttccctttctctgataaagagaagaataagcttacgtttgaggttgtaaatttagctaggaatctcatatactttggtttctacaacttctctgaccttctacgattaactaagatccttctggccatattggactgtgtacatgtgacaacaatcttccccattagcaagatggcgaaaggagaagagaataaaggcagtaacgtgatgagatctattcatggcgtgggagagctgatgacccaggtggtgctccggggaggaggctttttgcccatgactcccatggctgctgcccctgaaggcaatgtgaagcaggcagagcctgagaaggaggacatcatggtcatggacaccaagctgaagatcattgagatactccagtttattttgaatgtgaggttggattataggatctcctgcctcctgtgtatatttaagcgagagtttgatgaaagcaattcccagacttcagaaacatcctccggaaacagcagccaagaagggccaagtaatgtaccaggtgctcttgactttgaacacattgaagaacaagcagaaggcatctttggaggaagtgaggagaacaccccactggacttggatgaccacggcggcagaacctttctccgtgtcctgctccacttgacgatgcatgactacccacccctggtgtcaggggccctgcagctcctcttccggcacttcagccagaggcaggaggtgctccaggccttcaaacaggttcaactgctggttaccagccaagatgtggacaactacaaacagatcaaacaagacttggatcaactgaggtccatcgtggaaaagtcagagctttgggtgtacaaagggcagggccccgatgagactatggatggtgcatctggagaaaatgaacataagaaaacggaggagggaaataacaagccacaaaagcatgaaagcaccagcagctacaactacagagtggtcaaagagattttgattcggcttagcaaactctgtgttcaagagagtgcctcagtgagaaagagcaggaagcagcaacagcgtctgctccggaacatgggcgcgcacgccgtggtgctggagctgctgcagattccctatgagaaggccgaagataccaagatgcaagagataatgaggttggctcatgaatttttgcagaatttctgcgcaggcaaccagcagaatcaagctttgctacataaacacataaacctgtttctcaacccagggatcctggaggcagtaaccatgcagcacatcttcatgaacaatttccagctttgcagtgagatcaacgagagagttgttcagcacttcgttcactgcatagagactcacggtcggaatgtccagtatataaagttcttacagacaattgtcaaggcagaagggaaatttattaaaaaatgccaagacatggttatggccgagctggtcaattcgggagaggatgtcctcgtgttctacaacgacagagcctctttccagactctgatccagatgatgcggtcagaacgggatcggatggatgagaacagccctctcatgtaccacatccacttggtcgagctcctggctgtgtgcacggagggtaagaatgtctacacagagatcaagtgcaactccctgctcccgctggatgacatcgttcgcgtggtgacccacgaggactgcatccctgaggttaaaattgcatacattaacttcctgaatcactgctatgtggatacagaggtggaaatgaaggagatttataccagcaatcacatgtggaaattgtttgagaatttccttgtagacatctgcagggcctgtaacaacactagtgacaggaaacatgcagactcgattttggagaagtatgtcaccgaaatcgtcatgagtattgttactactttcttcagctctcccttctcagaccagagtacgactttgcagactcgccagcctgtctttgtgcaactgctgcaaggcgtgttcagggtttaccactgcaactggttaatgccaagccaaaaagcctccgtggagagctgtattcgggtgctgtctgatgtagccaagagccgggccattgccattcccgtggacctggacagccaagtcaacaacctctttctcaagtcccacagcattgtgcagaagccatgaactggcggctctcagcccgcaatgccgcacgcagggactctgttctggcagcttccagagactaccggaatatcattgagagattgcaggacatcgtctccgcgctggaggaccgtctcaggcccctggtgcaggcagagttatctgtgctcgtggatgttctccacagacccgagctgcttttcccagagaacacagacgccagaaggaaatgtgaaagtggcggtttcatttgcaagttaataaagcatacaaaacagctgctagaagaaaatgaagagaagctctgcattaaggtcctacagaccctgagggaaatgatgaccaaagatagaggctatggagaaaagctaatttccattgatgaattggataatgctgagcttcctccagctccggattctgagaacgccactgaggagcttgaaccaagtccacccctgcggcagctggaagaccataaaaggggtgaggcgctcaggcaagttctggtcaaccgttactatggaaacgtcagaccttcgggacgaagagagagccttaccagctttggcaatggcccactgtcagcaggaggacccggcaagcccgggggaggagggggaggttccggatccagctctatgagcaggggtgagatgagtctggccgaggttcagtgtcaccttgacaaggagggggcttccaatctagttatcgacctcatcatgaacgcatccagtgaccgagtgttccatgaaagcattctcctggccattgcccttctggaaggaggcaacaccaccatccagcactcctttttctgtcgcttgacagaagataagaagtcagagaaattctttaaggtgttttatgaccggatgaaggtggcccagcaagaaatcaaagcaacagtgacagtgaacaccagtgacttgggaaataaaaagaaagacgatgaggtagacagggatgccccatcacggaaaaaagctaaagagcccacaacacagataacagaagaggtccgggatcagctcctggaggcctccgctgccaccaggaaagccttcaccactttcaggagggaggctgatcccgacgaccactaccagcctggagagggcacccaggccactgccgacaaggccaaggacgacctggagatgagcgcggtcatcaccatcatgcagcccatcctccgcttccttcagctcctgtgtgaaaaccacaaccgagacctgcagaacttcctccgttgccaaaataacaagaccaactacaatttggtatgtgagaccctgcagtttctggactgtatttgtggaagcacaactggaggccttggtcttctgggcttgtatataaatgaaaagaatgtagcgcttatcaaccaaaccctggaaagtctgaccgaatactgtcaaggaccttgccatgagaaccagaactgcatagccacccatgaatccaatggcattgacatcatcacagccctgatcctcaatgatatcaatcctttgggaaagaagaggatggaccttgtgttagaactgaagaacaatgcctcgaagttgctcctggccatcatggaaagcaggcacgacagtgaaaacgcagagaggatactttataacatgaggcccaaggaactggtggaagtgatcaagaaagcctacatgcaaggtgaagtggaatttgaggatggagaaaacggtgaggatggggcggcgtcccccaggaacgtggggcacaacatctacatattagcccatcagttggctcggcataacaaagaacttcagagcatgctgaaacctggtggccaagtggacggagatgaagccctggagttttatgccaagcacacggcgcagatagagattgtcagattagaccgaacaatggaacagatagtctttcccgtgcccagcatatgtgaattcctaaccaaggagtcaaaactacgaatttactatactacagagagagacgaacaaggcagcaaaatcaatgatttctttctgcggtctgaagacctcttcaatgaaatgaattggcagaagaaactgagagcccagcccgtgttgtactggtgtgcccgcaacatgtctttctggagcagcatttcgtttaacctggccgtcctgatgaacctgctggtggcgtttttctacccgtttaagggagtccgaggaggaaccctggagccccactggtcgggactcctgtggacagccatgctcatctctctggccatcgtcattgccctccccaagccccatggcatccgggccttaattgcctccacaattctacgactgatattttcagtcgggttacaacccacgttgtttcttctgggcgctttcaatgtatgcaataaaatcatctttctaatgagctttgtgggcaactgtgggacattcacaagaggctaccgagccatggttctggatgttgagttcctctatcatttgttgtatctggtgatctgtgccatggggctctttgtccatgaattcttctacagtctgctgctttttgatttagtgtacagagaagagactttgcttaatgtcattaaaagtgtcactcgcaatggacggtccatcatcctgacagcagttctggctctgatcctcgtttacctgttctcaatagtgggctatcttttcttcaaggatgactttatcttggaagtagataggctgcccaatgaaacagctgttccagaaaccggcgagagtttggcaagcgagttcctgttctccgatgtgtgtagggtggagagtggggagaactgctcctctcctgcacccagagaagagctggtccctgcagaagagacggaacaggataaagagcacacatgtgagacgctgctgatgtgcattgtcactgtgctgagtcacgggctgcggagcgggggtggagtaggagatgtactcaggaagccgtccaaagaggaacccctgtttgctgctagagttatttatgacctcttgttcttcttcatggtcatcatcattgttcttaacctgatttttggggttatcattgacacttttgctgacctgaggagtgagaagcagaagaaggaagagatcttgaagaccacgtgctttatctgtggcttggaaagagacaagtttgacaacaagactgtcacctttgaagagcacatcaaggaagaacacaacatgtggcactatctgtgcttcatcgtcctggtgaaagtaaaggactccaccgaatatactgggcctgagagttacgtggcagaaatgatcaaggaaagaaaccttgactggttccccaggatgagagccatgtcattggtcagcagtgattctgaaggagaacagaatgagctgagaaacctgcaggagaagctggagtccaccatgaaacttgtcacgaacctttctggccagctgtcggaattaaaggatcagatgacagaacaaaggaagcagaaacaaagaattggtcttctaggacatcctcctcacatgaatgtcaacccacaacaaccagcataagcaaatgaaagaaaggaattgtatttaccttttataattattattagtgtgggtatggctaatgagttctgattcacccacgaaggttacatttatgctgaatacatttgtaaatactcagttttatactgtatgtatatgattgctactctaaaggtttggatatatgtattgtaattagaattgttggcatgatgacatttcatttgtgccaaaaatattaaaaatgccttttttggaaggactaacagaaagcacctgatttgcacttgaaccagattatagatttaaaagtatatgacatgtattttgtatttaaaactagaatagccagtatttatgttttttataaaactgtgcaatacgaattatgcaatcacaatacatttgtagctcccgagtgtcctaaagggagtgcacttctttgaagctggtgtgttaatactatgtaataaatggttaactttcaaatgatgctgctgccaaaattatattaatagtgagtttcaggcccctgggcattttgtaccatgtaattatcctctggtgatgctgtttctcgttagtggcagtagtgcctccgtctcctagtgataatgctccaagtctatgaactgttaaatcagcattcattttaagaaaagcaactttagtttcaaagatacttttaagcttctaaattgatcatttaaactatttctttaaataagagagccaaattagaggctcatactttagcttgtgaagaagataatgaattttttaaagggaactttctatgcaatgttcaggataaatgcatactgctggccaatcagtgtcatctcctgggtaaattttgatgtcgcattataaagacatgcataattgatggtttctagattatctagtccaaacaatagagtttattttttcttcatctgaaccaacatgctacagtagctaagaagtattaaaactatatacatccatataaagatgaaatatgaactatctcattagaagtcatagttgaccacagacatgttattcttctgaaagagccacattttggttttatttcttgtcacatgatttcttttcttgatggatgaaaaatatgaaaggaaacttttatatctgttgcctagttttgtacatggatctcattttacaagagaatctctctgcaaaaaaaaaaaaaacagtttaaaaatgcattgaaagcagagttctgaaatgagtaaagtttgtaaatgcatatataaaaatatttaataaatgatgcagaatatacagtgactggttggtggctttcatttggcatttgtgacttaactgctattccatttatgtactttctttaggatcagtttgaagtacagtcggtttgattaccaggttaattcagaaaatgtttacctgattatttaaaaaaacacttgctgttgttatgacagctctgaggagaattattagaacaaacattggggagtatttagtacaacattcattcattcttctggattagtgactgccagccaggctgtcgggagcgccctactaaatctcctgtctcttctgcttttactgggggatctttaatttgctgtgtgccatgtggaagtatcgggaa

SEQ ID NO: 14348 - DNA, 9402 bp, Homo sapiens
  source 1..9402: mol_type = unassigned DNA
atgtctgacaaaatgtctagcttcctacatattggagacatttgttctctgtacgcggagggatcgacaaatggatttattagcaccttgggcctggttgatgatcgttgtgttgtacagccagaaaccggggaccttaacaatccacctaagaaattcagagactgcctctttaagctatgtcccatgaaccgctactctgcccaaaagcagttctggaaagccgctaagcctggggccaacagcaccacagacgcagtgctactcaacaaactgcaccacgctgcagacttggaaaagaagcagaatgagacagaaaacaggaaattgctggggaccgtaatccagtatggcaatgtgatccagctcctgcatttgaaaagtaataaatacctaacagtgaataagaggcttcctgctctgttggagaagaatgccatgagagtcacattggacgaggctggaaatgaagggtcctggttttatattcagccattctacaagctgcgatccattggagacagcgtggtcataggtgacaaggtggttctgaaccccgtcaatgctggtcagcccctacatgctagcagccatcaactggtagataacccaggctgcaatgaggtcaattccgtcaactgcaatacaagctggaaaatagtccttttcatgaaatggagtgataacaaagacgacatattaaaggggggtgacgtggtgaggctgtttcatgctgagcaggagaagtttctcacctgtgacgaacacaggaagaagcagcacgtcttcctgagaaccacgggccggcagtcggccacatctgccaccagttcaaaagccctgtgggaggtggaggtggtccagcatgacccatgtcggggcggagcagggtattggaacagccttttccgtttcaagcatctggccacggggcattacttggcagcagaggtggaccctgatcaggacgcctctcgaagtaggttgcggaatgcccaagaaaagatggtatactccctggtctctgtgcctgaaggcaatgacatctcctccattttcgagctagatcccaccactctgcgtggaggtgacagccttgtcccaaggaactcttatgttcggctcagacacctatgtactaatacctgggttcacagcacaaatattcctattgacaaggaagaagaaaagcccgtgatgctgaaaattggcacctctcctgtgaaggaggataaggaagcatttgccatagttccggtttctcctgctgaagttcgggacctggactttgccaatgatgccagcaaggtgctgggctccattgctgggaagctagagaagggcaccatcacccagaatgaaaggaggtctgtaaccaagctgctagaagatttggtttacttcgtcactggtggaactaattctggtcaagatgttctcgaagttgtcttctccaagcccaacagagaacggcagaaactgatgagagaacagaatattctcaagcagatcttcaagttgttacaagccccattcacagactgcggtgatggcccaatgcttcggctggaagagctcggggaccagcggcacgctcctttcagacacatctgccggctctgctacagggtgctgagacactcgcagcaagactacaggaagaaccaggagtatatagccaagcagtttggcttcatgcagaagcagattggctatgatgtgttggctgaagacactatcactgccctgctccacaataatcggaaactcctggaaaaacacattaccgcggcagagattgacacatttgtcagcctggtgcgaaagaacagggagcccagattcttagattacctctccgacctctgtgtctccatgaacaaatcaattccagtgacccaggaactgatatgtaaagctgtgctgaaccccaccaacgctgacatcctgattgagaccaagttggttctttctcgttttgaatttgaaggtgtctcttccactggagagaatgctctggaggcaggagaagacgaggaagaggtgtggctgttttggagggacagcaacaaagagattcgcagcaagagtgtgagggaattggctcaggatgctaaagaagggcagaaggaggaccgagacgttctcagctactacagatatcagctgaacctctttgcgaggatgtgtctggaccgccaatacctggccatcaacgaaatctcaggccagctggatgtcgatctcattctccgctgcatgtctgacgagaacctgccctatgacctcagggcgtccttctgccgcctcatgcttcacatgcatgtggaccgagatccccaggaacaagtcacccccgtgaaatatgcccgcctctggtcggagattccctcggagatcgccattgacgactatgatagtagtggagcttccaaagatgaaattaaggagagatttgctcagaccatggagtttgtggaggagtatttaagagatgtggtttgtcagaggttccctttctctgataaagagaagaataagcttacgtttgaggttgtaaatttagctaggaatctcatatactttggtttctacaacttctctgaccttctacgattaactaagatccttctggccatattggactgtgtacatgtgacaacaatcttccccattagcaagatggcgaaaggagaagagaataaaggtaacaatgatgtggagaagctgaagagcagtaacgtgatgagatctattcatggcgtgggagagctgatgacccaggtggtgctccggggaggaggctttttgcccatgactcccatggctgctgcccctgaaggcaatgtgaagcaggcagagcctgagaaggaggacatcatggtcatggacaccaagctgaagatcattgagatactccagtttattttgaatgtgaggttggattataggatctcctgcctcctgtgtatatttaagcgagagtttgatgaaagcaattcccagacttcagaaacatcctccggaaacagcagccaagaagggccaagtaatgtaccaggtgctcttgactttgaacacattgaagaacaagcagaaggcatctttggaggaagtgaggagaacaccccactggacttggatgaccacggcggcagaacctttctccgtgtcctgctccacttgacgatgcatgactacccacccctggtgtcaggggccctgcagctcctcttccggcacttcagccagaggcaggaggtgctccaggccttcaaacaggttcaactgctggttaccagccaagatgtggacaactacaaacagatcaaacaagacttggatcaactgaggtccatcgtggaaaagtcagagctttgggtgtacaaagggcagggccccgatgagactatggatggtgcatctggagaaaatgaacataagaaaacggaggagggaaataacaagccacaaaagcatgaaagcaccagcagctacaactacagagtggtcaaagagattttgattcggcttagcaaactctgtgttcaagagagtgcctcagtgagaaagagcaggaagcagcaacagcgtctgctccggaacatgggcgcgcacgccgtggtgctggagctgctgcagattccctatgagaaggccgaagataccaagatgcaagagataatgaggttggctcatgaatttttgcagaatttctgcgcaggcaaccagcagaatcaagctttgctacataaacacataaacctgtttctcaacccagggatcctggaggcagtaaccatgcagcacatcttcatgaacaatttccagctttgcagtgagatcaacgagagagttgttcagcacttcgttcactgcatagagactcacggtcggaatgtccagtatataaagttcttacagacaattgtcaaggcagaagggaaatttattaaaaaatgccaagacatggttatggccgagctggtcaattcgggagaggatgtcctcgtgttctacaacgacagagcctctttccagactctgatccagatgatgcggtcagaacgggatcggatggatgagaacagccctctcatgtaccacatccacttggtcgagctcctggctgtgtgcacggagggtaagaatgtctacacagagatcaagtgcaactccctgctcccgctggatgacatcgttcgcgtggtgacccacgaggactgcatccctgaggttaaaattgcatacattaacttcctgaatcactgctatgtggatacagaggtggaaatgaaggagatttataccagcaatcacatgtggaaattgtttgagaatttccttgtagacatctgcagggcctgtaacaacactagtgacaggaaacatgcagactcgattttggagaagtatgtcaccgaaatcgtcatgagtattgttactactttcttcagctctcccttctcagaccagagtacgactttgcagactcgccagcctgtctttgtgcaactgctgcaaggcgtgttcagggtttaccactgcaactggttaatgccaagccaaaaagcctccgtggagagctgtattcgggtgctgtctgatgtagccaagagccgggccattgccattcccgtggacctggacagccaagtcaacaacctctttctcaagtcccacagcattgtgcagaaaacagccatgaactggcggctctcagcccgcaatgccgcacgcagggactctgttctggcagcttccagagactaccggaatatcattgagagattgcaggacatcgtctccgcgctggaggaccgtctcaggcccctggtgcaggcagagttatctgtgctcgtggatgttctccacagacccgagctgcttttcccagagaacacagacgccagaaggaaatgtgaaagtggcggtttcatttgcaagttaataaagcatacaaaacagctgctagaagaaaatgaagagaagctctgcattaaggtcctacagaccctgagggaaatgatgaccaaagatagaggctatggagaaaagctaatttccattgatgaattggataatgctgagcttcctccagctccggattctgagaacgccactgaggagcttgaaccaagtccacccctgcggcagctggaagaccataaaaggggtgaggcgctcaggcaagttctggtcaaccgttactatggaaacgtcagaccttcgggacgaagagagagccttaccagctttggcaatggcccactgtcagcaggaggacccggcaagcccgggggaggagggggaggttccggatccagctctatgagcaggggtgagatgagtctggccgaggttcagtgtcaccttgacaaggagggggcttccaatctagttatcgacctcatcatgaacgcatccagtgaccgagtgttccatgaaagcattctcctggccattgcccttctggaaggaggcaacaccaccatccagcactcctttttctgtcgcttgacagaagataagaagtcagagaaattctttaaggtgttttatgaccggatgaaggtggcccagcaagaaatcaaagcaacagtgacagtgaacaccagtgacttgggaaataaaaagaaagacgatgaggtagacagggatgccccatcacggaaaaaagctaaagagcccacaacacagataacagaagaggtccgggatcagctcctggaggcctccgctgccaccaggaaagccttcaccactttcaggagggaggctgatcccgacgaccactaccagcctggagagggcacccaggccactgccgacaaggccaaggacgacctggagatgagcgcggtcatcaccatcatgcagcccatcctccgcttccttcagctcctgtgtgaaaaccacaaccgagacctgcagaacttcctccgttgccaaaataacaagaccaactacaatttggtatgtgagaccctgcagtttctggactgtatttgtggaagcacaactggaggccttggtcttctgggcttgtatataaatgaaaagaatgtagcgcttatcaaccaaaccctggaaagtctgaccgaatactgtcaaggaccttgccatgagaaccagaactgcatagccacccatgaatccaatggcattgacatcatcacagccctgatcctcaatgatatcaatcctttgggaaagaagaggatggaccttgtgttagaactgaagaacaatgcctcgaagttgctcctggccatcatggaaagcaggcacgacagtgaaaacgcagagaggatactttataacatgaggcccaaggaactggtggaagtgatcaagaaagcctacatgcaaggtgaagtggaatttgaggatggagaaaacggtgaggatggggcggcgtcccccaggaacgtggggcacaacatctacatattagcccatcagttggctcggcataacaaagaacttcagagcatgctgaaacctggtggccaagtggacggagatgaagccctggagttttatgccaagcacacggcgcagatagagattgtcagattagaccgaacaatggaacagatagtctttcccgtgcccagcatatgtgaattcctaaccaaggagtcaaaactacgaatttactatactacagagagagacgaacaaggcagcaaaatcaatgatttctttctgcggtctgaagacctcttcaatgaaatgaattggcagaagaaactgagagcccagcccgtgttgtactggtgtgcccgcaacatgtctttctggagcagcatttcgtttaacctggccgtcctgatgaacctgctggtggcgtttttctacccgtttaagggagtccgaggaggaaccctggagccccactggtcgggactcctgtggacagccatgctcatctctctggccatcgtcattgccctccccaagccccatggcatccgggccttaattgcctccacaattctacgactgatattttcagtcgggttacaacccacgttgtttcttctgggcgctttcaatgtatgcaataaaatcatctttctaatgagctttgtgggcaactgtgggacattcacaagaggctaccgagccatggttctggatgttgagttcctctatcatttgttgtatctggtgatctgtgccatggggctctttgtccatgaattcttctacagtctgctgctttttgatttagtgtacagagaagagactttgcttaatgtcattaaaagtgtcactcgcaatggacggtccatcatcctgacagcagttctggctctgatcctcgtttacctgttctcaatagtgggctatcttttcttcaaggatgactttatcttggaagtagataggctgcccaatgaaacagctgttccagaaaccggcgagagtttggcaagcgagttcctgttctccgatgtgtgtagggtggagagtggggagaactgctcctctcctgcacccagagaagagctggtccctgcagaagagacggaacaggataaagagcacacatgtgagacgctgctgatgtgcattgtcactgtgctgagtcacgggctgcggagcgggggtggagtaggagatgtactcaggaagccgtccaaagaggaacccctgtttgctgctagagttatttatgacctcttgttcttcttcatggtcatcatcattgttcttaacctgatttttggggttatcattgacacttttgctgacctgaggagtgagaagcagaagaaggaagagatcttgaagaccacgtgctttatctgtggcttggaaagagacaagtttgacaacaagactgtcacctttgaagagcacatcaaggaagaacacaacatgtggcactatctgtgcttcatcgtcctggtgaaagtaaaggactccaccgaatatactgggcctgagagttacgtggcagaaatgatcaaggaaagaaaccttgactggttccccaggatgagagccatgtcattggtcagcagtgattctgaaggagaacagaatgagctgagaaacctgcaggagaagctggagtccaccatgaaacttgtcacgaacctttctggccagctgtcggaattaaaggatcagatgacagaacaaaggaagcagaaacaaagaattggtcttctaggacatcctcctcacatgaatgtcaacccacaacaaccagcataagcaaatgaaagaaaggaattgtatttaccttttataattattattagtgtgggtatggctaatgagttctgattcacccacgaaggttacatttatgctgaatacatttgtaaatactcagttttatactgtatgtatatgattgctactctaaaggtttggatatatgtattgtaattagaattgttggcatgatgacatttcatttgtgccaaaaatattaaaaatgccttttttggaaggactaacagaaagcacctgatttgcacttgaaccagattatagatttaaaagtatatgacatgtattttgtatttaaaactagaatagccagtatttatgttttttataaaactgtgcaatacgaattatgcaatcacaatacatttgtagctcccgagtgtcctaaagggagtgcacttctttgaagctggtgtgttaatactatgtaataaatggttaactttcaaatgatgctgctgccaaaattatattaatagtgagtttcaggcccctgggcattttgtaccatgtaattatcctctggtgatgctgtttctcgttagtggcagtagtgcctccgtctcctagtgataatgctccaagtctatgaactgttaaatcagcattcattttaagaaaagcaactttagtttcaaagatacttttaagcttctaaattgatcatttaaactatttctttaaataagagagccaaattagaggctcatactttagcttgtgaagaagataatgaattttttaaagggaactttctatgcaatgttcaggataaatgcatactgctggccaatcagtgtcatctcctgggtaaattttgatgtcgcattataaagacatgcataattgatggtttctagattatctagtccaaacaatagagtttattttttcttcatctgaaccaacatgctacagtagctaagaagtattaaaactatatacatccatataaagatgaaatatgaactatctcattagaagtcatagttgaccacagacatgttattcttctgaaagagccacattttggttttatttcttgtcacatgatttcttttcttgatggatgaaaaatatgaaaggaaacttttatatctgttgcctagttttgtacatggatctcattttacaagagaatctctctgc

SEQ ID NO: 14349 - DNA, 9813 bp, Homo sapiens
  source 1..9813: mol_type = unassigned DNA
agtaaccatgtggatgtgctgctgaagcgtttcctcaagctcgctggggtgggaggagaggaggaggaggaggtggtggtggaggaggaggcagggggtggagagagagaaagcgcacgccgagaggaggtgtgggtgttccgcttccatcctaacggaacgagctccctcttcgcggacatgggattacccagcggctgctaacccctctcctcgccctgctcccccaaaccggcgtggctccccgggcaccaaggagctgactacagaggagcaggatttgcacccctcgctgggcttgctttggcaacagagtgcctgacccaggtcaggattttcaagaaagacatgtctgacaaaatgtctagcttcctacatattggagacatttgttctctgtacgcggagggatcgacaaatggatttattagcaccttgggcctggttgatgatcgttgtgttgtacagccagaaaccggggaccttaacaatccacctaagaaattcagagactgcctctttaagctatgtcccatgaaccgctactctgcccaaaagcagttctggaaagccgctaagcctggggccaacagcaccacagacgcagtgctactcaacaaactgcaccacgctgcagacttggaaaagaagcagaatgagacagaaaacaggaaattgctggggaccgtaatccagtatggcaatgtgatccagctcctgcatttgaaaagtaataaatacctaacagtgaataagaggcttcctgctctgttggagaagaatgccatgagagtcacattggacgaggctggaaatgaagggtcctggttttatattcagccattctacaagctgcgatccattggagacagcgtggtcataggtgacaaggtggttctgaaccccgtcaatgctggtcagcccctacatgctagcagccatcaactggtagataacccaggctgcaatgaggtcaattccgtcaactgcaatacaagctggaaaatagtccttttcatgaaatggagtgataacaaagacgacatattaaaggggggtgacgtggtgaggctgtttcatgctgagcaggagaagtttctcacctgtgacgaacacaggaagaagcagcacgtcttcctgagaaccacgggccggcagtcggccacatctgccaccagttcaaaagccctgtgggaggtggaggtggtccagcatgacccatgtcggggcggagcagggtattggaacagccttttccgtttcaagcatctggccacggggcattacttggcagcagaggtggaccctgatcaggacgcctctcgaagtaggttgcggaatgcccaagaaaagatggtatactccctggtctctgtgcctgaaggcaatgacatctcctccattttcgagctagatcccaccactctgcgtggaggtgacagccttgtcccaaggaactcttatgttcggctcagacacctatgtactaatacctgggttcacagcacaaatattcctattgacaaggaagaagaaaagcccgtgatgctgaaaattggcacctctcctgtgaaggaggataaggaagcatttgccatagttccggtttctcctgctgaagttcgggacctggactttgccaatgatgccagcaaggtgctgggctccattgctgggaagctagagaagggcaccatcacccagaatgaaaggaggtctgtaaccaagctgctagaagatttggtttacttcgtcactggtggaactaattctggtcaagatgttctcgaagttgtcttctccaagcccaacagagaacggcagaaactgatgagagaacagaatattctcaagcagatcttcaagttgttacaagccccattcacagactgcggtgatggcccaatgcttcggctggaagagctcggggaccagcggcacgctcctttcagacacatctgccggctctgctacagggtgctgagacactcgcagcaagactacaggaagaaccaggagtatatagccaagcagtttggcttcatgcagaagcagattggctatgatgtgttggctgaagacactatcactgccctgctccacaataatcggaaactcctggaaaaacacattaccgcggcagagattgacacatttgtcagcctggtgcgaaagaacagggagcccagattcttagattacctctccgacctctgtgtctccatgaacaaatcaattccagtgacccaggaactgatatgtaaagctgtgctgaaccccaccaacgctgacatcctgattgagaccaagttggttctttctcgttttgaatttgaaggtgtctcttccactggagagaatgctctggaggcaggagaagacgaggaagaggtgtggctgttttggagggacagcaacaaagagattcgcagcaagagtgtgagggaattggctcaggatgctaaagaagggcagaaggaggaccgagacgttctcagctactacagatatcagctgaacctctttgcgaggatgtgtctggaccgccaatacctggccatcaacgaaatctcaggccagctggatgtcgatctcattctccgctgcatgtctgacgagaacctgccctatgacctcagggcgtccttctgccgcctcatgcttcacatgcatgtggaccgagatccccaggaacaagtcacccccgtgaaatatgcccgcctctggtcggagattccctcggagatcgccattgacgactatgatagtagtggagcttccaaagatgaaattaaggagagatttgctcagaccatggagtttgtggaggagtatttaagagatgtggtttgtcagaggttccctttctctgataaagagaagaataagcttacgtttgaggttgtaaatttagctaggaatctcatatactttggtttctacaacttctctgaccttctacgattaactaagatccttctggccatattggactgtgtacatgtgacaacaatcttccccattagcaagatggcgaaaggagaagagaataaaggcagtaacgtgatgagatctattcatggcgtgggagagctgatgacccaggtggtgctccggggaggaggctttttgcccatgactcccatggctgctgcccctgaaggcaatgtgaagcaggcagagcctgagaaggaggacatcatggtcatggacaccaagctgaagatcattgagatactccagtttattttgaatgtgaggttggattataggatctcctgcctcctgtgtatatttaagcgagagtttgatgaaagcaattcccagacttcagaaacatcctccggaaacagcagccaagaagggccaagtaatgtaccaggtgctcttgactttgaacacattgaagaacaagcagaaggcatctttggaggaagtgaggagaacaccccactggacttggatgaccacggcggcagaacctttctccgtgtcctgctccacttgacgatgcatgactacccacccctggtgtcaggggccctgcagctcctcttccggcacttcagccagaggcaggaggtgctccaggccttcaaacaggttcaactgctggttaccagccaagatgtggacaactacaaacagatcaaacaagacttggatcaactgaggtccatcgtggaaaagtcagagctttgggtgtacaaagggcagggccccgatgagactatggatggtgcatctggagaaaatgaacataagaaaacggaggagggaaataacaagccacaaaagcatgaaagcaccagcagctacaactacagagtggtcaaagagattttgattcggcttagcaaactctgtgttcaagagagtgcctcagtgagaaagagcaggaagcagcaacagcgtctgctccggaacatgggcgcgcacgccgtggtgctggagctgctgcagattccctatgagaaggccgaagataccaagatgcaagagataatgaggttggctcatgaatttttgcagaatttctgcgcaggcaaccagcagaatcaagctttgctacataaacacataaacctgtttctcaacccagggatcctggaggcagtaaccatgcagcacatcttcatgaacaatttccagctttgcagtgagatcaacgagagagttgttcagcacttcgttcactgcatagagactcacggtcggaatgtccagtatataaagttcttacagacaattgtcaaggcagaagggaaatttattaaaaaatgccaagacatggttatggccgagctggtcaattcgggagaggatgtcctcgtgttctacaacgacagagcctctttccagactctgatccagatgatgcggtcagaacgggatcggatggatgagaacagccctctcatgtaccacatccacttggtcgagctcctggctgtgtgcacggagggtaagaatgtctacacagagatcaagtgcaactccctgctcccgctggatgacatcgttcgcgtggtgacccacgaggactgcatccctgaggttaaaattgcatacattaacttcctgaatcactgctatgtggatacagaggtggaaatgaaggagatttataccagcaatcacatgtggaaattgtttgagaatttccttgtagacatctgcagggcctgtaacaacactagtgacaggaaacatgcagactcgattttggagaagtatgtcaccgaaatcgtcatgagtattgttactactttcttcagctctcccttctcagaccagagtacgactttgcagactcgccagcctgtctttgtgcaactgctgcaaggcgtgttcagggtttaccactgcaactggttaatgccaagccaaaaagcctccgtggagagctgtattcgggtgctgtctgatgtagccaagagccgggccattgccattcccgtggacctggacagccaagtcaacaacctctttctcaagtcccacagcattgtgcagaaaacagccatgaactggcggctctcagcccgcaatgccgcacgcagggactctgttctggcagcttccagagactaccggaatatcattgagagattgcaggacatcgtctccgcgctggaggaccgtctcaggcccctggtgcaggcagagttatctgtgctcgtggatgttctccacagacccgagctgcttttcccagagaacacagacgccagaaggaaatgtgaaagtggcggtttcatttgcaagttaataaagcatacaaaacagctgctagaagaaaatgaagagaagctctgcattaaggtcctacagaccctgagggaaatgatgaccaaagatagaggctatggagaaaagggtgaggcgctcaggcaagttctggtcaaccgttactatggaaacgtcagaccttcgggacgaagagagagccttaccagctttggcaatggcccactgtcagcaggaggacccggcaagcccgggggaggagggggaggttccggatccagctctatgagcaggggtgagatgagtctggccgaggttcagtgtcaccttgacaaggagggggcttccaatctagttatcgacctcatcatgaacgcatccagtgaccgagtgttccatgaaagcattctcctggccattgcccttctggaaggaggcaacaccaccatccagcactcctttttctgtcgcttgacagaagataagaagtcagagaaattctttaaggtgttttatgaccggatgaaggtggcccagcaagaaatcaaagcaacagtgacagtgaacaccagtgacttgggaaataaaaagaaagacgatgaggtagacagggatgccccatcacggaaaaaagctaaagagcccacaacacagataacagaagaggtccgggatcagctcctggaggcctccgctgccaccaggaaagccttcaccactttcaggagggaggctgatcccgacgaccactaccagcctggagagggcacccaggccactgccgacaaggccaaggacgacctggagatgagcgcggtcatcaccatcatgcagcccatcctccgcttccttcagctcctgtgtgaaaaccacaaccgagacctgcagaacttcctccgttgccaaaataacaagaccaactacaatttggtatgtgagaccctgcagtttctggactgtatttgtggaagcacaactggaggccttggtcttctgggcttgtatataaatgaaaagaatgtagcgcttatcaaccaaaccctggaaagtctgaccgaatactgtcaaggaccttgccatgagaaccagaactgcatagccacccatgaatccaatggcattgacatcatcacagccctgatcctcaatgatatcaatcctttgggaaagaagaggatggaccttgtgttagaactgaagaacaatgcctcgaagttgctcctggccatcatggaaagcaggcacgacagtgaaaacgcagagaggatactttataacatgaggcccaaggaactggtggaagtgatcaagaaagcctacatgcaaggtgaagtggaatttgaggatggagaaaacggtgaggatggggcggcgtcccccaggaacgtggggcacaacatctacatattagcccatcagttggctcggcataacaaagaacttcagagcatgctgaaacctggtggccaagtggacggagatgaagccctggagttttatgccaagcacacggcgcagatagagattgtcagattagaccgaacaatggaacagatagtctttcccgtgcccagcatatgtgaattcctaaccaaggagtcaaaactacgaatttactatactacagagagagacgaacaaggcagcaaaatcaatgatttctttctgcggtctgaagacctcttcaatgaaatgaattggcagaagaaactgagagcccagcccgtgttgtactggtgtgcccgcaacatgtctttctggagcagcatttcgtttaacctggccgtcctgatgaacctgctggtggcgtttttctacccgtttaagggagtccgaggaggaaccctggagccccactggtcgggactcctgtggacagccatgctcatctctctggccatcgtcattgccctccccaagccccatggcatccgggccttaattgcctccacaattctacgactgatattttcagtcgggttacaacccacgttgtttcttctgggcgctttcaatgtatgcaataaaatcatctttctaatgagctttgtgggcaactgtgggacattcacaagaggctaccgagccatggttctggatgttgagttcctctatcatttgttgtatctggtgatctgtgccatggggctctttgtccatgaattcttctacagtctgctgctttttgatttagtgtacagagaagagactttgcttaatgtcattaaaagtgtcactcgcaatggacggtccatcatcctgacagcagttctggctctgatcctcgtttacctgttctcaatagtgggctatcttttcttcaaggatgactttatcttggaagtagataggctgcccaatgaaacagctgttccagaaaccggcgagagtttggcaagcgagttcctgttctccgatgtgtgtagggtggagagtggggagaactgctcctctcctgcacccagagaagagctggtccctgcagaagagacggaacaggataaagagcacacatgtgagacgctgctgatgtgcattgtcactgtgctgagtcacgggctgcggagcgggggtggagtaggagatgtactcaggaagccgtccaaagaggaacccctgtttgctgctagagttatttatgacctcttgttcttcttcatggtcatcatcattgttcttaacctgatttttggggttatcattgacacttttgctgacctgaggagtgagaagcagaagaaggaagagatcttgaagaccacgtgctttatctgtggcttggaaagagacaagtttgacaacaagactgtcacctttgaagagcacatcaaggaagaacacaacatgtggcactatctgtgcttcatcgtcctggtgaaagtaaaggactccaccgaatatactgggcctgagagttacgtggcagaaatgatcaaggaaagaaaccttgactggttccccaggatgagagccatgtcattggtcagcagtgattctgaaggagaacagaatgagctgagaaacctgcaggagaagctggagtccaccatgaaacttgtcacgaacctttctggccagctgtcggaattaaaggatcagatgacagaacaaaggaagcagaaacaaagaattggtcttctaggacatcctcctcacatgaatgtcaacccacaacaaccagcataagcaaatgaaagaaaggaattgtatttaccttttataattattattagtgtgggtatggctaatgagttctgattcacccacgaaggttacatttatgctgaatacatttgtaaatactcagttttatactgtatgtatatgattgctactctaaaggtttggatatatgtattgtaattagaattgttggcatgatgacatttcatttgtgccaaaaatattaaaaatgccttttttggaaggactaacagaaagcacctgatttgcacttgaaccagattatagatttaaaagtatatgacatgtattttgtatttaaaactagaatagccagtatttatgttttttataaaactgtgcaatacgaattatgcaatcacaatacatttgtagctcccgagtgtcctaaagggagtgcacttctttgaagctggtgtgttaatactatgtaataaatggttaactttcaaatgatgctgctgccaaaattatattaatagtgagtttcaggcccctgggcattttgtaccatgtaattatcctctggtgatgctgtttctcgttagtggcagtagtgcctccgtctcctagtgataatgctccaagtctatgaactgttaaatcagcattcattttaagaaaagcaactttagtttcaaagatacttttaagcttctaaattgatcatttaaactatttctttaaataagagagccaaattagaggctcatactttagcttgtgaagaagataatgaattttttaaagggaactttctatgcaatgttcaggataaatgcatactgctggccaatcagtgtcatctcctgggtaaattttgatgtcgcattataaagacatgcataattgatggtttctagattatctagtccaaacaatagagtttattttttcttcatctgaaccaacatgctacagtagctaagaagtattaaaactatatacatccatataaagatgaaatatgaactatctcattagaagtcatagttgaccacagacatgttattcttctgaaagagccacattttggttttatttcttgtcacatgatttcttttcttgatggatgaaaaatatgaaaggaaacttttatatctgttgcctagttttgtacatggatctcattttacaagagaatctctctgcaaaaaaaaaaaaaacagtttaaaaatgcattgaaagcagagttctgaaatgagtaaagtttgtaaatgcatatataaaaatatttaataaatgatgcagaatatacagtgactggttggtggctttcatttggcatttgtgacttaactgctattccatttatgtactttctttaggatcagtttgaagtacagtcggtttgattac

SEQ ID NO: 14350 - DNA, 2799 bp, Homo sapiens
  source 1..2799: mol_type = unassigned DNA
ctaacccctctcctcgccctgctcccccaaaccggcgtggctccccgggcaccaaggagctgactacagaggagcaggatttgcacccctcgctgggcttgctttggcaacagagtgcctgacccaggtcaggattttcaagaaagacatgtctgacaaaatgtctagcttcctacatattggagacatttgttctctgtacgcggagggatcgacaaatggatttattagcaccttgggcctggttgatgatcgttgtgttgtacagccagaaaccggggaccttaacaatccacctaagaaattcagagactgcctctttaagctatgtcccatgaaccgctactctgcccaaaagcagttctggaaagccgctaagcctggggccaacagcaccacagacgcagtgctactcaacaaactgcaccacgctgcagacttggaaaagaagcagaatgagacagaaaacaggaaattgctggggaccgtaatccagtatggcaatgtgatccagctcctgcatttgaaaagtaataaatacctaacagtgaataagaggcttcctgctctgttggagaagaatgccatgagagtcacattggacgaggctggaaatgaagggtcctggttttatattcagccattctacaagctgcgatccattggagacagcgtggtcataggtgacaaggtggttctgaaccccgtcaatgctggtcagcccctacatgctagcagccatcaactggtagataacccaggctgcaatgaggtcaattccgtcaactgcaatacaagctggaaaatagtccttttcatgaaatggagtgataacaaagacgacatattaaaggggggtgacgtggtgaggctgtttcatgctgagcaggagaagtttctcacctgtgacgaacacaggaagaagcagcacgtcttcctgagaaccacgggccggcagtcggccacatctgccaccagttcaaaagccctgtgggaggtggaggtggtccagcatgacccatgtcggggcggagcagggtattggaacagccttttccgtttcaagcatctggccacggggcattacttggcagcagaggtagaccctgactttgaggaagaatgcctggagtttcagccctcagtatgcaataaaatcatctttctaatgagctttgtgggcaactgtgggacattcacaagaggctaccgagccatggttctggatgttgagttcctctatcatttgttgtatctggtgatctgtgccatggggctctttgtccatgaattcttctacagtctgctgctttttgatttagtgtacagagaagagactttgcttaatgtcattaaaagtgtcactcgcaatggacggtccatcatcctgacagcagttctggctctgatcctcgtttacctgttctcaatagtgggctatcttttcttcaaggatgactttatcttggaagtagataggctgcccaatgaaacagctgttccagaaaccggcgagagtttggcaagcgagttcctgttctccgatgtgtgtagggtggagagtggggagaactgctcctctcctgcacccagagaagagctggtccctgcagaagagacggaacaggataaagagcacacatgtgagacgctgctgatgtgcattgtcactgtgctgagtcacgggctgcggagcgggggtggagtaggagatgtactcaggaagccgtccaaagaggaacccctgtttgctgctagagttatttatgacctcttgttcttcttcatggtcatcatcattgttcttaacctgatttttggggttatcattgacacttttgctgacctgaggagtgagaagcagaagaaggaagagatcttgaagaccacgtgctttatctgtggcttggaaagagacaagtttgacaacaagactgtcacctttgaagagcacatcaaggaagaacacaacatgtggcactatctgtgcttcatcgtcctggtgaaagtaaaggactccaccgaatatactgggcctgagagttacgtggcagaaatgatcaaggaaagaaaccttgactggttccccaggatgagagccatgtcattggtcagcagtgattctgaaggagaacagaatgagctgagaaacctgcaggagaagctggagtccaccatgaaacttgtcacgaacctttctggccagctgtcggaattaaaggatcagatgacagaacaaaggaagcagaaacaaagaattggtcttctaggacatcctcctcacatgaatgtcaacccacaacaaccagcataagcaaatgaaagaaaggaattgtatttaccttttataattattattagtgtgggtatggctaatgagttctgattcacccacgaaggttacatttatgctgaatacatttgtaaatactcagttttatactgtatgtatatgattgctactctaaaggtttggatatatgtattgtaattagaattgttggcatgatgacatttcatttgtgccaaaaatattaaaaatgccttttttggaaggactaacagaaagcacctgatttgcacttgaaccagattatagatttaaaagtatatgacatgtattttgtatttaaaactagaatagccagtatttatgttttttataaaactgtgcaatacgaattatgcaatcacaatacatttgtagctcccgagtgtcctaaagggagtgcacttctttgaagctggtgtgttaatactatgtaataaatggttaactttcaaatgatgctgctgcca

SEQ ID NO: 14351 - DNA, 581 bp, Homo sapiens
  source 1..581: mol_type = unassigned DNA
atgactgagaaaatgtccagcttcctctacataggggacatcgtgtccctgtacgcggagggctcggtcaacggcttcatcagcaccttggggttagtggatgacagatgtgtggtgcacccagaggccggggaccttgccaaccctcccaagaagttcagagactgccttttcaaggtgtgccctatgaacagatattctgcccagaagcaatattggaaagcaaagcaagccaaacaagggaaccacaccgaggcagccttgctgaagaaactacagcacgctgcagaactggaacaaaaacaaaatgaatcggagaataagaaactgttgggagaaattgtaaaatacagtaatgttatacaactactgcatataaaaagcaacaaatatcttactgtcaacaagagattacctgctttactggagaagaatgccatgcgtgtgtccttggatgctgcaggaaatgaagggtcttggttttatattcatccgttctggaaactgagaagcgagggtgacaatgatgcaagcttctggatttaatttggttaataaattatctggtgatatcttccttt

SEQ ID NO: 14352 - DNA, 10511 bp, Homo sapiens
  source 1..10511: mol_type = unassigned DNA
cttccagctcccgccgggcggctgtgacggccgcagcgggtcgcagagcagggagtggacacggagtggggagcggagagggaaggaggaggaggaggagcaaaggtgttggagagaaaacttcagaaaggaacaggaaacctgccggggaggcggcggcggctgcggcttctctgggcgcctgggctgcgctcttcgcggggtgtccgcagctgcggcttggccccggtctggcttccccggcgcgcacgcacggctgagccgcgacgctcagtggctcgggccgtgccctccgccgcggctcttggccgctgtagtcccgcgatccgatccgcttctgccgcggcggctccctggagagagggcggcgagggcgcagggaagaagagggacgtccactgtggaacatgaagcagcatgactgagaaaatgtccagcttcctctacataggggacatcgtgtccctgtacgcggagggctcggtcaacggcttcatcagcaccttggggttagtggatgacagatgtgtggtgcacccagaggccggggaccttgccaaccctcccaagaagttcagagactgccttttcaaggtgtgccctatgaacagatattctgcccagaagcaatattggaaagcaaagcaagccaaacaagggaaccacaccgaggcagccttgctgaagaaactacagcacgctgcagaactggaacaaaaacaaaatgaatcggagaataagaaactgttgggagaaattgtaaaatacagtaatgttatacaactactgcatataaaaagcaacaaatatcttactgtcaacaagagattacctgctttactggagaagaatgccatgcgtgtgtccttggatgctgcaggaaatgaagggtcttggttttatattcatccgttctggaaactgagaagcgagggtgacaatattgttgtaggagataaagttgttttgatgcctgtgaatgcagggcagccactacatgccagcaacatagagcttcttgataacccagggtgtaaagaggtgaatgctgtcaattgcaacaccagctggaaaatcactttattcatgaaatatagttcctatcgagaggatgtattaaaaggaggggacgttgttagattatttcatgcggaacaagagaagtttttgacttgtgatgaatatgagaaaaaacagcacattttccttcgtacgaccttgcgccaatcagctacttctgctactagttctaaagcactctgggaaatagaggtggttcatcatgacccatgccgtgggggtgcaggacagtggaacagcttgttcagatttaagcatcttgcaactggaaactatttagctgcagagcttaatcctgattatcgagatgcccaaaatgaaggaaaaaatgtgagagatggagtccctccaacttcaaagaaaaaacgccaggcaggggagaagatcatgtatactttggtttcagtcccgcatggcaatgacattgcatccctttttgaactagatgccacaactcttcagagagctgactgcctggttccaaggaactcatatgttcggttaaggcatttatgcaccaacacatgggtaaccagtactagtatccccatagacacagatgaagagaggcctgttatgttaaagattggaacctgccaaaccaaagaagataaagaagcgttcgcaatcgtgtctgttccactgtctgaagttcgagacttagactttgccaatgatgccaataaagtactagcgaccacagttaaaaagctagaaaacggcacaataactcagaatgaaaggaggtttgtaaccaaattattggaagatctcatattctttgttgctgatgtgcctaataatggacaagaagttctggatgtggttatcactaagccaaaccgagagcgtcaaaaattgatgagggaacaaaacatactggcacaggtatttggaattcttaaagcaccctttaaagagaaagcaggagaaggctcgatgctgagacttgaagatctgggggatcaaagatatgcaccctacaagtacatgctgcggctctgttaccgcgtcctgagacactcgcagcaggattaccggaaaaatcaggaatatattgctaagaatttctgtgtcatgcagtcccagattggctatgatattttggcagaagatactatcacagctttgttgcacaacaacagaaaactactagagaaacatatcacagcaaaagaaatagaaacatttgtcagtttactcaggagaaatcgggagccaaggtttttggattatttgtcagatctgtgtgtgtctaataccactgctatccctgtaactcaagaactcatctgtaaatttatgttgagtccaggcaatgcagacattctcattcaaactaaggtggtctcaatgcaagcagacaaccccatggagagctccatcctttcagatgacattgatgatgaagaagtttggctctattggattgacagcaacaaggaacctcatggcaaagctatcaggcaccttgctcaagaggcaaaagaaggcaccaaagctgacttagaagttcttacctattacaggtaccagctaaacctctttgcaaggatgtgcttggatcgccagtatctggccataaaccagatttctacacagctgtctgtagacctgatcctgcggtgtgtgtcggatgagagcctgccgttcgacctccgagcgtccttctgtcgcctcatgctccacatgcacgttgaccgggatccccaggagtccgtggtgcctgttcgctatgccaggctctggacagaaatccccacaaagatcacaattcatgaatatgattctataacagactcttccagaaatgatatgaagaggaaatttgccctgacaatggaatttgttgaagaatatttgaaagaagttgtaaaccagccctttccttttggggataaagaaaaaaataaactgacatttgaggtggtccacttggctcggaatcttatatactttggattttatagtttcagtgagttattaaggctaacaagaacacttctggctattttagacattgtacaggcccccatgtcatcatactttgaaagattaagcaaatttcaagatggaggaaacaatgtgatgagaaccattcatggggtgggagagatgatgacccagatggtactcagtagaggctccatcttccccatgagcgtgccggatgtgccacccagcatccacccgagcaagcaagggagccccaccgagcacgaggatgtgactgtgatggacaccaagctgaagatcattgagattttgcagtttatcctgagtgtcagactggattataggatctcatatatgctgtcaatatataagaaggagtttggagaggacaatgacaatgcggagacatctgccagtggatctccagacactttactaccatcagctattgttcctgatatagatgaaattgcagctcaggcagaaactatgtttgcgggaagaaaagaaaaaaatccagttcaacttgacgatgaaggaggcaggacgtttttacgggtcctcattcatctgatcatgcacgactacccgcctttgctgtctggagccctgcagctgttgtttaagcacttcagccagagggcagaggttttacaggcatttaagcaggtgcaattactggtgtctaatcaagacgtagataactacaagcaaatcaaggcagatctagaccagcttcgactgacagtagaaaagtctgagctatgggtggagaagagcagcaactatgagaatggagaaataggggaaagtcaagtgaaaggtggtgaagagccaattgaggaatcaaacattttaagtccagtgcaggatggaacaaagaaacctcagattgacagcaacaagagcaataactaccggattgtaaaggagattttgatcaggctaagtaaactctgtgtgcagaataaaaagtgtcggaatcaacatcaacgattactgaaaaatatgggggcgcattcggtggtgttggatcttctgcagataccctatgaaaagaatgatgaaaagatgaatgaagtaatgaatctagcccatacatttctgcagaatttctgtcgaggaaatccacagaatcaagttcttcttcataaacatctgaatttgtttttaactccaggtctccttgaagcagaaaccatgcggcacatcttcatgaacaattaccatctgtgcaacgaaattagcgagagagttgtacaacactttgtgcactgcattgagacacatggccgccacgtggagtacctgaggtttttgcaaacaattgtaaaagcagatggtaaatatgtgaagaaatgccaggatatggtaatgacagagttgataaatgggggtgaagacgtgctgatattttacaatgatagagcatcatttccaatccttctccatatgatgtgttcagagagagaccgaggggatgagagtggccccttagcctaccacatcaccctggtggagttgctggcagcatgcacagaggggaaaaatgtctacactgaaatcaagtgtaattcccttctcccgctggacgacatagtgagggtggtgacccatgacgactgcatccctgaggttaaaattgcttatgtgaactttgttaatcactgttatgttgacactgaagtggaaatgaaagaaatctatacaagtaaccacatttggaaattatttgagaacttcttggtggatatggcaagggtttgcaacacaactacagacaggaaacatgcagacatctttttggaaaagtgtgttactgagtcaataatgaatattgtgagcggcttctttaattctcccttttcagacaatagtaccagcctccagacacatcagccagtttttattcagctactgcaatctgccttcagaatttacaattgcacctggccaaacccagcgcagaaagcctcagtggaatcctgtatcagaactttggctgaagtggcaaaaaatcgtggaattgccattccagtggatttggacagccaagttaatactcttttcatgaagagccattcaaatatggtgcagagagcagcaatgggttggagactatcagctcgctctgggccacgctttaaggaagctcttggagggcctgcttgggattacagaaatattattgaaaagttacaggatgtagtggcctccttggagcaccagttcagcccaatgatgcaggctgaattctcagtgttggttgatgtattgtacagtccagaactgctgttccctgagggaagcgatgcaagaataagatgtggcgctttcatgtcgaagttgattaatcatacaaagaaactaatggagaaagaagaaaaactgtgcattaaaattcttcagacattacgagaaatgttagagaagaaagacagctttgtggaagagggtaacacattaagaaagatacttctgaatcgatactttaaaggtgattatagtattggtgtgaatggacacctatcaggagcctactccaaaactgcacaggtgggaggaagcttttctggacaagattcagataagatggggatatcaatgtcagacattcagtgtctgctggataaagaaggtgcatcagaacttgtcatcgatgttatagtgaacaccaaaaatgacagaattttttcagaaggcattttcctcggcattgccttgcttgaaggaggaaatacacaaacacagtattctttctaccagcagttgcatgaacaaaaaaagtcagaaaaattctttaaagttctctatgatcgaatgaaggctgctcagaaagaaataagatcaacagtgacagttaataccatagatttaggtaacaaaaaaagggacgatgacaatgaattgatgacatctggtccacgaatgagagtaagagattcaacactacatttaaaagagggaatgaaagggcaattaacagaagcttcttcagcaacatccaaagcatattgtgtatacagaagagaaatggatccagaaatagacattatgtgcacaggaccagaagcgggaaacactgaggaaaaatccgcagaggaagtaacaatgagtcccgcaattgccatcatgcagccaatactgagatttcttcagttactgtgtgagaatcacaaccgggaattgcagaacttcttgaggaatcaaaacaacaaaacaaattacaacctagtctgtgagacccttcagtttctggactgcatttgtggaagtacaaccggtggcctgggcctgttgggtctctacatcaatgagaagaatgtagcgctggtcaaccagaacctggagagcttgactgagtattgccagggcccttgccatgaaaatcagacctgtatcgctacacatgagtctaatgggattgatatcatcattgctttgattctgaatgacataaaccctcttggtaaataccgaatggacctggtgctccagctaaagaacaatgcatctaaacttttgctggccattatggaaagcagacatgacagtgagaatgcagaaagaattctttttaacatgagacccagagaactggtggatgtgatgaagaatgcctataaccaaggattggaatgtgaccatggggatgatgagggtggagatgatggtgtttctccaaaagatgttggacacaatatctatattctggcccatcagttggcccgccacaataaactgttgcagcagatgctcaaaccaggatcggatccagatgaaggagatgaagccttaaagtattatgccaaccacactgcacagattgagattgtccggcatgataggaccatggaacaaatagtttttcctgtccccaatatatgtgaatacctcactcgagaatccaagtgccgtgtgttcaatacaactgaaagggatgaacaaggaagtaaagtgaatgactttttccagcaaacagaagatctctacaatgaaatgaagtggcagaagaaaatcaggaataaccctgcactgttctggttctcgaggcacatctctctctgggggagcatttccttcaacctggctgtgttcatcaatttagctgttgctctcttctacccatttggggatgatggagatgaaggtacactttctccattgttctcggttcttctttggatagcagttgcgatctgcacatctatgctgtttttcttctccaagcctgtgggtattcggccgtttcttgtatcaataatgctcagatcaatatatacaataggtcttgggcctacattaatacttcttggtgcagctaatctttgtaataaaattgtttttctggtgagttttgttggaaatcgtggcacgttcacccgtgggtaccgagcagtcatcctggatatggcctttctctatcacgtggcgtatgtcctggtttgcatgctgggcctttttgtccatgaattcttctatagcttcctgctttttgatttggtgtacagggaagagactttgctgaatgtcataaaaagtgtcacacgaaatggccgctctattattctaactgcagtcctggctctcatcctcgtctacctgttttccattattgggttcctttttttgaaggatgacttcactatggaagttgataggctgaaaaaccgaactcctgttacaggcagtcatcaagtgcctactatgactttaactaccatgatggaagcatgtgccaaggagaactgttcacccacaattccagcttcaaatacagctgatgaagagtatgaagatggaattgaaaggacgtgtgacactctccttatgtgcattgtcaccgtgctgaaccagggcctcaggaatggcggtggtgtgggggatgtgctaagaaggccatcgaaagatgagcccttgtttgctgcccgagtggtttatgaccttcttttttatttcattgttatcattattgttctgaacttgatttttggtgttatcatcgatacttttgctgatctcagaagcgaaaaacagaaaaaagaagaaattctaaagacaacttgtttcatctgtggacttgagagagacaagtttgataataaaacggtttcatttgaggagcacattaagtcagaacacaatatgtggcattatttgtacttcatagtcctggtgaaagttaaagacccaacagaatacactggacctgaaagttatgtggctcaaatgattgtggagaagaatttggattggtttcctcggatgcgagccatgtccctcgttagcaatgaaggcgacagtgagcaaaatgaaattcggagccttcaggagaagttggaatcgaccatgagtctggtcaaacagctgtcgggtcagctggcggagctcaaggagcagatgacagaacaaaggaagaataagcagagactgggcttcctcggatcaaacacaccccatgtgaatcatcacatgccaccacactgataccatggggggaagccgtgactagcctttcatcagtgtcctgcctgatcactgaataaagaactgagatggaggggagtgaacagtgcctattgttgaaaagttaaaaacaaccaagtgccaagatgttgagtgggttagctccgagaacaatttataactgtgttttcatggttgcgaagacctaacctcaaatgcatctgctagaaagcgtacatcacacattcgcaatgcatcaggaagaaaaggcttgcccaaaaggctggagagggcagggagcggcaggatggaaggagacacggggcagggagaactctcttctgctaaatcgataggagtcagttttgtcttaaatgctgactacagccactgacatggttggctggaatttctttcttttaattgtggcatataggtttgtgacacaagaagtcatactttggtggctaagttttactaaggaaaataactgaaaagattaaaagtgagagctgaaaagagaaatgataatgcttccaaactgtagctgtcacagggcaatttctttatttataacatgaagcacaatggatttacagctctaggaacttagtactttggagcttttgcctctcacactgacaacataacaggatgtgattgccttctctgggattcagacaggctctgtcaatgtggagcacaaaaggagattttcatataacttgttaaaaacatgttctaagtcatgtataggctaagattttaagaagatctgggggaataaaaagccaacagtaagccccaggaaagggttttttgagaccatatgtatgctattaaaatatattgagattaatacatgaaaatgcttaaaagtgataggaattattgagaaacttatgatggtggcattgccttttataaacatggagtgaaagccatttgactcaacgtttgctgtgcttaaagaattgcttcaggacccgagcgtttttatgtatgctgttcctgcagttaggaaaaaaaaatccaagaaatgtattgaatactcaagaaaatgccacatttcaattacatatttaaaactgtatctgtaagggcttttcaaaatgtagcaagataaaaatctcttattcaaattgtttttgtattaaatcatgcactcagaatttgtcgagggagagaataacctggtgtgttcaggttattcttagagactacacatttggaatagcagagcaaaatatggataatgaaagtgttgggaaaaaagtgatgtgacagggagtgaagacacttgataccagactctgggagatactctgcaagttgacctggcctctcccccacaggaacaaaacactgcctccagagtctttaaattctcagttatcaacgccaaggtttaaggtctagatagggtttgctatagggtttgctctgacaatttttaaagcttttggattgttctaacatagcttaagctattggttcctaaaaatcccaaatcaagatctatgtagaatataaaggaagcctgaaccaatccttccacatactgttaagatgtagacttggaacaaagctgttgggacccagagcaatgaatttttgaactgaagctactggtactccccagcaccacctcatactaagaattcctcactctgacatgacagtattttttctgaccaggagctgaaagaccctgacattcatgatccaaagatataagaaattttgatatgtctgcatgcagcacagaactttgaacctaggaggcagtcaataaatacatgagaaattcagctgtcattcagttactcttaattctttataaaactttaaatgataccacatatttgtttgtttaaaatggctttcccaaaatcaaagtagactaaagcagccatctttaaaatccaggatcatcaatgctattaacagtatcaggtaaaaagtacactttaaaatattttaatcaggcagagttttatggatagaga

SEQ ID NO: 14353 - DNA, 9668 bp, Homo sapiens
  source 1..9668: mol_type = unassigned DNA
atttcccctccaagcctgagcactttctattgtgcaatgaaaaggcttttcacgttgagaaaaatgaatcccgaatttgctctgcaaagggatgagcgcgcctctgggcgccagcctgctctcagctgggcgcggagaccgcgcggtggccgcagggcggccgcggccagggcgctccagggcgcgccctccgcgagcggctccggggtgacgcccgccggagagctggactcccccttccgcgggcgcctgcactggctcttagccagccgagggcccgggtgcagatagtccgggaaccccgagggcggagagctccccactacgcctgggcctcccagggatggcagctccgagagccccctagacccggtgccttgcaggacgcctctggagatcaggagggctggcggcgcattcggcgtccgggaggccgggccccggacgcgcgaggagcgcggggcgcgggaaggcaggcgggtgcacatgggtgccggcgggcgagctgcggggggagggggggcggggtgtggcctccccgcctcccgggcgggatttgcatgtgtgtggtggccccagacttcctgctccttctacgctgcaggtacgcgcgggccgggcggggcgggcgggcggcgggcgcgccaagacgtgggcacctcctcacccggaccccgggccccgccgagccgcctcctggctcccgtggccgccagcccgccccggccgcaccgagcgtcgggatccgaggtgggagcgtacccctccccgctccccggacgcctcagtcctccgcactgagcttggccacgcgcccctaggcgccccccacgccctgggccccggagggccgcagccatgagtgaaatgtccagctttcttcacatcggggacatcgtctccctgtacgccgagggctccgtcaatggcttcatcagcactttggggctggtggatgaccgctgtgtggtggagcccgcggccggggacctggacaacccccctaagaagttccgtgactgcctcttcaaggtgtgccccatgaaccgctactcggcccagaagcagtactggaaggccaagcagactaagcaggacaaggagaagatcgctgatgtggtgttgctgcagaagctgcagcatgcggcgcagatggagcagaagcaaaatgacacggagaacaagaaggtgcatggggatgtcgtgaagtatggcagtgtgatccagctcctgcacatgaagagcaacaagtacctgacagtgaacaagcggcttccggccttgctggagaagaacgccatgcgggtgactctggatgccacaggcaacgagggttcctggctcttcatccagcccttctggaagctgcggagcaacggggacaacgtggtcgtgggggacaaggtgatcctgaatcctgtcaatgccgggcagcctctgcatgccagcaattacgagctcagcgacaacgccggctgcaaggaggtcaattctgtgaactgcaacaccagctggaagatcaacctgtttatgcagtttcgggaccacctggaggaggtgttgaaagggggagacgtggtgcggctgttccatgcggagcaggagaagttcctgacgtgtgacgagtacaagggcaagctgcaggtgttcctgcgaactacactgcgccagtctgccacctcggccaccagctccaatgctctctgggaggtggaggtggtccaccacgacccctgccgtggaggagctgggcactggaatggcttgtaccgcttcaagcacctggctacaggcaactacctggctgctgaggagaaccccagttacaaaggtgatgcctcagatcccaaggcagcaggaatgggggcacagggccgcacaggccgcaggaatgctggggagaagatcaagtactgcctggtggctgtgcctcatggcaatgacatcgcctctctctttgagctggaccccaccaccttgcagaaaaccgactctttcgtgccccggaactcgtacgtccggctgcggcacctctgcaccaacacgtggattcagagcaccaatgtgcccattgacatcgaggaggagcggcccatccggctcatgctgggcacctgccccaccaaggaggacaaggaggcctttgccatcgtgtcagtgcccgtgtctgagatccgagacctggactttgccaatgacgccagctccatgctggccagtgccgtggagaaactcaacgagggcttcatcagccagaatgaccgcaggtttgtcatccagctgctggaagacctggtgttctttgtcagcgatgtccccaacaatgggcagaatgtcctggacatcatggtcactaagcccaaccgggaacggcagaagctgatgagggagcagaacatcctcaaacaggtctttggcattctgaaggccccgttccgtgagaaggggggtgaaggtcccctggtgcggctggaggagctgtcagaccagaagaacgccccctaccagcacatgttccgcctgtgctaccgcgtgttgcggcattcccaggaggactaccgcaagaaccaggagcacattgccaagcagtttgggatgatgcagtcccagattggctacgacatcctggccgaggacaccatcactgccctgctgcacaacaaccgcaagctcctggaaaagcacatcaccaagaccgaggtggagaccttcgtcagccttgtgcgcaagaaccgggagcccaggttcctggactacctctctgacctgtgtgtgtccaaccacatcgccatccccgtcacccaagagctcatctgcaagtgtgtgctggaccccaagaacagtgacattctcatccggaccgagcttcggcccgtgaaggagatggcccaatcccacgagtacctgagcatcgagtactcagaagaggaagtgtggctcacgtggactgacaagaataacgagcatcatgagaagagtgtgaggcagctggcccaggaggcgcgggccggcaacgcccacgacgagaatgtgctcagctactacaggtaccagctgaagctctttgcccgcatgtgcttggaccgccagtacttggccatcgacgagatctcccagcagctgggcgtggacctgattttcctgtgcatggcagacgagatgctgccctttgacctgcgcgcctccttctgccacctgatgctgcacgtgcacgtggaccgtgacccccaggagctggtcacgccggtcaagtttgcccgtctctggactgagatccccacagccatcaccatcaaggactatgattccaacctcaacgcgtcccgagatgacaagaagaacaagtttgccaacaccatggagttcgtggaggactacctcaacaatgtagtcagcgaggccgtgccctttgccaacgaggagaagaacaagctcacttttgaggtggtcagcctggcgcacaatctcatctacttcggcttctacagcttcagcgagctgctgcggctcactcgcacactgctgggcatcatcgactgtgtgcaggggcccccggccatgctgcaggcctatgaggaccccggtggcaagaatgtgcggcggtccatccagggcgtggggcacatgatgtccaccatggtgctgagccgcaagcagtccgtcttcagtgcccccagcctgtctgctggggccagtgctgctgagccgctggacagaagcaagtttgaggagaatgaggacattgtggtgatggagaccaagctgaagatcctggaaatccttcagttcatcctcaatgtccgcctggattaccgcatatcctacctgctgtctgtcttcaagaaggagtttgtggaggtgtttcccatgcaggacagtggggctgatggcacagcccctgccttcgactctaccactgccaacatgaacctggatcgcatcggggagcaggcggaggccatgtttggagtggggaagacaagcagcatgctggaggtggatgacgagggcggccgcatgttcctgcgcgtgctcatccacctcaccatgcacgactatgcgccgctggtctcgggtgccctgcagctgctcttcaagcacttcagccagcgccaggaggccatgcacaccttcaagcaggttcagctgctgatctcagcgcaggacgtggagaactacaaggtgatcaagtcggagctggaccggctgcggaccatggtggagaagtcagagctgtgggtggacaagaagggcagtggcaagggtgaggaggtggaggcaggcgccgccaaggacaagaaagagcgtcccacggacgaggagggctttctgcacccaccaggggagaaaagcagtgagaactaccagatcgtcaagggcatcctggaaaggctgaacaagatgtgcggggttggggagcaaatgaggaagaagcagcaacggctgctgaagaacatggatgcccacaaggtcatgctggacctgctgcagatcccctatgacaagggtgatgccaagatgatggagatcctgcgctacacgcaccagttcctgcagaagttctgtgcagggaaccccggcaaccaggccctgctgcacaaacacctgcacctcttcctcacgccagggctcctggaggcagagaccatgcagcacatcttcctgaacaactatcagctctgctccgagatcagcgagcctgtgttgcagcacttcgtgcacctgctggccacgcacgggcgccatgtgcagtacctggacttcctgcacaccgtcattaaggccgagggcaagtacgtcaagaagtgccaggacatgatcatgactgagctgaccaatgcaggtgacgatgtggtcgtgttctacaatgataaggcatcgctggcccacctgctggacatgatgaaggccgcccgcgacggcgtggaggaccacagccccctcatgtaccacatttccctggtggacctgctggccgcctgtgccgagggcaaaaacgtctacactgagatcaagtgcacctccctgctgccgctggaggacgtggtgtctgtggtgacgcatgaggactgcatcactgaggtgaaaatggcctatgtgaacttcgtgaaccactgctacgtggacacggaggtggagatgaaggagatctacaccagcaaccacatctggacgctctttgagaacttcaccctggacatggcccgggtctgcagcaagcgtgagaagcgcgtggctgaccccaccttggagaagtacgtgctgagcgttgtgctggacaccatcaacgccttcttcagctccccattctctgagaacagcacttccctgcagacacaccagacgattgtggtgcagctgctgcagtctaccacacgcctcctcgagtgtccgtggctacagcagcagcacaagggctccgtggaggcctgcatccggaccctcgccatggtggccaagggccgggccatcttgctgcccatggacctggatgcccacatcagctcgatgctcagcagtggagccagctgtgcagctgccgcccagcggaacgcctccagctacaaggcaaccacgcgggccttcccccgcgtcacccccaccgccaaccagtgggactacaagaacatcattgagaagctgcaggacatcatcacagccctggaggagcggctgaagcccctggtacaggctgagctgtccgtgctggtggatgtcctgcactggcctgagctgctcttcctggagggcagtgaggcctaccagcgctgcgagagtgggggcttcctgtccaagctgatccagcacaccaaggacctcatggagtcggaggagaagctgtgcatcaaggtgctgcggaccctgcagcagatgctgctcaagaagaccaagtacggggaccggggcaaccagctgcgcaagatgctgctgcaaaactacctccagaaccggaagtccacctcgcggggggaccttcccgaccccataggcactggcctggacccagactggtcggcaatcgcagccacccagtgccggctggacaaggagggggccaccaagttggtatgcgacctcatcaccagcaccaagaacgagaagatcttccaggagagcatcggcctggccatccacctgctggatggtggcaacacagagatccagaaatccttccacaacctgatgatgagtgacaagaagtcagagcgcttcttcaaggtgctgcacgaccgcatgaagcgggcccagcaggagaccaagtccacggtggcagtcaacatgaatgacctgggcagccagccacatgaggaccgcgagccagtcgaccccaccaccaaaggccgcgtggcctccttctcgatacctggctcctcatcccgctactcgctgggccccagcctgcgccgggggcacgaggtgagcgaacgtgtgcagagcagtgagatgggcacatccgtgctcatcatgcagcccatcctgcgctttctgcagctgctgtgtgagaaccacaaccgggacctgcagaacttcctgcgctgtcagaacaacaaaaccaactacaacttggtatgcgagacgctgcagttcctggacatcatgtgcggcagcaccacgggcggcctggggctgctggggctctacatcaatgaggacaacgtgggcctcgtcatccagaccttggagaccctcactgagtactgccagggcccctgccatgagaaccagacttgcattgtgactcacgagtccaatggcatagacatcatcaccgcactgatcctcaatgacatcagccccctgtgcaagtaccgcatggatctggtgctgcagctcaaggacaatgcctccaagctgctcctggctctgatggagagccggcatgacagtgaaaatgctgagcgaatcctcatcagcctgcggccccaggagctggtggacgtcatcaagaaggcctacctgcaggaggaagagcgtgagaactcggaggtgagcccacgtgaagtgggccataacatctatatcctggcgctgcagctctccaggcacaataaacagctgcagcacctgctgaagccggtgaagcgcattcaagaggaggaggccgagggtatctcttccatgctcagcctcaacaacaagcagctgtcacagatgctcaagtcctcagcgccagcacaggaggaggaggaagaccccctggcctactatgagaaccacacgtcccagatcgagattgtgcggcaggaccgcagcatggagcagatcgtgttcccagtgcccggcatctgccagttcctgacggaggaaaccaagcaccggctcttcaccactactgagcaggacgagcagggcagcaaagtgagcgacttcttcgaccagtcctccttcctgcacaacgagatggagtggcagcgcaagctccgcagcatgccgctgatctactggttctcccgccgcatgaccctgtggggcagcatctccttcaacctggccgtgtttatcaacatcatcattgccttcttctacccttacatggagggcgcgtccacaggcgtgctggactcccctctcatctcattgctcttctggatcctcatctgcttctccatcgcggccctgttcaccaagcgctacagcatccgccccctcatcgtggcgctcatcctgcgctccatctactatctgggcatcgggcccacactcaacatcctgggtgccctcaatctgaccaacaagatcgtgtttgtggtgagcttcgtgggcaaccgtggcaccttcatccggggctataaggccatggtcatggacatggaattcctctaccacgtgggctacatcctgaccagtgtcctgggcctctttgctcatgagctgttctacagcatcctgctctttgacctcatctaccgcgaggagacgctgttcaacgtcatcaagagtgtgacccgcaatggccgctccatcctgctgacagccctgctggccctcatcctggtctacctcttctccatcgtcggcttcctcttcctcaaggatgacttcattctcgaggtcgaccggctgcccaacaaccactccacagccagccccctggggatgccacatggagctgctgcatttgtggacacctgcagtggggacaagatggactgtgtctcagggctctcggtgcctgaggtcctggaagaggacagggagctggacagcacagagcgggcctgtgacactctgttgatgtgcatcgtcactgtcatgaaccatgggctacgcaacggtggtggcgtgggcgacattctccgcaagccctccaaagatgagtctctcttcccagcccgagtggtctatgacctcctgttcttcttcatcgtcatcatcattgtgctgaacctcatctttggggtaatcatcgacaccttcgctgacctgcgtagtgagaagcagaagaaggaggagattcttaagacgacatgcttcatctgtggtctggagagggacaagtttgataacaagacagtgtcatttgaggaacacatcaagctggagcacaacatgtggaactacttgtacttcattgtgctggtccgcgtgaagaacaagaccgactacacgggccctgagagctacgtggcccagatgatcaagaacaagaacctggactggttcccccggatgcgggccatgtcccttgtcagcaatgagggcgagggggagcagaatgagattcggattctccaggacaagctcaactccaccatgaagctggtgtcccacctcactgcccagctcaacgagctcaaggagcagatgacggagcagcggaaacgcaggcaacgcctaggctttgtggatgtccagaactgcattagccgctgaggagagccaccgaaggccccaacaggggatgctcatcactggagactgcgactgggaagaacactgccccctccctcgggttgggtggcccagccagctggccagcctccactcccactctgccagacaccctgacacccacccaggctttgaagagcatggagggggagcctcagagctgacagtcctgcttagagcccttaaaaagacttgaaagttcactgggactcagtttaccttaatgccttagcagaagataaatcctacctagagacctttgttccttaaagcaataactgacaactctttgtagtcctccttgtgggtagttaagagtggggtcacccctttaactccaagcactacattttggcggctgccggcctctgggggaggtggcagttatgctgttactagtgattttagggctttgttatttaacttatttcaagggtgctgtgctcagccctgcccatggctgtgcagctccctccgtgcctcagatctgctgtagccagtgcagacctcactgtcgtgtccatgccacccccggcatggctccaggtggcctggtgactccatgatggacgatcttgctcccaggacctgcctcttcccaggcttcctggggaagagttgtacgcccaggcaacaagggctgagctgcgcttgcgtggctgtttcatgaccgcttgtttttctccttttggtgtaatgttttacaaatcctttggcctgagaactaatatgttaattgccttaaataaattaatagaaatctagtccgttaaaaa

SEQ ID NO: 14354 - DNA, 4456 bp, Homo sapiens
  source 1..4456: mol_type = unassigned DNA
gttgatccgtacccagtgggcagcgccgggagctggaccaagcggccggtgagaggccgctgtagcggtgctcagccacctgtgctgcctgccagggggcgggccgaaacctggaggcccggggggcccagctcccgtagggagccgtgggcgctcggtgcccgggccgggcaggacagaataataagctgaatagaatctgaccattggctttcacctggccaggaccttctatgtagctctccttttgtggcccatgtgctgcatcctctgccctcagtgtgcaactggcccccaacgcaatgtgtgtttgtcaaaccatggaagtggggcagtatggcaagaatgcaagtcgggctggagaccggggagtcctcctggagcccttcatccaccaagtaggcggacacagcagcatgatgcgttacgacgatcacactgtgtgcaagcccctcatctcccgggaacagcgcttttacgagtccctccctcccgaaatgaaggagttcacccctgaatacaaaggcgtggtatctgtctgttttgagggggacagtgatggttacatcaacttagtggcctatccttatgtggaaagtgagactgtggaacaggatgacacaacagaacgggagcaacctcggcgcaaacactcccgccggagcctgcaccggtcaggcagtggcagtgaccacaaggaggagaaagccagcctgtcccttgagacctctgagagctcacaggaggcaaagagtccgaaggtggagctgcacagccactcagaggtccctttccagatgctagatggcaacagtggcttgagttctgagaagatcagccacaacccctggagcctgcgttgtcacaagcagcagctgagccgcatgcgctccgagtccaaggaccgaaagctctacaagttcctcctgcttgagaacgtggtgcaccacttcaagtacccctgcgtgttggacctgaagatgggcacgcggcagcatggcgatgacgcgtcagctgagaaggcagcccggcagatgcggaaatgcgagcagagcacatcagccacgctgggcgtcagggtctgcggcatgcaggtgtaccagctggacacagggcattacctctgcaggaacaagtactatggccgtgggctctccattgaaggcttccgcaatgccctctatcaatatctgcacaatggcctggacctgcgacgtgacctgtttgagcctatcctgagcaaactgcggggcctgaaagctgtgctggagcggcaggcctcttaccgcttctactccagttccctgcttgtcatctatgatggcaaggagtgccgggctgagtcctgcctggaccgccggtctgagatgcgtctcaagcacctggacatggtgctccctgaggtggcgtcatcctgtggccccagcaccagccccagcaacaccagccccgaggcgggtccctcctctcagcccaaggtggatgtccgcatgattgactttgcacacagcacattcaagggcttccgggatgaccccaccgtgcatgatgggccagacagaggctacgtgtttggcctggagaacctcatcagcatcatggaacagatgcgggacgagaaccagtaggccctgttctgggcccccagaaccccttcctctccactgcaggcagggaccattgttctgaacttgccgtgaggacacacagacttgcttttaaagggttatatttctctttggtgtaaactaaaagaaatgtttttagctgtagcctggaatccatatatataaagtgaaggagggcagaccacacgccctctcagccaggctcctcagctttgtggctctgactggtgtgtccaggctgccttaggaaggaagaggtgcccctggtgggcttggcagcagggacagggtgcccttggacattggtttctcttgtctagatctttgagatctgtggctgcagggccctgctgattgtaaggtaaagccctgggctggtgcagggcccctccacgcccactcttcccttgttccccagaagtagagggctctgggtgcccatttcttgggggctttccagtcttatgctgtgggtgtcagctagctctttaataggtgccctcagggcaccacagggctgactgcacaaagctggacccatccttcggtctgaccttagcatggggctagattaatgaagctgggctgaggccaacttatggcagagggcggcgcctgggttccccaggcacctgttggcacgtgacaggttggcacctgtcctattcctgaaacagcctctctcaccaagttcccttgcctaagaaggccactccctcccaccccactgaagtgggggatagtcggtgtcctagcaggcctcagggcctctggtggctctggcccagacagtatttgcagttcttgtgctatgggtgggagtcttcttcctcaagtttcggcagctgtgctgctgctggatgggctgctcctcccagggctcaagggctgtggtccgctcagggtctcatttccccaggccaagttcaaggcagcagccctttgtgaggcgctcttggccctgggcctggagggagaactttaagcttttttgctcacagggacgtggtatgggccctgggtgcaggtgcccacattctgctaatgagagctttgtctgatcagtcctgggtccatcagtttgtccatgtgtccggctgccagcccgtcccttgggatccttcccctggggtgtagccttgttcattagtatatactcattccttcatgctttcctcagcagaacacttccacttctgaggtgagcttttgccccatgcccttcctccacaggtgttgcctttttataaagacctgatagcagaataaattggtgtttccctgttgacccagcaccatttctgtgggcctagaatatggccctcaacccttagagtggggcagtgagggcttgaggagtgacccttcctttctcatggttttagtcattttggctgccagcccttaatggcacagatctgctgcttctaacagatggccaggaggtgacaccgatttcagccattgccaaggttagcaccctctcctttgagcctagggccacactgttcattgtcactttaggcaagtgcctgtttggctttaaaggtaagcctgccagctgtgagaagccttggtaactgatggactcatttcctggtccttaaagatgcagcctcttaagggctccttgatggatgccatctctcctagcccccagccctggtgccactggtgggcaggttcccattctttggggctgggagggacagcttgcctgtttctggtcacaaattacagtcttctctcctgtaccattctgtggcttcagccatgggggcagtagcccttcattagtgtagatagtcattccctggtagggtggagggtaagacatagggtctggaactgtttgggaccttttggggatgtcctgtgcctcccagattcctcgattctgggaggagaggctgccgcattctgctgctcctcacagcgagcaaagctgcacccacttacattcagtattttcctggcactacaaagagtgggaaggcctgggatttgctgctgctcccttagagcagggcccctcttttcagcactttggacacctggagacccagccctgttatttaatggtagtgggcaagtgtgtgtgcatactgtctgccactgctttctccctgccccatgccagagagccctgtccctgccaggcccagccttcttagccccaacttgggaacaaagtgcaacatgggatcatgggttggggtgctcaggtgagccctctctatagtgcttccctgggccaagctgacaccagcccctgagggtggggtgggacgggtggtgcttaaaagaggaaggggaccagtgtagcaacttgccagggaccccacccctccctctctgggcctgtgcagtgagcatggggattcccatcaaggggcctggcacctgtgctagttacgtagccgctgctcacgcgctcactcctgaccacatgcacgttccctagatgcagactgctttgaactttaaagctgtacaatttggttatgtttgtgctgacttaaaatatattttaatgaggaaaaaataatggagaaccctgggaaggacctggttcttttgcttctcggggaactgtaagccctcgcgttctgggaatcgctctctgctgctctttcctggaagctaagcctgtctccaccgcccgaggcctgcgccggtggctcccgccgcagttgcgtttgctttggaccttgcgtgcgggggagggggtgctcggtccgagcccgctcctttctgtacacctagcgctgcccgccccgcttgtgtctgaggtcgtgtatgtcaaaaataaagccgctagaaacgga

SEQ ID NO: 14355 - DNA, 4117 bp, Homo sapiens
  source 1..4117: mol_type = unassigned DNA
ccgccatcttgttgttgatccgtacccagtgggcagcgccgggagctggaccaagcggccggtgagaggccgctgtagcggtgctcagccacctgtgctgcctgccagggggcgggccgaaacctggaggcccggggggcccagctcccgtagggagccgtgggcgctcggtgcccgggccgggcaggcgtggtatctgtctgttttgagggggacagtgatggttacatcaacttagtggcctatccttatgtggaaagtgagactgtggaacaggatgacacaacagaacgggagcaacctcggcgcaaacactcccgccggagcctgcaccggtcaggcagtggcagtgaccacaaggaggagaaagccagcctgtcccttgagacctctgagagctcacaggaggcaaagagtccgaaggtggagctgcacagccactcagaggtccctttccagatgctagatggcaacagtggcttgagttctgagaagatcagccacaacccctggagcctgcgttgtcacaagcagcagctgagccgcatgcgctccgagtccaaggaccgaaagctctacaagttcctcctgcttgagaacgtggtgcaccacttcaagtacccctgcgtgttggacctgaagatgggcacgcggcagcatggcgatgacgcgtcagctgagaaggcagcccggcagatgcggaaatgcgagcagagcacatcagccacgctgggcgtcagggtctgcggcatgcaggtgtaccagctggacacagggcattacctctgcaggaacaagtactatggccgtgggctctccattgaaggcttccgcaatgccctctatcaatatctgcacaatggcctggacctgcgacgtgacctgtttgagcctatcctgagcaaactgcggggcctgaaagctgtgctggagcggcaggcctcttaccgcttctactccagttccctgcttgtcatctatgatggcaaggagtgccgggctgagtcctgcctggaccgccggtctgagatgcgtctcaagcacctggacatggtgctccctgaggtggcgtcatcctgtggccccagcaccagccccagcaacaccagccccgaggcgggtccctcctctcagcccaaggtggatgtccgcatgattgactttgcacacagcacattcaagggcttccgggatgaccccaccgtgcatgatgggccagacagaggctacgtgtttggcctggagaacctcatcagcatcatggaacagatgcgggacgagaaccagtaggccctgttctgggcccccagaaccccttcctctccactgcaggcagggaccattgttctgaacttgccgtgaggacacacagacttgcttttaaagggttatatttctctttggtgtaaactaaaagaaatgtttttagctgtagcctggaatccatatatataaagtgaaggagggcagaccacacgccctctcagccaggctcctcagctttgtggctctgactggtgtgtccaggctgccttaggaaggaagaggtgcccctggtgggcttggcagcagggacagggtgcccttggacattggtttctcttgtctagatctttgagatctgtggctgcagggccctgctgattgtaaggtaaagccctgggctggtgcagggcccctccacgcccactcttcccttgttccccagaagtagagggctctgggtgcccatttcttgggggctttccagtcttatgctgtgggtgtcagctagctctttaataggtgccctcagggcaccacagggctgactgcacaaagctggacccatccttcggtctgaccttagcatggggctagattaatgaagctgggctgaggccaacttatggcagagggcggcgcctgggttccccaggcacctgttggcacgtgacaggttggcacctgtcctattcctgaaacagcctctctcaccaagttcccttgcctaagaaggccactccctcccaccccactgaagtgggggatagtcggtgtcctagcaggcctcagggcctctggtggctctggcccagacagtatttgcagttcttgtgctatgggtgggagtcttcttcctcaagtttcggcagctgtgctgctgctggatgggctgctcctcccagggctcaagggctgtggtccgctcagggtctcatttccccaggccaagttcaaggcagcagccctttgtgaggcgctcttggccctgggcctggagggagaactttaagcttttttgctcacagggacgtggtatgggccctgggtgcaggtgcccacattctgctaatgagagctttgtctgatcagtcctgggtccatcagtttgtccatgtgtccggctgccagcccgtcccttgggatccttcccctggggtgtagccttgttcattagtatatactcattccttcatgctttcctcagcagaacacttccacttctgaggtgagcttttgccccatgcccttcctccacaggtgttgcctttttataaagacctgatagcagaataaattggtgtttccctgttgacccagcaccatttctgtgggcctagaatatggccctcaacccttagagtggggcagtgagggcttgaggagtgacccttcctttctcatggttttagtcattttggctgccagcccttaatggcacagatctgctgcttctaacagatggccaggaggtgacaccgatttcagccattgccaaggttagcaccctctcctttgagcctagggccacactgttcattgtcactttaggcaagtgcctgtttggctttaaaggtaagcctgccagctgtgagaagccttggtaactgatggactcatttcctggtccttaaagatgcagcctcttaagggctccttgatggatgccatctctcctagcccccagccctggtgccactggtgggcaggttcccattctttggggctgggagggacagcttgcctgtttctggtcacaaattacagtcttctctcctgtaccattctgtggcttcagccatgggggcagtagcccttcattagtgtagatagtcattccctggtagggtggagggtaagacatagggtctggaactgtttgggaccttttggggatgtcctgtgcctcccagattcctcgattctgggaggagaggctgccgcattctgctgctcctcacagcgagcaaagctgcacccacttacattcagtattttcctggcactacaaagagtgggaaggcctgggatttgctgctgctcccttagagcagggcccctcttttcagcactttggacacctggagacccagccctgttatttaatggtagtgggcaagtgtgtgtgcatactgtctgccactgctttctccctgccccatgccagagagccctgtccctgccaggcccagccttcttagccccaacttgggaacaaagtgcaacatgggatcatgggttggggtgctcaggtgagccctctctatagtgcttccctgggccaagctgacaccagcccctgagggtggggtgggacgggtggtgcttaaaagaggaaggggaccagtgtagcaacttgccagggaccccacccctccctctctgggcctgtgcagtgagcatggggattcccatcaaggggcctggcacctgtgctagttacgtagccgctgctcacgcgctcactcctgaccacatgcacgttccctagatgcagactgctttgaactttaaagctgtacaatttggttatgtttgtgctgacttaaaatatattttaatgaggaaaaaataatggagaaccctgggaaggacctggttcttttgcttctcggggaactgtaagccctcgcgttctgggaatcgctctctgctgctctttcctggaagctaagcctgtctccaccgcccgaggcctgcgccggtggctcccgccgcagttgcgtttgctttggaccttgcgtgcgggggagggggtgctcggtccgagcccgctcctttctgtacacctagcgctgcccgccccgcttgtgtctgaggtcgtgtatgtcaaaaataaagccgctagaaacgg

SEQ ID NO: 14356 - DNA, 1260 bp, Homo sapiens
  source 1..1260: mol_type = unassigned DNA
agccgccatcttgttgttgatccgtacccagtgggcagcgccgggagctggaccaagcggccggcgtggtatctgtctgttttgagggggacagtgatggttacatcaacttagtggcctatccttatgtggaaagtgagactgtggaacaggatgacacaacagaacgggagcaacctcggcgcaaacactcccgccggagcctgcaccggtcaggcagtggcagtgaccacaaggaggagaaagccagcctgtcccttgagacctctgagagctcacaggaggcaaagagtccgaaggtggagctgcacagccactcagaggtccctttccagatgctagatggcaacagtggcttgagttctgagaagatcagccacaacccctggagcctgcgttgtcacaagcagcagctgagccgcatgcgctccgagtccaaggaccgaaagctctacaagttcctcctgcttgagaacgtggtgcaccacttcaagtacccctgcgtgttggacctgaagatgggcacgcggcagcatggcgatgacgcgtcagctgagaaggcagcccggcagatgcggaaatgcgagcagagcacatcagccacgctgggcgtcagggtctgcggcatgcaggtgtaccagctggacacagggcattacctctgcaggaacaagtactatggccgtgggctctccattgaaggcttccgcaatgccctctatcaatatctgcacaatggcctggacctgcgacgtgacctgtttgagcctatcctgagcaaactgcggggcctgaaagctgtgctggagcggcaggcctcttaccgcttctactccagttccctgcttgtcatctatgatggcaaggagtgccgggctgagtcctgcctggaccgccggtctgagatgcgtctcaagcacctggacatggtgctccctgaggtggcgtcatcctgtggccccagcaccagccccagcaacaccagccccgaggcgggtccctcctctcagcccaaggtggatgtccgcatgattgactttgcacacagcacattcaagggcttccgggatgaccccaccgtgcatgatgggccagacagaggctacgtgtttggcctggagaacctcatcagcatcatggaacagatgcgggacgagaaccagtaggccctgttctgggcccccagaaccccttcctctccactgcaggcagggaccattgttctgaacttgccgtgaggacacacagacttgcttttaa

SEQ ID NO: 14357 - DNA, 1775 bp, Homo sapiens
  source 1..1775: mol_type = unassigned DNA
aggtgcagggggcggggctcggcctggccgcagccattttggtgcgagagaaacaataggacggaaacgccgaggaacccggctgaggcggcagcagagcatcctggccagaacaagccaaggagccaagacgagagggacacacggacaaacaacagacagaagacgtactggccgctggactccgctgcctcccccatctccccgccatctgcgcccggaggatgagcccagccttcagggccatggatgtggagccccgcgccaaaggcgtccttctggagccctttgtccaccaggtcggggggcactcatgcgtgctccgcttcaatgagacaaccctgtgcaagcccctggtcccaagggaacatcagttctacgagaccctccctgctgagatgcgcaaattcactccccagtacaaaggtgtggtatctgtgcgctttgaagaagatgaagacaggaacttgtgtctaatagcatatccattgaaaggggaccatggaattgtggacattgtagataattcagactgtgaaccaaaaagtaagctcctaaggtggacaacaaacaaaaaacatcatgtcttagaaacagaaaagacccctaaggactgggtgcgtcagcaccgtaaagaggagaaaatgaagagccataagttagaagaagaatttgagtggctaaagaaatctgaagtcttgtactacactgtagagaagaaggggaatataagttcccagcttaaacactataacccttggagcatgaaatgtcaccagcaacagttacagagaatgaaggagaatgcaaagcatcggaaccagtacaaatttatcttactggaaaacctgacttcccgctacgaggtgccttgtgtccttgacctcaagatgggcacacgacaacatggtgatgatgcttcagaggagaaggcagccaaccagatccgaaaatgtcagcagagcacatctgcagtcattggtgtgcgtgtgtgtggcatgcaggtgtaccaagcaggcagtgggcagctcatgttcatgaacaagtaccatggacggaagctatcggtgcagggcttcaaggaggcacttttccagttcttccacaatgggcggtacctgcgccgtgaactcctgggccctgtgctcaagaagctgactgagctcaaggcagtgttggagcgacaggagtcctaccgcttctactcaagctccctgctggtcatttatgatggcaaggagcggcccgaagtggtcctggactcagatgctgaggatttggaggacctgtcagaggaatcagctgatgagtctgctggtgcctatgcctacaaacccatcggcgccagctctgtagatgtgcgcatgatcgactttgcacacaccacctgcaggctgtatggcgaggacaccgtggtgcatgagggccaggatgctggctatatcttcgggctccagagcctgatagacattgtcacagagataagtgaggagagtggggagtgagcttgctagctgctccagtacttgagagcgactctgtgtcccaggcacagctgtgctgcgtcagggaggaagccagtatggccaggtggtggctcctgcagcctggagctgatgtgcagtggcctctgtgagccccagcctgagccagtcccagctgtgcttggagtctttatttattttaactatttcttcaacattccacatttgatgatgatacctctttcttccctgagtgtatatgttctaatacaaatctttttgtttattgta

SEQ ID NO: 14358 - DNA, 1185 bp, Homo sapiens
  source 1..1185: mol_type = unassigned DNA
cattttggtgcgagagaaacaataggacggaaacgccgaggaacccggctgaggcggcagcagagcatcctggccagaacaagccaaggagccaagacgagagggacacacggacaaacaacagacagaagacgtactggccgctggactccgctgcctcccccatctccccgccatctgcgcccggaggatgagcccagccttcagggccatggatgtggagccccgcgccaaaggcgtccttctggagccctttgtccaccaggtcggggggcactcatgcgtgctccgcttcaatgagacaaccctgtgcaagcccctggtcccaagggaacatcagttctacgagaccctccctgctgagatgcgcaaattcactccccagtacaaaggacaaagccaaaggccccttgttagctggccatccctgccccattttttcccctggtcctttcccctgtggccacagggaagtgtggcctgaataccccaccccggctcctctgcacccagagctgggggccacctcagaagtgtcatctctctctgagcacgcattcccctgcagcagtcgaggactgagcagattgagtgatgctggggcagagaggcctgggaggaaaggtgttcagccagtcgtttgtaaggcgctcgtcggcacctgctgaaacgcccccacctgacagccccatcctcaaagactgtcttaattactcatggcaggttctagagacttaaggggaaaagctgctttcaaggccaccacatgtctgtgctccccaaccagctctatctgccttgtgttcattttgttattttgtgacgtgagactgcaaagaccaataaaaacatattttataagaacaaaaggcctgggtgcctacccgtgtgggggcactgtgggaagcctttgctagggtgtcttgtgctgtgtggtttgttttgtttgcccctttattttgctttgcttacccagtcttcccttactcttggatgcttcttaaccctcaggcaaacctgtgttccccctgtattcaggctctgctttaaagcaagccatgaggctgttggagtttctgtttagggcattaaaaattcccgcaaactataaagagcaatgttttcagtcttttaggattagaagaattacataaaaattaataaacattttcaatgatggaaaaa

SEQ ID NO: 14359 - DNA, 792 bp, Homo sapiens
  source 1..792: mol_type = unassigned DNA
ggtgcgagagaaacaataggacggaaacgccgaggaacccggctgaggcggcagggtctcgctctgtcacccaggctggagtacagtcatgtgatcacggctcactgcagccttgacctcccaggctccagtgacccttccatctcagcctcccaagtagctgggaccacagcagagcatcctggccagaacaagccaaggagccaagacgagagggacacacggacaaacaacagacagaagacgtactggccgctggactccgctgcctcccccatctccccgccatctgcgcccggaggatgagcccagccttcagggccatggatgtggagccccgcgccaaaggcgtccttctggagccctttgtccaccaggtcggggggcactcatgcgtgctccgcttcaatgagacaaccctgtgcaagcccctggtcccaagggaacatcagttctacgagaccctccctgctgagatgcgcaaattcactccccagtacaaaggacaaagccaaaggccccttgttagctggccatccctgccccattttttcccctggtcctttcccctgtggccacagggaagtgtggcctgaataccccaccccggctcctctgcacccagagctgggggccacctcagaagtgtcatctctctctgagcacgcattcccctgcagcagtcgaggactgagcagattgagtgatgctggggcagagaggcctgggaggaaaggtgttcagccagtcgtttgtaaggcgctcgtcggcacctgctgaaacgcccccacc

SEQ ID NO: 14360 - DNA, 2174 bp, Homo sapiens
  source 1..2174: mol_type = unassigned DNA
cattttggtgcgagagaaacaataggacggaaacgccgaggaacccggctgaggcggcagcttcctaggtgacagacaggtacactgtatgctagccctgtatctgtctgagcagtggaatgtgccaggaaagaaggagcaaccactgactgatgaacctttgccagtctcccttccaagagggatgccagagccttctgtaagctcctgagatgtcactggtatctaggcaacagggatgagcctgaacctccctgaggccagcttactgagcagagcatcctggccagaacaagccaaggagccaagacgagagggacacacggacaaacaacagacagaagacgtactggccgctggactccgctgcctcccccatctccccgccatctgcgcccggaggatgagcccagccttcagggccatggatgtggagccccgcgccaaaggcgtccttctggagccctttgtccaccaggtcggggggcactcatgcgtgctccgcttcaatgagacaaccctgtgcaagcccctggtcccaagggaacatcagttctacgagaccctccctgctgagatgcgcaaattcactccccagtacaaaggtaagtcccagctgctggaggggttgccacactggcgaggagatgtgagagatcgtggccatggaaggccctggcagccatccctggagccctcactccctcccactctgtgctttccctccctctcctccttctcctcctcctggccctcagcccagcatctcacaccctcagttttcaatccctggtaagattgctcaattctgttttgttgtgtggatttgagtttgattttggtagaagtgtagttgtgttttatgttcaggtgtctcttgatcacagtaacccatagtcccccactggggggacggtgggggaagactttgggaggattttacccagaatacttgccgcctgctttttgtcctccaggaaaccagaagcccgggtaattaggtaggccggggagcagcgttgagtcagatggaatgcaggagtgggaggcctgtgctgattagcccaagccctttgctgttacagaatgtccccaaaattgctatatgaaagcaacccttcgattcacatatgataattttttatttctttttataatgtattttataggggacatcagcagccaccagcatggtggggtctttgttggggagtgggggagtcttttgtaaatcaagtaagaatccattaaagaaattaattttaaatgtgcattacctggttacataaaggactctagaacaacttaggttcttttgggactgttgaaacattgtctttaaggacagaatgtactgggtgcctttctctgtactctgaatatgcatgtgtattgcggtggggatgggggagttgggggccctcacttggtccttctctgttgtttttttccaggacaaagccaaaggccccttgttagctggccatccctgccccattttttcccctggtcctttcccctgtggccacagggaagtgtggcctgaataccccaccccggctcctctgcacccagagctgggggccacctcagaagtgtcatctctctctgagcacgcattcccctgcagcagtcgaggactgagcagattgagtgatgctggggcagagaggcctgggaggaaaggtgttcagccagtcgtttgtaaggcgctcgtcggcacctgctgaaacgcccccacctgacagccccatcctcaaagactgtcttaattactcatggcaggttctagagacttaaggggaaaagctgctttcaaggccaccacatgtctgtgctccccaaccagctctatctgccttgtgttcattttgttattttgtgacgtgagactgcaaagaccaataaaaacatattttataagaacaaaaggcctgggtgcctacccgtgtgggggcactgtgggaagcctttgctagggtgtcttgtgctgtgtggtttgttttgtttgcccctttattttgctttgcttacccagtcttcccttactcttggatgcttcttaaccctcaggcaaacctgtgttccccctgtattcaggctctgctttaaagcaagccatgaggctgttggagtttctgtttagggcattaaaaattcccgcaaactataaa

SEQ ID NO: 14361 - DNA, 1309 bp, Homo sapiens
  source 1..1309: mol_type = unassigned DNA
gagccaatagtgaggggcaccgggagcgaggtgcagggggcggggctcggcctggccgcagccattttggtgcgagagaaacaataggacggaaacgccgaggaacccggctgaggcggcagcagagcatcctggccagaacaagccaaggagccaagacgagagggacacacggacaaacaacagacagaagacgtactggccgctggactccgctgcctcccccatctccccgccatctgcgcccggaggatgagcccagccttcagggccatggatgtggagccccgcgccaaaggcgtccttctggagccctttgtccaccaggtcggggggcactcatgcgtgctccgcttcaatgagacaaccctgtgcaagcccctggtcccaagggaacatcagttctacgagaccctccctgctgagatgcgcaaattcactccccagtacaaaggggacatcagcagccaccagcatggtggggtctttgttggggagtgggggagtcttttgtaaatcaagacaaagccaaaggccccttgttagctggccatccctgccccattttttcccctggtcctttcccctgtggccacagggaagtgtggcctgaataccccaccccggctcctctgcacccagagctgggggccacctcagaagtgtcatctctctctgagcacgcattcccctgcagcagtcgaggactgagcagattgagtgatgctggggcagagaggcctgggaggaaaggtgttcagccagtcgtttgtaaggcgctcgtcggcacctgctgaaacgcccccacctgacagccccatcctcaaagactgtcttaattactcatggcaggttctagagacttaaggggaaaagctgctttcaaggccaccacatgtctgtgctccccaaccagctctatctgccttgtgttcattttgttattttgtgacgtgagactgcaaagaccaataaaaacatattttataagaacaaaaggcctgggtgcctacccgtgtgggggcactgtgggaagcctttgctagggtgtcttgtgctgtgtggtttgttttgtttgcccctttattttgctttgcttacccagtcttcccttactcttggatgcttcttaaccctcaggcaaacctgtgttccccctgtattcaggctctgctttaaagcaagccatgaggctgttggagtttctgtttagggcattaaaaattcccgcaaactataaagagcaatgttttcagtcttttaggattagaagaattacataaaaattaataaacattttcaatgatgg

SEQ ID NO: 14362 - DNA, 1565 bp, Homo sapiens
  source 1..1565: mol_type = unassigned DNA
ttttggtgcgagagaaacaataggacggaaacgccgaggaacccggctgaggcggcagcttcctaggtgacagacaggtacactgtatgctagccctgtatctgtctgagcagtggaatgtgccaggaaagaaggagcaaccactgactgatgaacctttgccagtctcccttccaagagggatgccagagccttctagcatcctggccagaacaagccaaggagccaagacgagagggacacacggacaaacaacagacagaagacgtactggccgctggactccgctgcctcccccatctccccgccatctgcgcccggaggatgagcccagccttcagggccatggatgtggagccccgcgccaaaggcgtccttctggagccctttgtccaccaggtcggggggcactcatgcgtgctccgcttcaatgagacaaccctgtgcaagcccctggtcccaagggaacatcagttctacgagaccctccctgctgagatgcgcaaattcactccccagtacaaaggtaagtcccagctgctggaggggttgccacactggcgaggagatgtgagagatcgtggccatggaaggccctggcagccatccctggagccctcactccctcccactctgtgctttccctccctctcctccttctcctcctcctggccctcagcccagcatctcacaccctcagttttcaatccctggtaagattgctcaattctgttttgttgtgtggatttgagtttgattttggtagaagtgtagttgtgttttatgttcaggtgtctcttgatcacagtaacccatagtcccccactggggggacggtgggggaagactttgggaggattttacccagaatacttgccgcctgctttttgtcctccaggaaaccagaagcccgggtaattaggtaggccggggagcagcgttgagtcagatggaatgcaggagtgggaggcctgtgctgattagcccaagccctttgctgttacagaatgtccccaaaattgctatatgaaagcaacccttcgattcacatatgataattttttatttctttttataatgtattttataggggacatcagcagccaccagcatggtggggtctttgttggggagtgggggagtcttttgtaaatcaagtaagaatccattaaagaaattaattttaaatgtgcattacctggttacataaaggactctagaacaacttaggttcttttgggactgttgaaacattgtctttaaggacagaatgtactgggtgcctttctctgtactctgaatatgcatgtgtattgcggtggggatgggggagttgggggccctcacttggtccttctctgttgtttttttccaggacaaagccaaaggccccttgttagctggccatccctgccccattttttcccctggtcctttcccctgtggccacagggaagtgtggcctgaataccccaccccggctcctctgcacccagagctgggggccacctcagaagtgtcatctctctctgagcacgcattcccctgcagcagtcgaggactga

SEQ ID NO: 14363 - DNA, 2610 bp, Homo sapiens
  source 1..2610: mol_type = unassigned DNA
agacctcccgcaccagggctctggtgaacagcaaatgctccacgctgggacgggccattgcctgatgcctgtacatggtgggcactgagagacaagattcctgggccctgccttccatacactccccacgatctcggaggaagctctgaggaccccgctgagaacccacagacaggaggacaactgcgctatgacagcaataaaggccaagaaggagaaagttgaggaccgctgacagccccgtgtgctgttgggagctgccctttctacttcaaaccttcctctagcagactgtgcagggaccccccaccaccaccatctgccgccatggttgtgcaaaacagcgcagacgccggggacatgagggcaggcgtgcagctggagcccttcctgcaccaggtcggggggcacatgagcgtgatgaagtatgacgagcatacggtgtgcaagcccctcgtctcccgggagcagaggttctatgaatccctgccgctggccatgaagcggttcaccccacagtacaaaggtaccgtcacagtgcacctctggaaagacagcacaggccatctcagcttggttgccaacccagtgaaggagagccaggagcccttcaaggtctccacagagtcggcggcggtggccatatggcagacgctccagcagaccaccggcagcaatggcagcgactgcacccttgcccagtggccgcatgcccagctggcacgctcacccaaggagagcccggccaaggctcttctgaggtccgagccccacctcaacactccagccttctcgctggtggaagacaccaacggaaaccaggttgagaggaagagcttcaacccgtggggcctgcaatgccaccaggcccacctgacccgcctgtgctccgagtacccagagaacaagcggcatcggttcttgttgctggaaaatgtagtgtcacagtacacgcatccctgtgtcctggatctgaagatggggacccggcagcacggcgatgatgcatcggaggagaagaaggcccgccacatgaggaagtgtgcgcagagcacctcagcctgcctgggtgtgcgcatctgcggcatgcaggtttatcaaacagataagaagtactttctctgcaaagacaagtactatggaagaaaactctcagtggaggggttcagacaagccctctatcagttcctacataatggaagccacctccggagggagctcctggagcccatcctgcaccagctccgggccctcctctctgtcattaggagccagagttcataccgcttctattccagctctctccttgtcatctatgatgggcaggaaccaccagaaagagccccaggcagcccgcatcctcacgaggctccccaggcagcccacggtagctctcccggtggtctcaccaaggttgacatccgcatgattgactttgctcataccacatacaagggctactggaatgagcacaccacctacgatggaccagaccctggctatatttttggcctggaaaacctcatcaggatcctgcaggatatccaagagggagaatgaaacttcctgggcttatctggattcttctgggctatagatctcaaatagagacctgttggttgctagggtagtccagacaccccttagatgtcttcataatagtcctatctaccttcaaaaaccatctctatatatggcagactatattaacagctgctgaacaaatcagctctggaggtgattccacatcccctggcattatgctctaatgctgctcatcggagaacagacagccaggataaagtggcaccttctggagtacactggagggggcagcccaagttagaggccagcattgctgacattctggaatatttgcatctaaaaatgtttactcgttgccatgctgcagtccgcacaagctgtgaggcagaaaacttgacttgaagcagccttgaagagtgagttcatgagctcatggtttttctccttgtatggactgctcgctccaagggcaggcagagctcatgaatgcctcttatcttcctaagcggagttttaggtgacacaggatgaagcagaagagatctacccatctcatctgctctgcacccagcttctaagtggacaaagccaagcccaggcatgagctctggcaaagcaagaccccagattctccatttttgcctgtggaaaggagggtccctttacaggcttttttttcctttttttcccccaaaatctcttaaaatgaggaatctcttagcagactttggagttccccattctgccacattctgaccatgagacgcggcttgcagtgggggtgaacgcacataaaaagggaccactgacgtcctgctctactctctgctttctatttatttattttgggggtgggttggggagtcagaagaacctggaggacggaggaaaccaggggcaatgtttacaagactggtggacaagtgtaaatatggaataagaacaaacagttctaattaattccttcttctgcagtatggaaacctattacgatgcccttgagtcaagcactgagatacgttacccaattagggaaataaatttgttaataaaattgctgaggtc

SEQ ID NO: 14364 - DNA, 2822 bp, Homo sapiens
  source 1..2822: mol_type = unassigned DNA
tgccagtccccaccagcccttccccagagggtcaggtgacccttccctccccaggccacggcagcccggccctcccgggcagacctcccgcaccagggctctggtgaacagcaaatgctccacgctgggacgggccattgcctgatgcctgtacatggtgggcactgagagacaagattcctgggccctgccttccatacactccccacgatctcggaggaagctctggctggctacctggtagacaatcgctgccaatccgtccaagtccaggggcaagggagtttccactgctgtgccacaggctgcactgaaggcccaggggtcttccctgctcacactgcgctctctgaggagaggaccccgctgagaacccacagacaggaggacaactgcgctatgacagcaataaaggccaagaaggagaaagttgaggaccgctgacagccccgtgtgctgttgggagctgccctttctacttcaaaccttcctctagcagactgtgcagggaccccccaccaccaccatctgccgccatggttgtgcaaaacagcgcagacgccggggacatgagggcaggcgtgcagctggagcccttcctgcaccaggtcggggggcacatgagcgtgatgaagtatgacgagcatacggtgtgcaagcccctcgtctcccgggagcagaggttctatgaatccctgccgctggccatgaagcggttcaccccacagtacaaaggtaccgtcacagtgcacctctggaaagacagcacaggccatctcagcttggttgccaacccagtgaaggagagccaggagcccttcaaggtctccacagagtcggcggcggtggccatatggcagacgctccagcagaccaccggcagcaatggcagcgactgcacccttgcccagtggccgcatgcccagctggcacgctcacccaaggagagcccggccaaggctcttctgaggtccgagccccacctcaacactccagccttctcgctggtggaagacaccaacggaaaccaggttgagaggaagagcttcaacccgtggggcctgcaatgccaccaggcccacctgacccgcctgtgctccgagtacccagagaacaagcggcatcggttcttgttgctggaaaatgtagtgtcacagtacacgcatccctgtgtcctggatctgaagatggggacccggcagcacggcgatgatgcatcggaggagaagaaggcccgccacatgaggaagtgtgcgcagagcacctcagcctgcctgggtgtgcgcatctgcggcatgcaggtttatcaaacagataagaagtactttctctgcaaagacaagtactatggaagaaaactctcagtggaggggttcagacaagccctctatcagttcctacataatggaagccacctccggagggagctcctggagcccatcctgcaccagctccgggccctcctctctgtcattaggagccagagttcataccgcttctattccagctctctccttgtcatctatgatgggcaggaaccaccagaaagagccccaggcagcccgcatcctcacgaggctccccaggcagcccacggtagctctcccggtggtctcaccaaggttgacatccgcatgattgactttgctcataccacatacaagggctactggaatgagcacaccacctacgatggaccagaccctggctatatttttggcctggaaaacctcatcaggatcctgcaggatatccaagagggagaatgaaacttcctgggcttatctggattcttctgggctatagatctcaaatagagacctgttggttgctagggtagtccagacaccccttagatgtcttcataatagtcctatctaccttcaaaaaccatctctatatatggcagactatattaacagctgctgaacaaatcagctctggaggtgattccacatcccctggcattatgctctaatgctgctcatcggagaacagacagccaggataaagtggcaccttctggagtacactggagggggcagcccaagttagaggccagcattgctgacattctggaatatttgcatctaaaaatgtttactcgttgccatgctgcagtccgcacaagctgtgaggcagaaaacttgacttgaagcagccttgaagagtgagttcatgagctcatggtttttctccttgtatggactgctcgctccaagggcaggcagagctcatgaatgcctcttatcttcctaagcggagttttaggtgacacaggatgaagcagaagagatctacccatctcatctgctctgcacccagcttctaagtggacaaagccaagcccaggcatgagctctggcaaagcaagaccccagattctccatttttgcctgtggaaaggagggtccctttacaggcttttttttcctttttttcccccaaaatctcttaaaatgaggaatctcttagcagactttggagttccccattctgccacattctgaccatgagacgcggcttgcagtgggggtgaacgcacataaaaagggaccactgacgtcctgctctactctctgctttctatttatttattttgggggtgggttggggagtcagaagaacctggaggacggaggaaaccaggggcaatgtttacaagactggtggacaagtgtaaatatggaataagaacaaacagttctaattaattccttcttctgcagtatggaaacctattacgatgcccttgagtcaagcactgagatacgttacccaattagggaaataaatttgttaataaaattgctgaggtcacc

SEQ ID NO: 14365 - DNA, 7199 bp, Homo sapiens
  source 1..7199: mol_type = unassigned DNA
ggaagtcggaccagccggccggcggaagaacctagagcgcgctgcctggcgagtcaggcgcgcggggcggcgttggtggtcttcgcggcgcaactcggcctttcctgggagggagtgatggggcgcaccggggccggggagcgggcgccagtgtagcccgcgcggcgcctggcccggagcgcggcggctgcggcggcggcggcggcgggcgctggaggcctgtgagagccgcagcccggagcgcccggcttcccacgccatggcccccatgggcatccgcctttccccactgggggtggcagtgttttgcctgctggggctcggcgtgctctaccacctctactcgggcttcttggccggccgcttcagcctcttcggcctgggcggcgagcctggcggcggcgcggcggggcccgcggccgcggccgatgggggcaccgtggacttgcgcgagatgctggctgtgtcagtgctggccgcagtccgcggcggcgacgaggtgaggcgcgtccgcgagagcaacgtcctccacgagaagtccaaggggaagacgcgcgagggagccgaggacaagatgaccagcggcgacgtgctgtccaaccgcaagatgttctacctgctcaagaccgccttccccagcgtccagattaatactgaggaacacgtggatgcagctgatcaggaggttatcttgtgggatcataagattcctgaggatatcctaaaggaagtaactactcctaaagaggtaccagcagaaagtgttactgtctggattgacccacttgatgctacacaggaatatacagaggatcttcgaaagtacgtcactactatggtgtgtgtggctgtaaatggtaaacccatgctaggagttatacataagccattttccgaatatacagcttgggcaatggtagatggtggttcaaatgtgaaagcccgctcttcctacaatgagaagaccccaaggatcgttgtgtctcgttcccattcagggatggtcaaacaggtcgctcttcagacttttggaaaccagactacaattatcccagctggtggtgctggttataaagttttagcacttttggatgtgcctgataagagtcaagaaaaagctgatttatacatccatgtgacatacatcaaaaagtgggatatatgtgctggtaatgccatcttaaaagccctaggggggcatatgactaccctgagtggtgaagaaatcagttacactggttcagacggcattgaagggggactccttgctagcatcagaatgaaccaccaggccctggtcagaaaactcccagatctagaaaagacaggacataaatgagcataactgattacagggtacagttcttcacagctgaaatggttagcctgagatgctggaagcttcaaaggattggtggagactatgcatggttaaggccatcccgaactttttaaagtatttatgaagcatcagagacttattttccctgtaatagaatgcaaaatcagggaaaatgggttgctttgtgtctcaagtattgtctttatttttgagactattttcatacagttgtcatacacaaggcgcatatatatatttgtgaattaaaatctgtagctgagtctacattgttatgagtcaccattttcacacaacatcatgaatcttcactgttagtactttcatatagaattcggttgaaggaaagattgatttttgtgtagatgtttaatataactttacaactatatctcattgaaaataaagtcattggggatttttacctctaatttggatggaaagcacaagaagccacacattcattaatatgcaacaaatgttgtatttatgttactgaatatttctatggattaaaatagaaaaagtttaattgattttttcttttaaattttaataacaggttcaccagctggtagaaaatagagacacatgatgatttgcattgtaataatttctgtgtgtatgtgtgtgtgttgttttgtttttataaagaaaagtgtgtttgtacccatgagttcagcatttctgccatcttgctattttcattttccctgtggaagatgcatggttgcatccttttccttctgaccaacacttagtctttaactttgtaaggttcggtttaaggtttcagggttagcactatagttttggttcattttctcattaacgataaaatatgctgtaaggcactataagaatataaatgattctattacaattgaaagttacttgacattacatgaattgaactgcctttcattatcttcagacactttgttttagtatttttttttaatttgctaggtttgtatatagaagatcctttcattatcaagaatgagtatggttgcttttgccatggttgcttttactattaataaatgtatctagcctacccaaactctgtagtaacttttgagattctcttaatttcccctcagattaaaatagagaaggttgaaggtactttttgatgaaatttttttctagtctggttagaaaaaaaaagttgtgacatattcattgtgttaccgtaactagaaccttgctttgtgaactgtctttcattgggatgtatggtttctctcaatgtgaaatctggaaacttcatgtaaactacccatgccgttatttcatgtgactccagtgcccttgtattccataacatgctgatgagagggatttctcacggtttctttctttgctaaattttttaaccataaagcagcttaccctttattttcccatcttggaagtaaaattgaccaaagaatgtacgttctagcctggtggaatgtgcatactttaggtttgtatgttacattgtccaaagccctttactttcttattagtaaactgaatctaatatgacacaaatgttttcacccaatctcttgcaactggtcaaattcgagaaggtgttgggccttagcagtaggccttttcagtgaaaattcattcaaagttttggtaggtggaacacttgatatttaaataggacttgaaaattttgaaaagagtatcagagacctcatttttttcctttgcaataagctgaagaaactttctttttcaggagagatggcaaaggtatatgctgttgccagagtcctgtggtataagcatctgtttttattatagtatgtcaaagttagggaaatgggactggcaagtaaaaaatggaatttaatttcaatgttttatgggaactctgatttaatgggaagcaaactagttcatattagcaggaattattttattttttcgagacagagtttcactctcgttggccaggctggagtgcaatggcgtgatctcggctcaccgcaacctctgcttcccgggttcaagcgattctcctgcctcagcctcccaagtagctgggattacaggcatacaccaccacacccagctaatttttttgtatttttgttagagacagggtttctccatgttggtcaggctggtctcgaactcccgacctcaggtgatccgcccacctcggcctcccaaagtgatgattttatttttatttttaattgtattaatctgcatctagataatgactttgtgaagggtgtgtgttgtgtgcaaaacttaaggtattggttgagagttaaatacattatttttataatatgttgggtatagtctagttactaatgattttttttaagtacttttataaaaagttcatttttaaaattgtttgtttttaaaagccaatatacgttgcagaattaggaacagtatttatatttatttacacaagacattgtgccatagcatcctagtaaaacaccttcatgaatgagtaatgttatctcccagaattacattaaaattatttctaaaaagtagcaaagtcattaccttttgcttttaatgacccacacctcaccagctcctggtcttttcttcactgttgcccttattttgaggcaatttttcttaaaatatgacttttatgcaccacatttagtagaggcagtgacatcagtgatctcagtacccatcagctgtccccctcctctgcccttcttcatctcttctaccttgtgaccatttcccttaccggttcatgttctcctttatctctgcttttctttcttagccaggatacttccctcacaactctcactcccaaattcttttagatatacatttttctggatattggctgctgaaatctgaagctctggtaaagttcctagtatcagagatcaatcctggaggaggcctagttcactattagattacaaagactcctcacaaagtaaaggaaaatcaccttcaaaaccacaaccctttatgttgtcaagtctaatatgagtgtttttacgaagtatttctttctacccattgttcaagaatgtaaatgtaaaaaaaaatacaagagagttgggtagatatgcatgcttgaggaaacttgcttttactgttttcctacttgtatccccagttcagttgaatttacaaggacctacaagatggtcatgtttgtcttggtatgtgctaccccaattttagtgtttctttctttattttaaatcagtaattattcagttgattgtttatactatataatgaagtaacaaaaacattttggtttgtatgttttaagtaacagttgtgcaaattcctcttgtttgttaggtgctccctttgaatattttgtgaactgtgtcagagggagaggggtggtggctaggaagagggtcagaaagaagctagagggaggtcaggagaagggtaacagggaggatgcaaagcagacatctaccctggtcaccccaggatcaggatatctgtccttgtttcatgttgaattcaaaaattggatctcacttaggctttgaaggtgacagccatctctgatagctgagcataagtaaagaaaggtggagtgccgatgcagaaaggaaaatattcagctttcctctcttagatcgcactttgaagatggccttttggagacaatctgacaggttaaaacaggaactgttggaattattctagctgtaactacctattggctatgtgttgattgatcctagaaagaaaaaataatttttcattttagatcttgattgaatttaagatgtatttatatgcctacaaaaggtctgtcttgtaactgttgtataaaataaacctaatctatggtttcatttttaatctaaaaaaagttgtgccttaacaatagggcattgtatgttaataagggaaaacaacctttttagtagatgggggaaaataggaactttttgccattaaaacttaagttcttttgatgtttttaatattatagttgggggagattcattaaaattaaattgaaataaaattatttttgcataacctagcatttacaactaaagtatgttttttataagaactggcatcttgatgtatataggtctgaaataatatttcatcttttgatttttaattttaataatattagaccaggatagatcacagttttacaaatcttagttttaaataaattatttcagtgtgctgttagtcctctacagtcattttggtttaaaaagtgactatttatttatggtagcatatcaataatttattaatgttaaaaaatactgtgtatgacattacaaaccagaacagttcctgggggagaggattctaattgattggcagttctgagagggcaagaagaatggaactttatacttcaaaaggaggttttggttttaccaggtactgcttatgtaaatcgtttatttttatttcatcaaagcctggcaagtatatgcattccaatttaccattggcaaagctttatttatttttaaggttggatgttgaattaattttgtgggaaaatgagatttgtaagtagttttctttctagataagataacataaaccaaactttcagaagttaaggatgatgaataatattgaaatgacttgttatatattgtaagggttcccttaagtatcataattaacaatttgtggaaattgaaaaagcataaactgtgttatttgattagtaatatgttcccttaaaattcattttgaggtgtatgttatacacacagtaaatttttgttcaggaatgacttgctcattctgtgtttttaaaaataggaaataaggcatagtgagtcatcattacatcaattaaccaaaaaatatttcatcccctccgtcactgaaattatctacttcagccacctttcttattctcgtgttaggagggcacgtttatggactttttaatttccatgtgccatattgtccactaccggcagtagccaaagctagctgtttcagtcccacagaagagacagtgctctgccatgatgacagggcactgctagggctggtttttcttgtttttcccttttggcagtgtggacttcaggaactagatgtatatgcacaagggattgagtttacactaaaactaggaaatggagttttcaatctatgttcttgcctcttcatacttttatttattttttgtcatcctgccttatactgggctaacaatgagataaaataaaaatacctttgaatactcttttccctttcatgcatttaaagccatggaggaactagaccattagctgttgccgtcacatgcttagacaccagtttacttagcgtgttatgaccttcctcacccatactaccaaatttaaatgggtcccgacttcaccctctggaaggaagtaaactcttctctccccatggtttcagagcagtttttacctgcaagcaccatctctgtatgtgctcttactagattatacagttcttgagagggattgcatcttagtgtttttgtatttccacctcacccccagcacatagcccagtctcttgcacaaattaagtacttaatgtgtgttgagctaaattgaataaaggattattagcattagcatattttgtgccttggttgtataagctggttgtttgttttgttacctttgcaaatatttatgattatcacccccccacatactaaattgtttttaaaagttttgcctttccttcagatactaccccaggcaatttgctgtagataatgtgattgcttccaatgacataattatcccaaactctctgccccggatatactttgccaaacgaaatttgaattctctgaataaattggtcatgtctaaaa

SEQ ID NO: 14366 - DNA, 6133 bp, Homo sapiens
  source 1..6133: mol_type = unassigned DNA
gccgtcagggccccagggagcgcggggcgccgctgctgctgttcttcggctcggttctgtctaccgggcagcgccggggccggcggctgcggcggcagaggaacaggagccgggagccgcgttccgccgagagttgggcagaggagcgcccgcgccccggcggcgtcatgggccccctccccgcgcttcagagggcaccagccgcgggaacccccgggcctcctcgcgcccgagcctgagcgaccctcgggttctccggcgccccctccctcgccctattttttttcctactctcgctgccgttaccgcttctgctctccgttatggcaacagagccaccatcccccctccgggtcgaggcgccgggccccccagaaatgcggacctcaccggcgatcgagtccacccctgagggcaccccgcagccggcgggcggcagactccgcttcctcaacggctgcgtgcccctctcgcatcaggtggccgggcacatgtacgggaaggacaaagtgggtatactgcaacatccagatggcacagttttgaaacagttacaaccacctccaaggggcccaagagagctggaattctataatatggtttatgctgctgactgttttgatggtgttcttctagagctacgaaaatatttgccaaaatattatggcatctggtcacctcccactgcaccaaacgatttatacctaaaactggaagatgtgacccataaatttaataagccctgtataatggatgtaaagatagggcaaaaaagctatgatccttttgcctcatctgagaagattcagcaacaggtcagcaagtacccattaatggaagagattgggttcttggtgcttggcatgagggtttatcatgttcattccgatagctatgagacagaaaaccagcattacggaagaagcttaacaaaagaaactataaaggatggagtctccagattttttcataatgggtactgcttaagaaaagatgctgttgctgccagtattcagaagattgagaaaattctgcagtggtttgaaaaccagaagcagcttaatttttacgcaagttcattactctttgtttatgaaggttcatctcagccaaccactacaaaattgaatgacagaactttggcagaaaagtttttgtccaaaggacaactgtcagacacagaagtactagagtacaataataactttcatgtgttaagttccacagctaatggaaaaatagagtcttcagtgggcaaaagcttgtccaagatgtatgcgcgtcacaggaaaatatatacaaaaaagcatcacagtcagacttcattgaaagttgaaaatctggagcaagacaatgggtggaaaagcatgtcacaggaacatttaaatggaaatgtactttcccaactggaaaaagttttctaccatcttcccactggttgccaagagattgctgaagtagaagtgcgaatgatagattttgctcatgtgttccctagcaacacaatagatgagggatatgtttatgggctaaagcatttaatttctgtacttcgaagtattttagacaattgaatcctctgttgcagtctttttaaggggtgggccaatcataatgaagaggggcagtcaatatctgcacctttaatgctatgtaaaaaatttgtattatgagtcgacattttatttgtctttatacttttggaagaatggttaacttttttataatcttactcaggaaaactaactatttgttcattagaaaactatgaagaataaagaaacttaggaatgttaagcagggaatgtggtggtacatggcttaaacatcttttttggctcaagcaaaatgcaaaccattattcagtcattaagagtttagttagctttctgtagccaattcatgaaatctctgtccacccagccttgacaatgagccatatctaaaatattacattattagaacacctaccaaaatctcgaaagcacaggttgatgtccttagtattgctatgtatgaagttactaaaactggagaaaattctacttcagaaataagtactgtttaggttttatattaaaagttcagaccagcatatcaaagggtgctccttagtgaaatgatttagaattgttgcattccaaaagcaggttttctctttaatttttacatctctctctcaaaatattatacttcatgaaaaagacaattgatgtggatgacaacaacaaagtcttgaaattaagggcacactaattgtccttactggggttaggggaagagagatattattttcaaggaacaaaatattttcctttacaatctttcattcatgagaaaattggaatataaatttattacattgtgaaagtatcataaaccatatacctttgtatctaaatgcagcttcaaaaaagtaaataattgaagttttatttctcctctaaataacttgaatttttttctttaaaaatttatgtatttatatgtccccatttagttaagtggtagtgtaaatgtatgttgttaaaaacagtttctcagaattatagtaagcaatgaaagacaatatctaattaggttgttatcaaaaatactgtgtgtaaattagtccgtaatatagggtttggtgcgtatctatattcatgcttctatttcactcttcctcaaaacagttttatattatgttgaccagtgaaattgtaacttaatttcatggggacaggggcagtgctacagttcctggaaaaattagatttgtattatctttgtttcacacccaccaccttaaaaaaaaatcaactagttatttgtcatttaaaacatttaaaactttgagtcttcaaatacatttgatgttaatgctgccattacttgcacttccattcactaataacatttctaggtagttatcagttttgtcatattcctggaaaatattttggggttgtaaattctttctcctctttttcttctggagttacaaattgaatttttaaatccgagcacctttattgtggtgtggagaaaattatcacaattttatgtttattttaccttctcagccttctctgagggcactttgcaaatacctgagtccaaacagaagtaccaactaaatgctctatgaactctatccttagtaaatctattaaacctgaataatttaaaagatcatgttcattttgtaatagcaaaatttgattttaattttttatttagaattggtgtatttatcatagggacttccaatttttcttcactttttgaatggatattggctatagttttatgttttaacgggaatgaatttcaagtcataataatcagaatttttagttttacttttttcttttacaatatggattttgttgttatttggatagtggttcaataaatcttaagctcagataattaaacactattttgaatcttaacaagatactgaggctttttttgtatgggatgatatcaacctatgtacaatgaatttaataaacttaagtattgtcagattttttgcacattttagctcaataaaatcttaatgttcaagatttttttatctgcatttggaaatacaattttgtaaaatcaatgtcttacctttttgatacaatagatcatgttttgtttttaataaagcaagaagcccttttatctgttgtttttcagggaagggattaacatttaattctgtttgtttacatttgttatcattgttatccaatgctcattttatgttgctttataagtaggcttaggtataacagaataagtatctgtttatctaatctacatgtgactatcttagtctctctcggtcacttaatattatgctgaaatttaccactgtggggatgaatgatcgctattcaccaagtatatttgaacatgtaaatgcttaagaaataagcataatgcggatatagtttgggttaataggattctcatagttttttttcccctatgaaacataagtaatgattttagtgtatttcttatggaatacactcatttaaaaaggactttaagaaattgtggatgtgaataatacctttctctaataaaaatttaaattgtataatagttttataatatttacattaattgatattttaatatggatagacattgcatagattcaaataaattaaaatcaatgataaatgctaaatattttatctaaatagtttttcaagaaacagttatggaaatgtgtatattaaatggctctaatgtggagcttgtggtatttcaactcagtattcattattagttgtgtgtctggaaagattgtacttacttttcctctttacactacagtttgctcttatggggctctaaactgtttaactgaagaaccttcgtctgtattttgattgagcataatttagtattttatgatttccaagatgatgttcttatgtctatcaagtctatgtatcaaatttataacatcatttaagaaaaaggaatttccacagatacttcagttgcaattttttgtttcatgctactgaaaatacatttgtttctaggggttggaatattatagaagatgtaggatgaaagaaaacgatagaacaacgaaagaattctgtttatgaaattacaggaattgtgtccactatggtaaagcattgtcattttagtacattttctcttagtagtttggcattttatactttaaaacttgttttgctttaaaaattgtttataatgcttaccttctttctccagtgcctttagtcttgatttgatatgtttgtaccctcagttaccctttctattacatgtttttgatgttttcatagcctaggaaacatcgattcctttttaataattgtcaatctgattatttaaagaggtaacaattatctgttaatgctttggaaaaacaagtagggttgcctttggaggccaggcttcttagttcattcaaaaatattccttggatttatgccatgtattaagcatttttagcccccagtattacaactgtgaaccaaacggataaggccctaaccattttcagcattctctttggatggggtgggattggggacttaattaaaatagagatatagaaaaataggcatctaaataagataataagtgtggggttgaaatgaagcatctaacaatagttgaagttagaagtaatattttacagtattgtaacctctatttaagtttgggtattagttacagatagcataaaaaagccttaatttttcactttccttgctggcaaaggtacatttatttagactgtccatttaaagtaatgtttaacataaacattactgtgaaaaacattccattacatattcccaagcaaatgagctgcatcttctttactgtattttacaatttagtacaacagttttaggcctcaatcttaacatcactggtattttaaatttggcaatgaatatgaaattacttttgacttacagattgattatattattactttgaaaatgcattaatttcttagaaaagtttggagcctctatctttttttgagttaatacttaaattctcattacttatattaatagcctgtactaagtgaaaatattatttatgcaagtaaacaagtcactataggcttttaagacttttctttaattttagattttgtcatcaaagtttaaattttttacctactgtccacttaaatataatttaacagtttgtaaagtgaaatagttttaagtatgatgtatgatgcacctgcatataaatgaaaatggcgtgcacaaagacactttactatgggaactgtactggaagatttatgaaagcatgtgaaattgcacctaaaattgtgttattagtgactataagcagcaatgctaaatttattgtacttgatgaatgaatgtatttagtcacagttactttggtttaaatgtataaatgtctttagggtttttttttaaatgtgtttgtaatttgtactattgtgggggtatacttggactgcaggggttattgtcaatgtgtgatttgtgtttttattttatagaatcatctaatgtgatataccaatttttataagtgatatttacataattctaataactgtatatttgacaacctattaaaatgttttgcattggaa

SEQ ID NO: 14367 - DNA, 4733 bp, Homo sapiens
  source 1..4733: mol_type = unassigned DNA
tgaggccggcgctgcaggcagcggcggctgcgcggtgaacgaggcggcctgcgcggcggagtgctgagtcccgatccccggctctgtccggcccacggatcctcaagcccgggccccgggcccggccccagcctcagccctgagcgtctcggggcggatggcgcggggcggcgggggcgggcggtgctgagccctgcgcgggccatggcctcggcctgcggggcgccgggcccggggggcgccctgggcagccaggccccctcctggtaccaccgcgacctgagccgggcggccgcggaggagctgctggcccgggcgggccgcgatggcagcttcctggtccgagacagcgagagcgtggcgggggccttcgcgctctgcgtcctgtatcagaagcatgtgcacacgtatcgcattctgcctgatggagaagatttcttggctgtgcagacctcgcagggtgtgcctgtgcgccgcttccagaccctgggtgagctcatcggcctgtacgcccagcccaaccagggccttgtgtgcgccctgcttcttcctgtagagggtgagcgagagccggacccaccggatgaccgggatgcctcagatggggaggatgagaagcccccgctgcccccgcgctctggctccaccagcatttctgcccccactgggcccagcagtcccctgccagctcctgagactcccacagctccagctgctgagagtgctcccaatgggctgagcaccgtctcgcacgactacctgaaaggcagctatgggctggacctggaagctgtgaggggtggagccagccacctgccccacctcacccgtaccctcgctacctcatgccggaggctgcacagtgaggtggacaaggtcctgtcaggcctggagatcctgtccaaggtgtttgaccagcagagctcgcccatggtgacccgccttttgcagcagcagaacctgccacagacaggggagcaggaactagagagcctggtgctgaagctgtcagtgctaaaggacttcctgtcaggcatccagaagaaggccctgaaggccctacaggacatgagctccacagcacccccagctccgcagccatccacacgtaaggccaagaccatccccgtgcaggcctttgaggtgaagctagatgtgaccctgggtgacctgaccaagattgggaagtcacagaagttcacgctgagcgtggatgtggagggtgggcggctggtgctgctgcggagacagcgggactcccaggaggactggaccaccttcacgcacgaccgcatccgccagctcattaagtcccagcgtgtccagaacaagctgggtgttgtgtttgagaaggagaaggaccggactcagcgcaaggacttcatctttgtcagtgcccggaagcgggaggccttctgccagctgttgcagctcatgaagaacaagcactccaagcaggacgagcccgacatgatctcagtcttcataggcacctggaacatgggaagtgtaccacctccaaaaaacgtgacatcctggttcacatcgaagggtctggggaagaccctggacgaggtcacagtgaccataccccatgacatctatgtctttgggacccaggagaactcagtgggcgaccgcgagtggctggacctactgcgcgggggcctcaaggagcttacggatctggattaccgcccgattgccatgcaatcactgtggaatatcaaggtggcagtgctggtcaagccagagcacgagaaccgtatcagccatgtcagtacgtccagtgtgaagactggcatcgccaacaccctggggaacaagggggctgtgggcgtctccttcatgtttaatggcacctcatttggctttgtgaattgtcacctcacctcgggaaatgagaagacggctcggaggaaccaaaactacttggacatcctgcggctgctctcgctgggcgaccggcagctcaatgcctttgacatctctctgcgtttcacacacctcttctggtttggggacctcaactaccgcctggacatggatatccaggagatcctgaactacatcagcaggaaagagtttgagcccctcctcagggtggaccagctcaacctggagcgggagaagcacaaggtcttccttcgattcagtgaggaggagatctccttcccacccacctaccgctatgagcggggttcccgggacacatatgcctggcacaagcagaagccaactggggtccggaccaatgtgccctcatggtgtgaccggattctgtggaaatcctaccctgaaactcacatcatctgcaattcttatggttgcactgatgacatcgtcaccagcgaccattcccccgtgtttgggacatttgaggttggagttacctcccagttcatctccaagaaagggctctcaaagacttcagaccaggcctacattgagtttgagagcatcgaggccattgtgaagacagccagccgcaccaagttcttcatcgagttctactctacctgcctggaggaatacaagaagagctttgagaatgatgcccagagcagtgacaacatcaacttcctcaaagtgcagtggtcttcacgccagctgcccacgctcaaaccaattctggctgatatcgagtacctgcaggaccagcacctcctgctcacagtcaagtccatggatggctatgaatcctatggggagtgtgtggttgcactcaaatccatgatcggcagcacggcccaacagttcctgaccttcctatcccaccgtggcgaggagacaggcaatatcagaggctccatgaaggtgcgggtgcccacggagcgcctgggcacccgtgagcggctctacgagtggatcagcattgataaggatgaggcaggagcaaagagcaaagccccctctgtgtcccgagggagccaggagcccaggtcagggagccgcaagccagccttcacagaggcctcctgcccgctctccaggttatttgaagaaccagagaaaccgccaccaacggggaggcccccagccccaccccgagcagctccccgggaggagcccttgacccccaggttgaagccagagggagctcctgaaccagaaggggtggcggcccccccacccaagaacagcttcaataaccctgcctactacgtccttgaaggggtcccgcaccagctgctgcccccggagccaccctcgcctgccagggcccctgtcccatctgccaccaagaacaaagtggccattacagtgcctgctccacagcttgggcaccaccggcaccctcgtgtgggagaggggagttcttcagatgaggagtctggaggcacactgccccctccagactttccacctccaccactgccggactcagccatcttcctgccccccagcctggatcctttaccagggccagtggtccggggccgtggtggggctgaggcccgtggcccaccacctcccaaggcccatccaaggcctccactgcccccaggcccctcaccagccagcactttcctgggggaagtggccagtggggatgaccggtcctgctcggtgctgcagatggccaagacgctgagcgaggtggactatgcccctgctgggcctgcacgctcagcgctcctcccaggccccctggagctgcagcccccccggggactgccctcggactatggccggcccctcagcttccctccaccccgcatccgggagagcatccaggaagacctggcagaggaggctccgtgcctgcagggcgggcgggccagcgggctgggcgaggcaggcatgagtgcctggctgcgggccatcggcttggagcgctatgaggagggcctggtgcataatggctgggacgacctggagtttctcagtgacatcaccgaggaggacttggaggaggctggggtgcaggacccggctcacaagcgcctccttctggacaccctgcagctcagcaagtgatagcggaggcaccacgaagctgtgaactcagagcccctccctgctaccaaggcccagctatggccccagggttgaaaagttatgagggtcagggcagtatctctctgcctatttattggggtgcctatttattggggatctgcattccccgctgcccaatcatttgcaatgccctaattagggcatcctgcccctcgccttttaggctcaggacggaaggtcagttgccatggttaccgaggaccctggttactctggtgctgtcctgttttactggaccccgcctcccagccccaggggtgcctgtgggggtccatttgggtacgtctgggcccccactttcaccagtttctgcggccttccaccgggcctgaaccacagcggaggagctccgctaagacctccccacccccgctgggggtgggggcgggtgtccgtccggaaatgaaggaatagcccgaggaccgggctggggtttatttaaactgttctgtgtgggtctggggagggagagcaccttaatattattggggttggttggggtggggcaggatctcagccataaagtgccagtttgcttagttctcactgtctcctggtctgtgctgccctgctctggggatgcacggcggcagggtgggggagggaggttcctcgcaggtctcagcccgggacagggtcttgcaagcagcctcctgggcagtcgtaagggttgcggcgtgatgtcttcaataaattaagttttatttgga

SEQ ID NO: 14368 - DNA, 550 bp, Homo sapiens
  source 1..550: mol_type = unassigned DNA
tgagacccccatcccatccactgaacaggagaccctttctcctctgagaactatttccctaccaaaggtggggaggccttctaagaccccaccagggacccccaccccacctcagcccagaggcagataacctgatccatcccgccctggttgccacaggtactatctcctctagggatggggcagaggtgctgggacaggtcagcaggacctccactgacttcttaacccctccccaaagtgctcccaatgggctgagcaccgtctcgcacgactacctgaaaggcagctatgggctggacctggaagctgtgaggggtggagccagccacctgccccacctcacccgtaccctcgctacctcatgccggaggctgcacagtgaggtggacaaggtcctgtcaggcctggagatcctgtccaaggtgtttgaccagcagagctcgcccatggtgacccgccttttgcagcagcagaacctgccacagacaggggagcaggaactagagagcctggtgctgaagctgtcagtgctaaaggacttcctgtc

SEQ ID NO: 14369 - DNA, 4656 bp, Homo sapiens
  source 1..4656: mol_type = unassigned DNA
tttagacagctgtggaggccacaaaagagctccctgttgcttctcaggccctgccctgtggtgggtgtggagtctgtgtaggtctggtggggagacgggggtgttctggtcattcctgcccaataggcaacaccaggagggtggaagtggaccggccacatcattaaccctgtgcagcctgggcaggtggttttagggaaaccaagctgagggggttggggtgctgagcttgctggcaggaggaaggggtgctttgggtcttagaccccagcctgggggtgacagattctggccctgccttggcatcaggtatcagaagcatgtgcacacgtatcgcattctgcctgatggagaagatttcttggctgtgcagacctcgcagggtgtgcctgtgcgccgcttccagaccctgggtgagctcatcggcctgtacgcccagcccaaccagggccttgtgtgcgccctgcttcttcctgtagagggtgagcgagagccggacccaccggatgaccgggatgcctcagatggggaggatgagaagcccccgctgcccccgcgctctggctccaccagcatttctgcccccactgggcccagcagtcccctgccagctcctgagactcccacagctccagctgctgagagtgctcccaatgggctgagcaccgtctcgcacgactacctgaaaggcagctatgggctggacctggaagctgtgaggggtggagccagccacctgccccacctcacccgtaccctcgctacctcatgccggaggctgcacagtgaggtggacaaggtcctgtcaggcctggagatcctgtccaaggtgtttgaccagcagagctcgcccatggtgacccgccttttgcagcagcagaacctgccacagacaggggagcaggaactagagagcctggtgctgaagctgtcagtgctaaaggacttcctgtcaggcatccagaagaaggccctgaaggccctacaggacatgagctccacagcacccccagctccgcagccatccacacgtaaggccaagaccatccccgtgcaggcctttgaggtgaagctagatgtgaccctgggtgacctgaccaagattgggaagtcacagaagttcacgctgagcgtggatgtggagggtgggcggctggtgctgctgcggagacagcgggactcccaggaggactggaccaccttcacgcacgaccgcatccgccagctcattaagtcccagcgtgtccagaacaagctgggtgttgtgtttgagaaggagaaggaccggactcagcgcaaggacttcatctttgtcagtgcccggaagcgggaggccttctgccagctgttgcagctcatgaagaacaagcactccaagcaggacgagcccgacatgatctcagtcttcataggcacctggaacatgggaagtgtaccacctccaaaaaacgtgacatcctggttcacatcgaagggtctggggaagaccctggacgaggtcacagtgaccataccccatgacatctatgtctttgggacccaggagaactcagtgggcgaccgcgagtggctggacctactgcgcgggggcctcaaggagcttacggatctggattaccgcccgattgccatgcaatcactgtggaatatcaaggtggcagtgctggtcaagccagagcacgagaaccgtatcagccatgtcagtacgtccagtgtgaagactggcatcgccaacaccctggggaacaagggggctgtgggcgtctccttcatgtttaatggcacctcatttggctttgtgaattgtcacctcacctcgggaaatgagaagacggctcggaggaaccaaaactacttggacatcctgcggctgctctcgctgggcgaccggcagctcaatgcctttgacatctctctgcgtttcacacacctcttctggtttggggacctcaactaccgcctggacatggatatccaggagatcctgaactacatcagcaggaaagagtttgagcccctcctcagggtggaccagctcaacctggagcgggagaagcacaaggtcttccttcgattcagtgaggaggagatctccttcccacccacctaccgctatgagcggggttcccgggacacatatgcctggcacaagcagaagccaactggggtccggaccaatgtgccctcatggtgtgaccggattctgtggaaatcctaccctgaaactcacatcatctgcaattcttatggttgcactgatgacatcgtcaccagcgaccattcccccgtgtttgggacatttgaggttggagttacctcccagttcatctccaagaaagggctctcaaagacttcagaccaggcctacattgagtttgagagcatcgaggccattgtgaagacagccagccgcaccaagttcttcatcgagttctactctacctgcctggaggaatacaagaagagctttgagaatgatgcccagagcagtgacaacatcaacttcctcaaagtgcagtggtcttcacgccagctgcccacgctcaaaccaattctggctgatatcgagtacctgcaggaccagcacctcctgctcacagtcaagtccatggatggctatgaatcctatggggagtgtgtggttgcactcaaatccatgatcggcagcacggcccaacagttcctgaccttcctatcccaccgtggcgaggagacaggcaatatcagaggctccatgaaggtgcgggtgcccacggagcgcctgggcacccgtgagcggctctacgagtggatcagcattgataaggatgaggcaggagcaaagagcaaagccccctctgtgtcccgagggagccaggagcccaggtcagggagccgcaagccagccttcacagaggcctcctgcccgctctccaggttatttgaagaaccagagaaaccgccaccaacggggaggcccccagccccaccccgagcagctccccgggaggagcccttgacccccaggttgaagccagagggagctcctgaaccagaaggggtggcggcccccccacccaagaacagcttcaataaccctgcctactacgtccttgaaggggtcccgcaccagctgctgcccccggagccaccctcgcctgccagggcccctgtcccatctgccaccaagaacaaagtggccattacagtgcctgctccacagcttgggcaccaccggcaccctcgtgtgggagaggggagttcttcagatgaggagtctggaggcacactgccccctccagactttccacctccaccactgccggactcagccatcttcctgccccccagcctggatcctttaccagggccagtggtccggggccgtggtggggctgaggcccgtggcccaccacctcccaaggcccatccaaggcctccactgcccccaggcccctcaccagccagcactttcctgggggaagtggccagtggggatgaccggtcctgctcggtgctgcagatggccaagacgctgagcgaggtggactatgcccctgctgggcctgcacgctcagcgctcctcccaggccccctggagctgcagcccccccggggactgccctcggactatggccggcccctcagcttccctccaccccgcatccgggagagcatccaggaagacctggcagaggaggctccgtgcctgcagggcgggcgggccagcgggctgggcgaggcaggcatgagtgcctggctgcgggccatcggcttggagcgctatgaggagggcctggtgcataatggctgggacgacctggagtttctcagtgacatcaccgaggaggacttggaggaggctggggtgcaggacccggctcacaagcgcctccttctggacaccctgcagctcagcaagtgatagcggaggcaccacgaagctgtgaactcagagcccctccctgctaccaaggcccagctatggccccagggttgaaaagttatgagggtcagggcagtatctctctgcctatttattggggtgcctatttattggggatctgcattccccgctgcccaatcatttgcaatgccctaattagggcatcctgcccctcgccttttaggctcaggacggaaggtcagttgccatggttaccgaggaccctggttactctggtgctgtcctgttttactggaccccgcctcccagccccaggggtgcctgtgggggtccatttgggtacgtctgggcccccactttcaccagtttctgcggccttccaccgggcctgaaccacagcggaggagctccgctaagacctccccacccccgctgggggtgggggcgggtgtccgtccggaaatgaaggaatagcccgaggaccgggctggggtttatttaaactgttctgtgtgggtctggggagggagagcaccttaatattattggggttggttggggtggggcaggatctcagccataaagtgccagtttgcttagttctcactgtctcctggtctgtgctgccctgctctggggatgcacggcggcagggtgggggagggaggttcctcgcaggtctcagcccgggacagggtcttgcaagcagcctcctgggcagtcgtaagggttgcggcgtgatgtcttcaataaattaagttttatttgga

SEQ ID NO: 14370 - DNA, 375 bp, Homo sapiens
  source 1..375: mol_type = unassigned DNA
atccccattttccagagcgggaagccgacgctcaaccccgcgccgcgacttgcccgaggtcacccagtgggccagcggctccgggaccgaggcgcggggcgggttgaggccggcgctgcaggcagcggcggctgcgcggtgaacgaggcggcctgcgcggcggagtgctgagtcccgatccccggctctgtccggcccacggatcctcaagcccgggccccgggcccggccccagcctcagccctgagcgtctcggggcggatggcgcggggcggcgggggcgggcggtgctgagccctgcgcgggccatggcctcggcctgcggggcgccgggcccggggggcgccctgggcagccaggccccctcctggtacc

SEQ ID NO: 14371 - DNA, 4733 bp, Homo sapiens; identical to SEQ ID NO: 14367
  source 1..4733: mol_type = unassigned DNA

SEQ ID NO: 14372 - DNA, 275 bp, Homo sapiens
  source 1..275: mol_type = unassigned DNA
ccggagcagcccgggagttgaggccggcgctgcaggcagcggcggctgcgcggtgaacgaggcggcctgcgcggcggagtgctgagtcccgatccccggctctgtccggcccacggatcctcaagcccgggccccgggcccggccccagcctcagccctgagcgtctcggggcggatggcgcggggcggcgggggcgggcggtgctgagccctgcgcgggccatggcctcggcctgcggggcgccgggcccggggggcgccctgggcagccaggc

SEQ ID NO: 14373 - DNA, 591 bp, Homo sapiens
  source 1..591: mol_type = unassigned DNA
ctggagcccagggccgctgtccggggaagggggcgccggagcagcccgggagttgaggccggcgctgcaggcagcggcggctgcgcggtgaacgaggcggcctgcgcgcagagctcgcccatggtgacccgccttttgcagcagcagaacctgccacagacaggggagcaggaactagagagcctggtgctgaagctgtcagtgctaaaggacttcctgtcaggcatccagaagaaggccctgaaggccctacaggacatgagctccacagcacccccagctccgcagccatccacacgtaaggccaagaccatccccgtgcaggcctttgaggtgaagctagatgtgaccctgggtgacctgaccaagattgggaagtcacagaagttcacgctgagcgtggatgtggagggtgggcggctggtgctgctgcggagacagcgggactcccaggaggactggaccaccttcacgcacgaccgcatccgccagctcattaagtcccagcgtgtccagaacaagctgggtgttgtgtttgagaaggagaaggaccggactcagcgcaaggacttcatctttgtcagtgcccgg

SEQ ID NO: 14374 - DNA, 1919 bp, Homo sapiens
  source 1..1919: mol_type = unassigned DNA
ctctgaatcatcgcgctccacttgtgacgtcgcggacgcccggctcgggcaggcgtggggggcccgcgcgtcccgggagccccgaggcggcagcgcgcgtttccacgccgcggtcccgcgggaaagccgggggcggcggcctggctgaggccaagctcggatccggtgccgagccaagcggggccgtgcgtcgccggggcttcgccttcgctcgcgtgacctccgccgtcctccccaaccctcgtcctctggccgcgcctgcggccgcacgcccagcgcccctcgcctaacctcgcgcccgggccgcgcctcctcctcctcctgctccccgccgcttccgtttctcgagggaaaggctgctgcctcctgctctgtcctcatccccggcttagctgacggcccagagggtgggtgccaattccaccagcagctgcaactgaaaagcaaggttcagaaatgtcagatatcctccgggagctgctctgtgtctctgagaaggctgctaacattgcccgggcgtgcagacagcaggaagccctcttccagctgctgatcgaagaaaagaaagagggagaaaagaacaagaagtttgcagttgacttcaagacgctggctgatgtactggtacaggaagttataaaacagaatatggagaacaagtttccaggcttggaaaaaaatatttttggagaagaatccaatgagtttactaatgactggggggaaaagattaccttgaggttgtgttcaacagaggaggaaacagcagagcttcttagcaaagtcctcaatggtaacaaggtggcatctgaagcattagccagggttgttcatcaggatgttgcctttactgacccaactctggattccacagagatcaatgttccacaggacattttgggaatttgggtggaccccatagattcaacttatcagtatataaaaggttctgctgacattaaatccaaccagggaatcttcccctgtggacttcagtgtgtcaccattttaattggtgtctatgacatacagacaggggttcccctgatgggagtcatcaatcaaccttttgtgtcacgagatccaaacaccctcaggtggaaaggacagtgctattggggcctttcttacatggggaccaacatgcattcactacagctcaccatctctagaagaaacggcagtgaaacacacactggaaacaccggctctgaggcagcattctcccccagtttttcagccgtaattagtacaagtgaaaaggagactatcaaagctgcattgtcacgtgtgtgtggagatcgcatatttggggcagctggggctggttataagagcctatgtgttgtccaaggcctcgttgacatttacatcttttcagaagataccacattcaaatgggactcttgtgctgctcatgccatactgagggccatgggtgggggaatagtagacttgaaagaatgcttagaaagaaatccagaaacagggcttgatttgccacagttggtgtaccacgtggaaaatgagggtgctgctggggtggatcggtgggccaacaagggaggactcattgcatacagatccaggaagcggctggagacattcctgagcctcctggtccaaaacctggcacctgcagagacgcatacctagaggaactctaaccccggtgtacctgtataaactgaactgtgaaactgtttcggttatctctgtcttttgaggatggctttgtcctgttgctggttaacattcaccttcctcttttgaggagtatttttccattatgtattcataataatgttaatttcaataaatgacattcatgcagcaattatattggtgtatgaaattcttacagtgaatattgtgctgttagtgctgcttgaaacatttcaataaaatattgaccagga

SEQ ID NO: 14375 - DNA, 2162 bp, Homo sapiens
  source 1..2162: mol_type = unassigned DNA
gaatggaggaggaagatttaaaagtgaattcgtgggcggcgacaaggaaacagcagccgtggccaagctgaccccagagcccttcccttcctggccctccctctgaatcatcgcgctccacttgtgacgtcgcggacgcccggctcgggcaggcgtggggggcccgcgcgtcccgggagccccgaggcggcagcgcgcgtttccacgccgcggtcccgcgggaaagccgggggcggcggcctggctgaggccaagctcggatccggtgccgagccaagcggggccgtgcgtcgccggggcttcgccttcgctcgcgtgacctccgccgtcctccccaaccctcgtcctctggccgcgcctgcggccgcacgcccagcgcccctcgcctaacctcgcgcccgggccgcgcctcctcctcctcctgctccccgccgcttccgtttctcgagggaaaggctgctgcctcctgctctgtcctcatccccggcttagtccttcagagcttacatcatgtggccgagtttatatacctgattggcaaaacagagcctaagaaccagctctcctgtatcccaagcaaggctctttctaccgcacaccctgcaggcccatccaggcccatccagacaataaacactgacggcccagagggtgggtgccaattccaccagcagctgcaactgaaaagcaaggttcagaaatgtcagatatcctccgggagctgctctgtgtctctgagaaggctgctaacattgcccgggcgtgcagacagcaggaagccctcttccagctgctgatcgaagaaaagaaagagggagaaaagaacaagaagtttgcagttgacttcaagacgctggctgatgtactggtacaggaagttataaaacagaatatggagaacaagtttccaggcttggaaaaaaatatttttggagaagaatccaatgagtttactaatgactggggggaaaagattaccttgaggttgtgttcaacagaggaggaaacagcagagcttcttagcaaagtcctcaatggtaacaaggtggcatctgaagcattagccagggttgttcatcaggatgttgcctttactgacccaactctggattccacagagatcaatgttccacaggacattttgggaatttgggtggaccccatagattcaacttatcagtatataaaaggttctgctgacattaaatccaaccagggaatcttcccctgtggacttcagtgtgtcaccattttaattggtgtctatgacatacagacaggggttcccctgatgggagtcatcaatcaaccttttgtgtcacgagatccaaacaccctcaggtggaaaggacagtgctattggggcctttcttacatggggaccaacatgcattcactacagctcaccatctctagaagaaacggcagtgaaacacacactggaaacaccggctctgaggcagcattctcccccagtttttcagccgtaattagtacaagtgaaaaggagactatcaaagctgcattgtcacgtgtgtgtggagatcgcatatttggggcagctggggctggttataagagcctatgtgttgtccaaggcctcgttgacatttacatcttttcagaagataccacattcaaatgggactcttgtgctgctcatgccatactgagggccatgggtgggggaatagtagacttgaaagaatgcttagaaagaaatccagaaacagggcttgatttgccacagttggtgtaccacgtggaaaatgagggtgctgctggggtggatcggtgggccaacaagggaggactcattgcatacagatccaggaagcggctggagacattcctgagcctcctggtccaaaacctggcacctgcagagacgcatacctagaggaactctaaccccggtgtacctgtataaactgaactgtgaaactgtttcggttatctctgtcttttgaggatggctttgtcctgttgctggttaacattcaccttcctcttttgaggagtatttttccattatgtattcataataatgttaatttcaataaatgacattcatgcagcaattatattggtgtatgaaattcttacagtgaatattgtgctgttagtgctgcttgaaacatttcaataaaatattgaccagg

SEQ ID NO: 14376 - DNA, 631 bp, Homo sapiens
  source 1..631: mol_type = unassigned DNA
agattactgcagcatttgtgctgaaactcaccagggttaaattgatgagctttctgcgtgaaagaagggagtggtggtgatttccggagcttgtagccaggctgacggcccagagggtgggtgccaattccaccagcagctgcaactgaaaagcaaggttcagaaatgtcagatatcctccgggagctgctctgtgtctctgagaaggctgctaacattgcccgggcgtgcagacagcaggaagccctcttccagctgctgatcgaagaaaagaaagagggagaaaagaacaagaagtttgcagttgacttcaagacgctggctgatgtactggtacaggaagttataaaacagaatatggagaacaagtttccaggcttggaaaaaaatatttttggagaagaatccaatgagtttactaatgactggggggaaaagattaccttgaggttgtgttcaacagaggaggaaacagcagagcttcttagcaaagtcctcaatggtaacaaggtggcatctgaagcattagccagggttgttcatcaggatgttgcctttactgacccaactctggattccacagagatcaatgttccacaggacattttgggaatttgggtggaccccatag

SEQ ID NO: 14377 - DNA, 613 bp, Homo sapiens
  source 1..613: mol_type = unassigned DNA
gcgcctcctcctcctcctgctccccgccgcttccgtttctcgagggaaaggctgctgcctcctgctctgtcctcatccccggcttagtccttcagagcttacatcatgtggccgagtttatatacctgattggcaaaacagagcctaagaaccagctctcctgtatcccaagcaaggctctttctaccgcacaccctgcaggcccatccaggcccatccagacaataaacaggtgaaagaaagcactacttcaatattgctgctaagcatatgatcattctaagctgacggcccagagggtgggtgccaattccaccagcagctgcaactgaaaagcaaggttcagaaatgtcagatatcctccgggagctgctctgtgtctctgagaaggctgctaacattgcccgggcgtgcagacagcaggaagccctcttccagctgctgatcgaagaaaagaaagagggagaaaagaacaagaagtttgcagttgacttcaagacgctggctgatgtactggtacaggaagttataaaacagaatatggagaacaagtttccaggcttggaaaaaaatatttttggagaagaatccaatgagtttactaatgactggg

SEQ ID NO: 14378 - DNA, 840 bp, Homo sapiens
  source 1..840: mol_type = unassigned DNA
gtgagtcgatggcgccgggagggttcctcgcctctgcgcgccggcctgcgaggtccctgccccggcagcgaggccgcccccggccgggcccggccaggcatgcccggcatcgccgctgcagccagcgcggaggggagctcctgacggcccagagggtgggtgccaattccaccagcagctgcaactgaaaagcaaggttcagaaatgtcagatatcctccgggagctgctctgtgtctctgagaaggctgctaacattgcccgggcgtgcagacagcaggaagccctcttccagctgctgatcgaagaaaagaaagagggagaaaagaacaagaagtttgcagttgacttcaagacgctggctgatgtactggtacaggaagttataaaacagaatatggagaacaagtttccaggcttggaaaaaaatatttttggagaagaatccaatgagtttactaatgactggggggaaaagattaccttgaggttgtgttcaacagaggaggaaacagcagagcttcttagcaaagtcctcaatggtaacaaggtggcatctgaagcattagccagggttgttcatcaggatgttgcctttactgacccaactctggattccacagagatcaatgttccacaggacattttgggaatttgggtggaccccatagattcaacttatcagtatataaaaggttctgctgacattaaatccaaccagggaatcttcccctgtggacttcagtgtgtcaccattttaattggtgtctatgacatacagacaggggttcccctgatgggagtcatcaatcaaccttttgtgtcacgagatccaaacacc

SEQ ID NO: 14379 - DNA, 552 bp, Homo sapiens
  source 1..552: mol_type = unassigned DNA
agccccgaggcggcagcgcgcgtttccacgccgcggtcccgcgggaaagccgggggcggcggcctggctgaggccaagctcggatccggtgccgagccaagcggggccgtgcgtcgccggggcttcgccttcgctcgcgtgacctccgccgtcctccccaaccctcgtcctctggccgcgcctgcggccgcacgcccagcgcccctcgcctaacctcgcgcccgggccgcgcctcctcctcctcctgctccccgccgcttccgtttctcgagggaaaggctgctgcctcctgctctgtcctcatccccggcttagtccttcagagcttacatcatgtggccgagtttatatacctgattggcaaaacagagcctaagaaccagctctcctgtatcccaagcaaggctctttctaccgcacaccctgcaggcccatccaggcccatccagacaataaacactgacggcccagagggtgggtgccaattccaccagcagctgcaactgaaaagcaaggttcagaaatgtcagatatcctccgggagctgctctg

SEQ ID NO: 14380 - DNA, 812 bp, Homo sapiens
  source 1..812: mol_type = unassigned DNA
cgtttctcgagggaaaggctgctgcctcctgctctgtcctcatccccggcttagggtgaaagaaagcactacttcaatattgctgctaagcatatgatcattctaagctgacggcccagagggtgggtgccaattccaccagcagctgcaactgaaaagcaaggttcagaaatgtcagatatcctccgggagctgctctgtgtctctgagaaggctgctaacattgcccgggcgtgcagacagcaggaagccctcttccagctgctgatcgaagaaaagaaagagggagaaaagaacaagaagtttgcagttgacttcaagacgctggctgatgtactggtacaggaagttataaaacagaatatggagaacaagtttccaggcttggaaaaaaatatttttggagaagaatccaatgagtttactaatgactggggggaaaagattaccttgaggttgtgttcaacagaggaggaaacagcagagcttcttagcaaagtcctcaatggtaacaaggtggcatctgaagcattagccagggttgttcatcaggatgttgcctttactgacccaactctggattccacagagatcaatgttccacaggacattttgggaatttgggtggaccccatagattcaacttatcagtatataaaaggttctgctgacattaaatccaaccagggaatcttcccctgtggacttcagtgtgtcaccattttaattggtgtctatgacatacagacaggggttcccctgatgggagtcatcaatcaaccttttgtgtcacgagatccaaacaccctcag

SEQ ID NO: 14381 - DNA, 797 bp, Homo sapiens
  source 1..797: mol_type = unassigned DNA
gggaaaggctgctgcctcctgctctgtcctcatccccggcttaggtaacacgttttcctccttacgacacccaccacagggtccccgcgccgctgcccctcctccttggatctggggcccgggctggtgagcggcgcgcgccgtcgcctctccgcgggtagctgacggcccagagggtgggtgccaattccaccagcagctgcaactgaaaagcaaggttcagaaatgtcagatatcctccgggagctgctctgtgtctctgagaaggctgctaacattgcccgggcgtgcagacagcaggaagccctcttccagctgctgatcgaagaaaagaaagagggagaaaagaacaagaagtttgcagttgacttcaagacgctggctgatgtactggtacaggaagttataaaacagaatatggagaacaagtttccaggcttggaaaaaaatatttttggagaagaatccaatgagtttactaatgactggggggaaaagattaccttgaggttgtgttcaacagaggaggaaacagcagagcttcttagcaaagtcctcaatggtaacaaggtggcatctgaagcattagccagggttgttcatcaggatgttgcctttactgacccaactctggattccacagagatcaatgttccacaggacattttgggaatttgggtggaccccatagattcaacttatcagtatataaaaggttctgctgacattaaatccaaccagggaatcttcccctgtggacttcagtgtgtcaccattttaattggtgtctatgacat

SEQ ID NO: 14382 - DNA, 425 bp, Homo sapiens
  source 1..425: mol_type = unassigned DNA
gggcccggccaggcatgcccggcatcgccgctgcagccagcgcggaggggagctcaaattgcttaaaagataattatgttatataaagtgatcaatgaaaacaaacgtcatcttcattttttaaagtccttcagagcttacatcatgtggccgagtttatatacctgattggcaaaacagagcctaagaaccagctctcctgtatcccaagcaaggctctttctaccgcacaccctgcaggcccatccaggcccatccagacaataaacactgacggcccagagggtgggtgccaattccaccagcagctgcaactgaaaagcaaggttcagaaatgtcagatatcctccgggagctgctctgtgtctctgagaaggctgctaacattgcccgggcgtgcagacagcaggaagccctcttccagc

SEQ ID NO: 14383 - DNA, 541 bp, Homo sapiens
  source 1..541: mol_type = unassigned DNA
gctgaaactcaccagggttaaattgatgagctttctgcgtgaaagaagggagtggtggtgatttccggagcttgtagccagggtgattagctcgcctgagtgttattagggtgttataaggagtgtttcttggttattcaacagtgtagttagtatcgtttcttttaagaaaaaaaattgattttaacacttgaataaaagaaacactgctgatattgtttatcttgaaagctttcaaatcggactccttgagatcttcacgctactgttaagctgacggcccagagggtgggtgccaattccaccagcagctgcaactgaaaagcaaggttcagaaatgtcagatatcctccgggagctgctctgtgtctctgagaaggctgctaacattgcccgggcgtgcagacagcaggaagccctcttccagctgctgatcgaagaaaagaaagagggagaaaagaacaagaagtttgcagttgacttcaagacgctggctgatgtactggtacaggaagttataaaacagaatatggagaacaag

SEQ ID NO: 14384 - DNA, 626 bp, Homo sapiens
  source 1..626: mol_type = unassigned DNA
tgtcctcatccccggcttaggtaacacgttttcctccttacgacacccaccacagggtccccgcgccgctgcccctcctccttggatctggggcccgggctggtgagcggcgcgcgccgtcgcctctccgcggctgacggcccagagggtgggtgccaattccaccagcagctgcaactgaaaagcaaggttcagaaatgtcagatatcctccgggagctgctctgtgtctctgagaaggctgctaacattgcccgggcgtgcagacagcaggaagccctcttccagctgctgatcgaagaaaagaaagagggagaaaagaacaagaagtttgcagttgacttcaagacgctggctgatgtactggtacaggaagttataaaacagaatatggagaacaagtttccaggcttggaaaaaaatatttttggagaagaatccaatgagtttactaatgactggggggaaaagattaccttgaggttgtgttcaacagaggaggaaacagcagagcttcttagcaaagtcctcaatggtaacaaggtggcatctgaagcattagccagggttgttcatcaggatgttgcctttactgacccaactctggattccacagagatcaatgtt

SEQ ID NO: 14385 - DNA, 2040 bp, Homo sapiens
  source 1..2040: mol_type = unassigned DNA
aaagccgggggcggcggcctggctgaggccaagctcggatccggtgccgagccaagcggggccgtgcgtcgccggggcttcgccttcgctcgcgtgacctccgccgtcctccccaaccctcgtcctctggccgcgcctgcggccgcacgcccagcgcccctcgcctaacctcgcgcccgggccgcgcctcctcctcctcctgctccccgccgcttccgtttctcgagggaaaggctgctgcctcctgctctgtcctcatccccggcttaggtcacactctgtcatccaggctggagtacagtggtgtgatcatggcttatgcagtctccacctctcaggctcaaggaatcctcccaccccagcctcccgagtgtctgggactacaggcacgtgccaccatcccagctaatttttaaaattgtagagatggggtcccactatgttgcccagtccttcagagcttacatcatgtggccgagtttatatacctgattggcaaaacagagcctaagaaccagctctcctgtatcccaagcaaggctctttctaccgcacaccctgcaggcccatccaggcccatccagacaataaacactgacggcccagagggtgggtgccaattccaccagcagctgcaactgaaaagcaaggttcagaaatgtcagatatcctccgggagctgctctgtgtctctgagaaggctgctaacattgcccgggcgtgcagacagcaggaagccctcttccagctgctgatcgaagaaaagaaagagggagaaaagaacaagaagtttgcagttgacttcaagacgctggctgatgtactggtacaggaagttataaaacagaatatggagaacaagtttccaggcttggaaaaaaatatttttggagaagaatccaatgagtttactaatgactggggggaaaagattaccttgaggttgtgttcaacagaggaggaaacagcagagcttcttagcaaagtcctcaatggtaacaaggtggcatctgaagcattagccagggttgttcatcaggatgttgcctttactgacccaactctggattccacagagatcaatgttccacaggacattttgggaatttgggtggaccccatagattcaacttatcagtatataaaaggttctgctgacattaaatccaaccagggaatcttcccctgtggacttcagtgtgtcaccattttaattggtgtctatgacatacagacaggggttcccctgatgggagtcatcaatcaaccttttgtgtcacgagatccaaacaccctcaggtggaaaggacagtgctattggggcctttcttacatggggaccaacatgcattcactacagctcaccatctctagaagaaacggcagtgaaacacacactggaaacaccggctctgaggcagcattctcccccagtttttcagccgtaattagtacaagtgaaaaggagactatcaaagctgcattgtcacgtgtgtgtggagatcgcatatttggggcagctggggctggttataagagcctatgtgttgtccaaggcctcgttgacatttacatcttttcagaagataccacattcaaatgggactcttgtgctgctcatgccatactgagggccatgggtgggggaatagtagacttgaaagaatgcttagaaagaaatccagaaacagggcttgatttgccacagttggtgtaccacgtggaaaatgagggtgctgctggggtggatcggtgggccaacaagggaggactcattgcatacagatccaggaagcggctggagacattcctgagcctcctggtccaaaacctggcacctgcagagacgcatacctagaggaactctaaccccggtgtacctgtataaactgaactgtgaaactgtttcggttatctctgtcttttgaggatggctttgtcctgttgctggttaacattcaccttcctcttttgaggagtatttttccattatgtattcataataatgttaatttcaataaatgacattcatgcagcaat

SEQ ID NO: 14386 - DNA, 6752 bp, Homo sapiens
  source 1..6752: mol_type = unassigned DNA
gtctagagcggcggcggctggctagggctgcggcgcgcgtggagggttcgctgctggtttgccgccgggtcgggctccgtgggccggggcaggaggaccagcacctgaggccgggcccgcagcccgcgacttcacagccaggcggcggcgctgctgctgctgcggggctctggcgcgcagcccggcgggacagcggggcggctggcgccgggggccggggagcgccagatgatggatttggacatgcttctatgaagaaatgccacatggtccgagagcaaacatgtccaggctactgccactttagtggactagggctcggtgccagcacttcccgggtaatcaggcgtggtctgaccgaggatcaagaagcacatcatcaccaatgacatcatgacagcaagagagcacagccctcgccatggtgccagggcccgtgcaatgcagcgggcttccaccatcgacgtggcggccgacatgctgggcctctctctggcaggaaatatacaagacccagatgagcccattttagaatttagcttagcttgcagtgagctgcatactccatcgctagatcgaaagccaaatagttttgttgcggtgagtgtcaccacccctcctcaggcattctggacgaagcatgcacagacggagatcattgagggaaccaacaatcctatatttctaagcagtattgccttctttcaagactctcttatcaatcagatgacacaagtcaaactctccgtgtatgatgtcaaagatagatctcagggaacaatgtatttactgggctctggaacgttcattgtcaaagatctgctccaggacaggcatcataggttgcatttaacactaaggtctgcagagagtgaccgtgtaggtaacatcaccgtgattggctggcagatggaggagaagtcagaccaacggccccctgtgacccggtctgtggacactgtcaatgggaggatggttcttcctgtcgatgagagcttgacggaggcgttaggaatccgatccaaatacgcttcattgcgaaaggacactttgctgaaatcggtgttcggtggtgccatctgccgcatgtaccggtttccaaccactgatggtaaccatttgcggatcctggagcagatggcagagagcgtgctctccctgcacgtgccccggcagttcgtgaagctcctactagaggaagatgcagccagagtgtgtgagctggaggagctgggagagctgtccccttgctgggagagcctccggcgccaaattgtcacccagtaccagaccatcatcctcacataccaggagaacctgaccgacctccatcagtacagagggccctcgtttaaagcaagcagtttgaaagcagataaaaagttagaatttgttcccacaaacttgcacatacaaaggatgagagttcaagacgatggaggatcagatcagaactacgacatcgtcaccattggggcgccagcagcacactgccaaggttttaagtcaggaggtctccgcaaaaagctgcacaaatttgaagagaccaagaaacattttgaggagtgttgtacatcatctggctgccagtccataatctacataccccaggatgttgtcagagccaaggagatcatcgcccagatcaacaccctgaaaacccaagtgagttactacgcagagcggctgtcaagggcagccaaggacaggtctgccactggccttgagaggacactcgccatcttggcagacaagacacggcagctggtcacggtctgcgactgcaagctcctggccaactccatccatgggctgaacgctgcacggcctgactacattgcctccaaggcctctcccacttcgactgaggaggagcaggtgatgcttagaaatgaccaggacaccctcatggcccggtggacagggagaaacagccgatcttccctgcaggtggactggcacgaggaggagtgggagaaagtgtggctgaacgtggacaagagcctagagtgcatcattcagcgtgtggacaagctgctgcagaaggagcggctgcatggcgagggctgtgaggatgtcttcccctgtgcaggcagctgcaccagcaagaaaggtaacccggacagccacgcctactggatcagaccagaagaccccttctgtgatgtcccctcctcaccatgcccctccaccatgccctccactgcatgccatcctcatctgaccacacattgcagtccccctcctgaagagtccagcccaggtgaatggagtgaggccctttacccgctgctgaccactctcaccgactgcgtggccatgatgagtgacaaggccaagaaggccatggtattcctgctcatgcaggacagcgcgcccaccatagccacctacctgagcctgcagtaccgccgtgacgtggtcttctgccagacgctgaccgccctcatctgcggcttcatcattaagctgaggaactgcctgcatgacgacggcttcctgcgccagctctacaccatcgggctgctggcccagttcgagagcctgctgagcacctacggggaggagctggcaatgctggaggacatgagccttgggatcatggacttgaggaacgtgaccttcaaagtcactcaggccacttccagcgcctccgcagacatgctgcccgtcatcacaggaaatcgcgacgggtttaacgtgcgggtccctctgccgggcccgctgtttgacgccttgccccgggagatccagagtggcatgctgctgcgagtgcagcccgtcctcttcaacgtgggcatcaatgagcagcagacactggccgagaggtttggcgatacgtctttacaagaagtcatcaacgtggagagtttggtgcggttaaattcctactttgagcagtttaaggaagttttgcctgaggattgcctgcctcggtctcgcagtcagacgtgcctgccagagctgctgcggtttctgggtcagaacgtgcatgcccggaagaataagaacgtcgacattctctggcaagctgctgagatctgccgccgccttaatggggtccggttcaccagctgcaagagcgctaaggaccgtacagccatgtcggtgacactggagcagtgcctgatcctgcaacacgagcatggcatggccccgcaggtcttcacccaggccctggagtgcatgcgcagtgagggttgtcgaagagaaaatacaatgaagaatgttggaagtcgcaaatatgcatttaattccctgcagctgaaggctttccccaagcattacaggcctcccgaagggacttacggaaaagttgaaacgtgaacacacggtttcctctaattagctgttacataataaatgtgggtaccctctagtgtcatatatgaattcttcaagaagacctgaaggattggtttttattttttgtggtttttttaaaaaaaacatttcactaaagagtctctggagcatgttttttgttttttgggtttttttccccattggaatcaataggaggtaatgtttggctcaatagtgtggatagtaacaactgcctatttaaattaaatagcctttggctgtaactacacagatctcatcaatagttacctacatgaatcaagctaggtttgtctgaaatgctagaagactttttcaaatgcctgcttgctcacttacttttctacagagtaactcaaaagtaaccattgaattacaatccactttgtaaaaatctgaatgtaaaacagtaaataataaattaaataattggatcctaggcataccaataaatgttatttggggaaagaagctagcactatctcatgcagtgagaataacgggttctagtgaattatcctatctacactaccacctgaagaagttgaaagaaagattgataaatcaacgggagataagactttattagaaggtaacacctgcaaggtaccccacatagttggggccactcttttttctgtcccttatgagttacagaacagggagtctgctggagacacaaagccagcagtaaggtccctttagcctgtctcctgttctctgaagctccctgccgaggctccctcacgcccagaggacacatctccccttcttctctagatgttaatgtagggcctcagatgtggcatgtcaacactcccatggggaatttatgaccatagagatagtagaaacctaaatattttcagaaaaaaaattttttttgcaggatttccaatttatctttgaaaagacagtacaatcatgtttgaatgtctgatgaaagtgtcttatttttaggtttgcaataattgttactttcttattctcattcttatgtaagatgactattgagaaacagttgaaatttattctcctcaaatgagattttgaaagggatttatgggccataaaacttaggaatttcatagaaaattttgtctggtcatcttttataagatgatgatgagtcttatctgcacatagcagagtttgtttcttaggagtttatatgttttattgattctgtttacgatgtttacatgttcttgaaaaggttgtaaaagaaatacatatggcacatattaatgatgctgatcctaatgatttgtgaacctcttagaaattcttttgtctaaaagcctagagattcttctggttcctttagaaacatgtaacaaacttgggccaggggtgctgaggcatggggaggactgcttattggcaggaacacagagggggtgggcatcaggtagggtggaactggatgaccttccagaccccctcctactcagaagtcagcatgcaagcagcgcctgctgtctcccgatgcctgcagggaggaaaatgtctgtgaaggacactttaatgaaggacgaagctctctgctgctccctcaaagctgagttcactgtggcaggcaggaagcagagaagctcctgcccgccaaacccactgcacaggtggctgctgctggtatcagattctcctttttaagtgtcaatttctgttcacagacagtttgttttcaatatggctgatttaccctttcacctctccaccatctcatttaatttgtaaatttttagttctgtcttttctcattttaacttttaaaaaatctccttgctttttaaaaataaatattacccacatagttttcagatcttttttgtctggagagcattaaatatctgcactcatcaaagggaatatagcaaatgttgatcatctgtcagcagttttgcatgtgacacctttatatgaattattttcccaatttttgctctatgtaatgggtcaccataaaactgtaagacttggcaaatgctatagaaaaggttcaggtttcagtattctctctgaaggcatcattcctgggcttccggcagcatcacacgcttccagtgcctgcagggtgagggtgtgtggcacagaggcaagcagctcctctcttctgtaggagctttgggttttcagaggtgcagggaaggcagttttacaggttaccgtaaaacagaggttccgtccagtgttccttatgatgcctccccatttaaaaagaaaagagatctatggaaaactgggaatgtaatgtggattctgtcagagctcctacagagcacagttgcctttagtttcctttaaagatgtaaaaatattgtataatacagttttgtccctacacaattgtatttgccaagcttagtgcattatgatacctttatttatttgttttgggcagtattactatatatatataaacatacagttactgttttatatattcttaggtcattcaaagccatgtatgctgtaaatgtgctagtctttagaatgacacataataaataactgacaagatattaaatgtggtcttgcctgattcatcctattaggaggactagttctatgtgaccagcctgtgactggaccattgttcttgggcattgcattgagtgctcgggtgctgaatacatgtttgtaaacatgggaccatgggagacttccattttataagcttgtttctgcctaatttgaagcagaggggcaacagcgttgaggttaagagcacggactttgggagcacacagaccaggtcccaatcctggttctgcccctgactggctggtgactctgagcaagttgcttgacctctccaagcctccgtttcctcatgtgcaaagtgtggacaacaacagtaccttcctcataaggaacgtgcgacgcgcctcagaagtacgtgttcataaatggtagccattgttgttaccttcccgtctgtgaacatggatcacatcatctctgtgggtaacccagtcctcgttgtatgacttgtcaaaatgcagttccacttgtattaatattgaccctgttcatcgtcaccaggactgcatcttgcaccactgtgccgtcttctaggcacacacgacccgttatctcccttggaaaaattcctctcactggaaatgtacaattaaaggatgattgaaatgtttaactcttggagtttttagtattaccaaactcctagaaatttaagctaccaccaaaaataacatgtgccttttccctttattctcattgatggtagcagtgcacctcgtttcagtgtcctgattccttgattactgtgaacactgaacatcttttatacctttatgatatttctatgtttgtgacttcattggaatgttgatctatttcatatagattgtttttaatatacaatgtattagcccctgtca

SEQ ID NO: 14387 - DNA, 6406 bp, Homo sapiens
  source 1..6406: mol_type = unassigned DNA
cggcgtctagagcggcggcggctggctagggctgcggcgcgcgtggagggttcgctgctggtttgccgccgggtcgggctccgtgggccggggcaggaggaccagcacctgaggccgggcccgcagcccgcgacttcacagccaggcggcggcgctgctgctgctgcggggctctggcgcgcagcccggcgggacagcggggcggctggcgccgggggccggggagcgccagatgatggatttggacatgcttctatgaagaaatgccacatggtccgagagcaaacatgtccaggctactgccactttagtggactagggctcggtgccagcacttcccgggtaatcaggcgtggtctgaccgaggatcaagaagcacatcatcaccaatgacatcatgacagcaagagagcacagccctcgccatggtgccagggcccgtgcaatgcagcgggcttccaccatcgacgtggcggccgacatgctgggcctctctctggcaggaaatatacaagacccagatgagcccattttagaatttagcttagcttgcagtgagctgcatactccatcgctagatcgaaagccaaatagttttgttgcggtgagtgtcaccacccctcctcaggcattctggacgaagcatgcacagacggagatcattgagggaaccaacaatcctatatttctaagcagtattgccttctttcaagactctcttatcaatcagatgacacaagtcaaactctccgtgtatgatgtcaaagatagatctcagggaacaatgtatttactgggctctggaacgttcattgtcaaagatctgctccaggacaggcatcataggttgcatttaacactaaggtctgcagagagtgaccgtgtaggtaacatcaccgtgattggctggcagatggaggagaagtcagaccaacggccccctgtgacccggtctgtggacactgtcaatgggaggatggttcttcctgtcgatgagagcttgacggaggcgttaggaatccgatccaaatacgcttcattgcgaaaggacactttgctgaaatcggtgttcggtggtgccatctgccgcatgtaccggtttccaaccactgatggtaaccatttgcggatcctggagcagatggcagagagcgtgctctccctgcacgtgccccggcagttcgtgaagctcctactagaggaagatgcagccagagtgtgtgagctggaggagctgggagagctgtccccttgctgggagagcctccggcgccaaattgtcacccagtaccagaccatcatcctcacataccaggagaacctgaccgacctccatcagtacagagggccctcgtttaaagcaagcagtttgaaagcagataaaaagttagaatttgttcccacaaacttgcacatacaaaggatgagagttcaagacgatggaggatcagatcagaactacgacatcgtcaccattggggcgccagcagcacactgccaaggttttaagtcaggaggtctccgcaaaaagctgcacaaatttgaagagaccaagaaacattttgaggagtgttgtacatcatctggctgccagtccataatctacataccccaggatgttgtcagagccaaggagatcatcgcccagatcaacaccctgaaaacccaagtgagttactacgcagagcggctgtcaagggcagccaaggacaggtctgccactggccttgagaggacactcgccatcttggcagacaagacacggcagctggtcacggtctgcgactgcaagctcctggccaactccatccatgggctgaacgctgcacggcctgactacattgcctccaaggcctctcccacttcgactgaggaggagcaggtgatgcttagaaatgaccaggacaccctcatggcccggtggacagggagaaacagccgatcttccctgcaggtggactggcacgaggaggagtgggagaaagtgtggctgaacgtggacaagagcctagagtgcatcattcagcgtgtggacaagctgctgcagaaggagcggctgcatggcgagggctgtgaggatgtcttcccctgtgcaggcagctgcaccagcaagaaagattgcagtccccctcctgaagagtccagcccaggtgaatggagtgaggccctttacccgctgctgaccactctcaccgactgcgtggccatgatgagtgacaaggccaagaaggccatggtattcctgctcatgcaggacagcgcgcccaccatagccacctacctgagcctgcagtaccgccgtgacgtggtcttctgccagacgctgaccgccctcatctgcggcttcatcattaagctgaggaactgcctgcatgacgacggcttcctgcgccagctctacaccatcgggctgctggcccagttcgagagcctgctgagcacctacggggaggagctggcaatgctggaggacatgagccttgggatcatggacttgaggaacgtgaccttcaaagtcactcaggccacttccagcgcctccgcagacatgctgcccgtcatcacaggaaatcgcgacgggtttaacgtgcgggtccctctgccgggcccgctgtttgacgccttgccccgggagatccagagtggcatgctgctgcgagtgcagcccgtcctcttcaacgtgggcatcaatgagcagcagacactggccgagaggtttggcgatacgtctttacaagaagtcatcaacgtggagagtttggtgcggttaaattcctactttgagcagtttaaggaagttttgcctgaggattgcctgcctcggtctcgcagtcagacgtgcctgccagagctgctgcggtttctgggtcagaacgtgcatgcccggaagaataagaacgtcgacattctctggcaagctgctgagatctgccgccgccttaatggggtccggttcaccagctgcaagagcgctaaggaccgtacagccatgtcggtgacactggagcagtgcctgatcctgcaacacgagcatggcatggccccgcaggtcttcacccaggccctggagtgcatgcgcagtgagggttgtcgaagagaaaatacaatgaagaatgttggaagtcgcaaatatgcatttaattccctgcagctgaaggctttccccaagcattacaggcctcccgaagggacttacggaaaagttgaaacgtgaacacacggtttcctctaattagctgttacataataaatgtgggtaccctctagtgtcatatatgaattcttcaagaagacctgaaggattggtttttattttttgtggtttttttaaaaaaaacatttcactaaagagtctctggagcatgttttttgttttttgggtttttttccccattggaatcaataggaggtaatgtttggctcaatagtgtggatagtaacaactgcctatttaaattaaatagcctttggctgtaactacacagatctcatcaatagttacctacatgaatcaagctaggtttgtctgaaatgctagaagactttttcaaatgcctgcttgctcacttacttttctacagagtaactcaaaagtaaccattgaattacaatccactttgtaaaaatctgaatgtaaaacagtaaataataaattaaataattggatcctaggcataccaataaatgttatttggggaaagaagctagcactatctcatgcagtgagaataacgggttctagtgaattatcctatctacactaccacctgaagaagttgaaagaaagattgataaatcaacgggagataagactttattagaaggtaacacctgcaaggtaccccacatagttggggccactcttttttctgtcccttatgagttacagaacagggagtctgctggagacacaaagccagcagtaaggtccctttagcctgtctcctgttctctgaagctccctgccgaggctccctcacgcccagaggacacatctccccttcttctctagatgttaatgtagggcctcagatgtggcatgtcaacactcccatggggaatttatgaccatagagatagtagaaacctaaatattttcagaaaaaaaattttttttgcaggatttccaatttatctttgaaaagacagtacaatcatgtttgaatgtctgatgaaagtgtcttatttttaggtttgcaataattgttactttcttattctcattcttatgtaagatgactattgagaaacagttgaaatttattctcctcaaatgagattttgaaagggatttatgggccataaaacttaggaatttcatagaaaattttgtctggtcatcttttataagatgatgatgagtcttatctgcacatagcagagtttgtttcttaggagtttatatgttttattgattctgtttacgatgtttacatgttcttgaaaaggttgtaaaagaaatacatatggcacatattaatgatgctgatcctaatgatttgtgaacctcttagaaattcttttgtctaaaagcctagagattcttctggttcctttagaaacatgtaacaaacttgggccaggggtgctgaggcatggggaggactgcttattggcaggaacacagagggggtgggcatcaggtagggtggaactggatgaccttccagaccccctcctactcagaagtcagcatgcaagcagcgcctgctgtctcccgatgcctgcagggaggaaaatgtctgtgaaggacactttaatgaaggacgaagctctctgctgctccctcaaagctgagttcactgtggcaggcaggaagcagagaagctcctgcccgccaaacccactgcacaggtggctgctgctggtatcagattctcctttttaagtgtcaatttctgttcacagacagtttgttttcaatatggctgatttaccctttcacctctccaccatctcatttaatttgtaaatttttagttctgtcttttctcattttaacttttaaaaaatctccttgctttttaaaaataaatattacccacatagttttcagatcttttttgtctggagagcattaaatatctgcactcatcaaagggaatatagcaaatgttgatcatctgtcagcagttttgcatgtgacacctttatatgaattattttcccaatttttgctctatgtaatgggtcaccataaaactgtaagacttggcaaatgctatagaaaaggttcaggtttcagtattctctctgaaggcatcattcctgggcttccggcagcatcacacgcttccagtgcctgcagggtgagggtgtgtggcacagaggcaagcagctcctctcttctgtaggagctttgggttttcagaggtgcagggaaggcagttttacaggttaccgtaaaacagaggttccgtccagtgttccttatgatgcctccccatttaaaaagaaaagagatctatggaaaactgggaatgtaatgtggattctgtcagagctcctacagagcacagttgcctttagtttcctttaaagatgtaaaaatattgtataatacagttttgtccctacacaattgtatttgccaagcttagtgcattatgatacctttatttatttgttttgggcagtattactatatatatataaacatacagttactgttttatatattcttaggtcattcaaagccatgtatgctgtaaatgtgctagtctttagaatgacacataataaataactgacaagatattaaatgtggtcttgcctgattcatcctattaggaggactagttctatgtgaccagcctgtgactggaccattgttcttgggcattgcattgagtgctcgggtgctgaatacatgtttgtaaacatgggaccatgggagacttccattttataagcttgtttctgcctaatttgaagcagaggggcaacagcgttgaggttaagagcacggactttgggagcacacagaccaggtcccaatcctggttctgcccctgactggctggtgactctgagcaagttgcttgacctctccaagcctccgtttcctcatgtgcaaagtgtggacaacaacagtaccttcctcataaggaacgtgcgacgcgcctcagaagtacgtgttcataaatggtagccattgttgttaccttcccgtctgtgaacatggatcacatcatctctgtgggtaacccagtcctcgttgtatgacttgtcaaaatgcagttccacttgtattaatattgaccctgttcatcgtcaccaggactgcatcttgcaccactgtgccgtcttctaggcacacacgacccgttatctcccttggaaaaattcctctcactggaaatgtacaattaaaggatgattgaaatgtttaactcttggagttttt

SEQ ID NO: 14388 - DNA, 3231 bp, Homo sapiens
  source 1..3231: mol_type = unassigned DNA
gaggaccagcacctgaggccgggcccgcagcccgcgacttcacagccaggcggcggcgctgctgctgctgcggggctctggcgcgcagcccggcgggacagcggggcggctggcgccgggggccggggagcgccagatgatggatttggacatgcttctatgaagaaatgccacatggtccgagagcaaacatgtccaggctactgccactttagtggactagggctcggtgccagcacttcccgggtaatcaggcgtggtctgaccgaggatcaagaagcacatcatcaccaatgacatcatgacagcaagagagcacagccctcgccatggtgccagggcccgtgcaatgcagcgggcttccaccatcgacgtggcggccgacatgctgggcctctctctggcaggaaatatacaagacccagatgagcccattttagaatttagcttagcttgcagtgagctgcatactccatcgctagatcgaaagccaaatagttttgttgcggtgagtgtcaccacccctcctcaggcattctggacgaagcatgcacagacggagatcattgagggaaccaacaatcctatatttctaagcagtattgccttctttcaagactctcttatcaatcagatgacacaagtcaaactctccgtgtatgatgtcaaagatagatctcagggaacaatgtatttactgggctctggaacgttcattgtcaaagatctgctccaggacaggcatcataggttgcatttaacactaaggtctgcagagagtgaccgtgtaggtaacatcaccgtgattggctggcagatggaggagaagtcagaccaacggccccctgtgacccggtctgtggacactgtcaatgggaggatggttcttcctgtcgatgagagcttgacggaggcgttaggaatccgatccaaatacgcttcattgcgaaaggacactttgctgaaatcggtgttcggtggtgccatctgccgcatgtaccggtttccaaccactgatggtaaccatttgcggatcctggagcagatggcagagagcgtgctctccctgcacgtgccccggcagttcgtgaagctcctactagaggaagatgcagccagagtgtgtgagctggaggagctgggagagctgtccccttgctgggagagcctccggcgccaaattgtcacccagtaccagaccatcatcctcacataccaggagaacctgaccgacctccatcagtacagagggccctcgtttaaagcaagcagtttgaaagcagataaaaagttagaatttgttcccacaaacttgcacatacaaaggatgagagttcaagacgatggaggatcagatcagaactacgacatcgtcaccattggggcgccagcagcacactgccaaggttttaagtcaggaggtctccgcaaaaagctgcacaaatttgaagagaccaagaaacattttgaggagtgttgtacatcatctggctgccagtccataatctacataccccaggatgttgtcagagccaaggagatcatcgcccagatcaacaccctgaaaacccaagtgagttactacgcagagcggctgtcaagggcagccaaggacaggtctgccactggccttgagaggacactcgccatcttggcagacaagacacggcagctggtcacggtctgcgactgcaagctcctggccaactccatccatgggctgaacgctgcacggcctgactacattgcctccaaggcctctcccacttcgactgaggaggagcaggtgatgcttagaaatgaccaggacaccctcatggcccggtggacagggagaaacagccgatcttccctgcaggtggactggcacgaggaggagtgggagaaagtgtggctgaacgtggacaagagcctagagtgcatcattcagcgtgtggacaagctgctgcagaaggagcggctgcatggcgagggctgtgaggatgtcttcccctgtgcaggcagctgcaccagcaagaaagattgcagtccccctcctgaagagtccagcccaggtgaatggagtgaggccctttacccgctgctgaccactctcaccgactgcgtggccatgatgagtgacaaggccaagaaggccatggtattcctgctcatgcaggacagcgcgcccaccatagccacctacctgagcctgcagtaccgccgtgacgtggtcttctgccagacgctgaccgccctcatctgcggcttcatcattaagctgaggaactgcctgcatgacgacggcttcctgcgccagctctacaccatcgggctgctggcccagttcgagagcctgctgagcacctacggggaggagctggcaatgctggaggacatgagccttgggatcatggacttgaggaacgtgaccttcaaagtcactcaggccacttccagcgcctccgcagacatgctgcccgtcatcacaggaaatcgcgacgggtttaacgtgcgggtccctctgccgggcccgctgtttgacgccttgccccgggagatccagagtggcatgctgctgcgagtgcagcccgtcctcttcaacgtgggcatcaatgagcagcagacactggccgagaggtttggcgatacgtctttacaagaagtcatcaacgtggagagtttggtgcggttaaattcctactttgagcagtttaaggaagttttgcctgaggattgcctgcctcggtctcgcagtcagacgtgcctgccagagctgctgcggtttctgggtcagaacgtgcatgcccggaagaataagaacgtcgacattctctggcaagctgctgagatctgccgccgccttaatggggtccggttcaccagctgcaagagcgctaaggaccgtacagccatgtcggtgacactggagcagtgcctgatcctgcaacacgagcatggcatggccccgcaggtcttcacccaggccctggagtgcatgcgcagcattggaacacgggaggtagtcacccagaagaacttgagcggcctggtgcccatccgagacttaaggctagaccccagcctcctctgttccatccctttattagctctgagccccaatttactgattgtgtggctctttctgagcatagcatacctggtgaccaaattgcgttgcaaatgaatatcattatgaaaaattaataagtcacaagaaaaacaaaagtgccagaacatgtccagccaccg

SEQ ID NO: 14389 - DNA, 3365 bp, Homo sapiens
  source 1..3365: mol_type = unassigned DNA
gtctagagcggcggcggctggctagggctgcggcgcgcgtggagggttcgctgctggtttgccgccgggtcgggctccgtgggccggggcaggaggaccagcacctgaggccgggcccgcagcccgcgacttcacagccaggcggcggcgctgctgctgctgcggggctctggcgcgcagcccggcgggacagcggggcggctggcgccgggggccggggagcgccagatgatggatttggacatgcttctatgaagaaatgccacatggtccgagagcaaacatgtccaggctactgccactttagtggactagggctcggtgccagcacttcccgggtaatcaggcgtggtctgaccgaggatcaagaagcacatcatcaccaatgacatcatgacagcaagagagcacagccctcgccatggtgccagggcccgtgcaatgcagcgggcttccaccatcgacgtggcggccgacatgctgggcctctctctggcaggaaatatacaagacccagatgagcccattttagaatttagcttagcttgcagtgagctgcatactccatcgctagatcgaaagccaaatagttttgttgcggtgagtgtcaccacccctcctcaggcattctggacgaagcatgcacagacggagatcattgagggaaccaacaatcctatatttctaagcagtattgccttctttcaagactctcttatcaatcagatgacacaagtcaaactctccgtgtatgatgtcaaagatagatctcagggaacaatgtatttactgggctctggaacgttcattgtcaaagatctgctccaggacaggcatcataggttgcatttaacactaaggtctgcagagagtgaccgtgtaggtaacatcaccgtgattggctggcagatggaggagaagtcagaccaacggccccctgtgacccggtctgtggacactgtcaatgggaggatggttcttcctgtcgatgagagcttgacggaggcgttaggaatccgatccaaatacgcttcattgcgaaaggacactttgctgaaatcggtgttcggtggtgccatctgccgcatgtaccggtttccaaccactgatggtaaccatttgcggatcctggagcagatggcagagagcgtgctctccctgcacgtgccccggcagttcgtgaagctcctactagaggaagatgcagccagagtgtgtgagctggaggagctgggagagctgtccccttgctgggagagcctccggcgccaaattgtcacccagtaccagaccatcatcctcacataccaggagaacctgaccgacctccatcagtacagagggccctcgtttaaagcaagcagtttgaaagcagataaaaagttagaatttgttcccacaaacttgcacatacaaaggatgagagttcaagacgatggaggatcagatcagaactacgacatcgtcaccattggggcgccagcagcacactgccaaggttttaagtcaggaggtctccgcaaaaagctgcacaaatttgaagagaccaagaaacatacatcatctggctgccagtccataatctacataccccaggatgttgtcagagccaaggagatcatcgcccagatcaacaccctgaaaacccaagtgagttactacgcagagcggctgtcaagggcagccaaggacaggtctgccactggccttgagaggacactcgccatcttggcagacaagacacggcagctggtcacggtctgcgactgcaagctcctggccaactccatccatgggctgaacgctgcacggcctgactacattgcctccaaggcctctcccacttcgactgaggaggagcaggtgatgcttagaaatgaccaggacaccctcatggcccggtggacagggagaaacagccgatcttccctgcaggtggactggcacgaggaggagtgggagaaagtgtggctgaacgtggacaagagcctagagtgcatcattcagcgtgtggacaagctgctgcagaaggagcggctgcatggcgagggctgtgaggatgtcttcccctgtgcaggcagctgcaccagcaagaaaggtaacccggacagccacgcctactggatcagaccagaagaccccttctgtgatgtcccctcctcaccatgcccctccaccatgccctccactgcatgccatcctcatctgaccacacattgcagtccccctcctgaagagtccagcccaggtgaatggagtgaggccctttacccgctgctgaccactctcaccgactgcgtggccatgatgagtgacaaggccaagaaggccatggtattcctgctcatgcaggacagcgcgcccaccatagccacctacctgagcctgcagtaccgccgtgacgtggtcttctgccagacgctgaccgccctcatctgcggcttcatcattaagctgaggaactgcctgcatgacgacggcttcctgcgccagctctacaccatcgggctgctggcccagttcgagagcctgctgagcacctacggggaggagctggcaatgctggaggacatgagccttgggatcatggacttgaggaacgtgaccttcaaagtcactcaggccacttccagcgcctccgcagacatgctgcccgtcatcacaggaaatcgcgacgggtttaacgtgcgggtccctctgccgggcccgctgtttgacgccttgccccgggagatccagagtggcatgctgctgcgagtgcagcccgtcctcttcaacgtgggcatcaatgagcagcagacactggccgagaggtttggcgatacgtctttacaagaagtcatcaacgtggagagtttggtgcggttaaattcctactttgagcagtttaaggaagttttgcctgaggattgcctgcctcggtctcgcagtcagacgtgcctgccagagctgctgcggtttctgggtcagaacgtgcatgcccggaagaataagaacgtcgacattctctggcaagctgctgagatctgccgccgccttaatggggtccggttcaccagctgcaagagcgctaaggaccgtacagccatgtcggtgacactggagcagtgcctgatcctgcaacacgagcatggcatggccccgcaggtcttcacccaggccctggagtgcatgcgcagtgagggttgtcgaagagaaaatacaatgaagaatgttggaagtcgcaaatatgcatttaattccctgcagctgaaggctttccccaagcattacaggcctcccgaagggacttacggaaaagttgaaacgtgaacacacggtttcctctaattagctgttacataataaatgtgggtaccctctag

SEQ ID NO: 14390 - DNA, 2934 bp, Homo sapiens
  source 1..2934: mol_type = unassigned DNA
atgacagcaagagagcacagccctcgccatggtgccagggcccgtgcaatgcagcgggcttccaccatcgacgtggcggccgacatgctgggcctctctctggcaggaaatatacaagacccagatgagcccattttagaatttagcttagcttgcagtgagctgcatactccatcgctagatcgaaagccaaatagttttgttgcggtgagtgtcaccacccctcctcaggcattctggacgaagcatgcacagacggagatcattgagggaaccaacaatcctatatttctaagcagtattgccttctttcaagactctcttatcaatcagatgacacaagtcaaactctccgtgtatgatgtcaaagatagatctcagggaacaatgtatttactgggctctggaacgttcattgtcaaagatctgctccaggacaggcatcataggttgcatttaacactaaggtctgcagagagtgaccgtgtaggtaacatcaccgtgattggctggcagatggaggagaagtcagaccaacggccccctgtgacccggtctgtggacactgtcaatgggaggatggttcttcctgtcgatgagagcttgacggaggcgttaggaatccgatccaaatacgcttcattgcgaaaggacactttgctgaaatcggtgttcggtggtgccatctgccgcatgtaccggtttccaaccactgatggtaaccatttgcggatcctggagcagatggcagagagcgtgctctccctgcacgtgccccggcagttcgtgaagctcctactagaggaagatgcagccagagtgtgtgagctggaggagctgggagagctgtccccttgctgggagagcctccggcgccaaattgtcacccagtaccagaccatcatcctcacataccaggagaacctgaccgacctccatcagtacagagggccctcgtttaaagcaagcagtttgaaagcagataaaaagttagaatttgttcccacaaacttgcacatacaaaggatgagagttcaagacgatggaggatcagatcagaactacgacatcgtcaccattggggcgccagcagcacactgccaaggttttaagtcaggaggtctccgcaaaaagctgcacaaatttgaagagaccaagaaacattttgaggagtgttgtacatcatctggctgccagtccataatctacataccccaggatgttgtcagagccaaggagatcatcgcccagatcaacaccctgaaaacccaagtgagttactacgcagagcggctgtcaagggcagccaaggacaggtctgccactggccttgagaggacactcgccatcttggcagacaagacacggcagctggtcacggtctgcgactgcaagctcctggccaactccatccatgggctgaacgctgcacggcctgactacattgcctccaaggcctctcccacttcgactgaggaggagcaggtgatgcttagaaatgaccaggacaccctcatggcccggtggacagggagaaacagccgatcttccctgcaggtggactggcacgaggaggagtgggagaaagtgtggctgaacgtggacaagagcctagagtgcatcattcagcgtgtggacaagctgctgcagaaggagcggctgcatggcgagggctgtgaggatgtcttcccctgtgcaggcagctgcaccagcaagaaaggtaacccggacagccacgcctactggatcagaccagaagaccccttctgtgatgtcccctcctcaccatgcccctccaccatgccctccactgcatgccatcctcatctgaccacacattgcagtccccctcctgaagagtccagcccaggtgaatggagtgaggccctttacccgctgctgaccactctcaccgactgcgtggccatgatgagtgacaaggccaagaaggccatggtattcctgctcatgcaggacagcgcgcccaccatagccacctacctgagcctgcagtaccgccgtgacgtggtcttctgccagacgctgaccgccctcatctgcggcttcatcattaagctgaggaactgcctgcatgacgacggcttcctgcgccagctctacaccatcgggctgctggcccagttcgagagcctgctgagcacctacggggaggagctggcaatgctggaggacatgagccttgggatcatggacttgaggaacgtgaccttcaaagtcactcaggccacttccagcgcctccgcagacatgctgcccgtcatcacaggaaatcgcgacgggtttaacgtgcgggtccctctgccgggcccgctgtttgacgccttgccccgggagatccagagtggcatgctgctgcgagtgcagcccgtcctcttcaacgtgggcatcaatgagcagcagacactggccgagaggtttggcgatacgtctttacaagaagtcatcaacgtggagagtttggtgcggttaaattcctactttgagcagtttaaggaagttttgcctgaggattgcctgcctcggtctcgcagtcagacgtgcctgccagagctgctgcggtttctgggtcagaacgtgcatgcccggaagaataagaacgtcgacattctctggcaagctgctgagatctgccgccgccttaatggggtccggttcaccagctgcaagagcgctaaggaccgtacagccatgtcggtgacactggagcagtgcctgatcctgcaacacgagcatggcatggccccgcaggtcttcacccaggccctggagtgcatgcgcagtgagggttgtcgaagagaaaatacaatgaagaatgttggaagtcgcaaatatgcatttaattccctgcagctgaaggctttccccaagcattacaggcctcccgaagggacttacggaaaagttgaaacgtga

SEQ ID NO: 14391 - DNA, 6635 bp, Homo sapiens
  source 1..6635: mol_type = unassigned DNA
gtctagagcggcggcggctggctagggctgcggcgcgcgtggagggttcgctgctggtttgccgccgggtcgggctccgtgggccggggcaggaggaccagcacctgaggccgggcccgcagcccgcgacttcacagccaggcggcggcgctgctgctgctgcggggctctggcgcgcagcccggcgggacagcggggcggctggcgccgggggccggggagcgccagatgatggatttggacatgcttctatgaagaaatgccacatggtccgagagcaaacatgtccaggctactgccactttagtggactagggctcggtgccagcacttcccgggtaatcaggcgtggtctgaccgaggatcaagaagcacatcatcaccaatgacatcatgacagcaagagagcacagccctcgccatggtgccagggcccgtgcaatgcagcgggcttccaccatcgacgtggcggccgacatgctgggcctctctctggcaggaaatatacaagacccagatgagcccattttagaatttagcttagcttgcagtgagctgcatactccatcgctagatcgaaagccaaatagttttgttgcggtgagtgtcaccacccctcctcaggcattctggacgaagcatgcacagacggagatcattgagggaaccaacaatcctatatttctaagcagtattgccttctttcaagactctcttatcaatcagatgacacaagtcaaactctccgtgtatgatgtcaaagatagatctcagggaacaatgtatttactgggctctggaacgttcattgtcaaagatctgctccaggacaggcatcataggttgcatttaacactaaggtctgcagagagtgaccgtgtaggtaacatcaccgtgattggctggcagatggaggagaagtcagaccaacggccccctgtgacccggtctgtggacactgtcaatgggaggatggttcttcctgtcgatgagagcttgacggaggcgttaggaatccgatccaaatacgcttcattgcgaaaggacactttgctgaaatcggtgttcggtggtgccatctgccgcatgtaccggtttccaaccactgatggtaaccatttgcggatcctggagcagatggcagagagcgtgctctccctgcacgtgccccggcagttcgtgaagctcctactagaggaagatgcagccagagtgtgtgagctggaggagctgggagagctgtccccttgctgggagagcctccggcgccaaattgtcacccagtaccagaccatcatcctcacataccaggagaacctgaccgacctccatcagtacagagggccctcgtttaaagcaagcagtttgaaagcagataaaaagttagaatttgttcccacaaacttgcacatacaaaggatgagagttcaagacgatggaggatcagatcagaactacgacatcgtcaccattggggcgccagcagcacactgccaaggttttaagtcaggaggtctccgcaaaaagctgcacaaatttgaagagaccaagaaacaacaggaagaatctcgtacatcatctggctgccagtccataatctacataccccaggatgttgtcagagccaaggagatcatcgcccagatcaacaccctgaaaacccaagtgagttactacgcagagcggctgtcaagggcagccaaggacaggtctgccactggccttgagaggacactcgccatcttggcagacaagacacggcagctggtcacggtctgcgactgcaagctcctggccaactccatccatgggctgaacgctgcacggcctgactacattgcctccaaggcctctcccacttcgactgaggaggagcaggtgatgcttagaaatgaccaggacaccctcatggcccggtggacagggagaaacagccgatcttccctgcaggtggactggcacgaggaggagtgggagaaagtgtggctgaacgtggacaagagcctagagtgcatcattcagcgtgtggacaagctgctgcagaaggagcggctgcatggcgagggctgtgaggatgtcttcccctgtgcaggcagctgcaccagcaagaaagattgcagtccccctcctgaagagtccagcccaggtgaatggagtgaggccctttacccgctgctgaccactctcaccgactgcgtggccatgatgagtgacaaggccaagaaggccatggtattcctgctcatgcaggacagcgcgcccaccatagccacctacctgagcctgcagtaccgccgtgacgtggtcttctgccagacgctgaccgccctcatctgcggcttcatcattaagctgaggaactgcctgcatgacgacggcttcctgcgccagctctacaccatcgggctgctggcccagttcgagagcctgctgagcacctacggggaggagctggcaatgctggaggacatgagccttgggatcatggacttgaggaacgtgaccttcaaagtcactcaggccacttccagcgcctccgcagacatgctgcccgtcatcacaggaaatcgcgacgggtttaacgtgcgggtccctctgccgggcccgctgtttgacgccttgccccgggagatccagagtggcatgctgctgcgagtgcagcccgtcctcttcaacgtgggcatcaatgagcagcagacactggccgagaggtttggcgatacgtctttacaagaagtcatcaacgtggagagtttggtgcggttaaattcctactttgagcagtttaaggaagttttgcctgaggattgcctgcctcggtctcgcagtcagacgtgcctgccagagctgctgcggtttctgggtcagaacgtgcatgcccggaagaataagaacgtcgacattctctggcaagctgctgagatctgccgccgccttaatggggtccggttcaccagctgcaagagcgctaaggaccgtacagccatgtcggtgacactggagcagtgcctgatcctgcaacacgagcatggcatggccccgcaggtcttcacccaggccctggagtgcatgcgcagtgagggttgtcgaagagaaaatacaatgaagaatgttggaagtcgcaaatatgcatttaattccctgcagctgaaggctttccccaagcattacaggcctcccgaagggacttacggaaaagttgaaacgtgaacacacggtttcctctaattagctgttacataataaatgtgggtaccctctagtgtcatatatgaattcttcaagaagacctgaaggattggtttttattttttgtggtttttttaaaaaaaacatttcactaaagagtctctggagcatgttttttgttttttgggtttttttccccattggaatcaataggaggtaatgtttggctcaatagtgtggatagtaacaactgcctatttaaattaaatagcctttggctgtaactacacagatctcatcaatagttacctacatgaatcaagctaggtttgtctgaaatgctagaagactttttcaaatgcctgcttgctcacttacttttctacagagtaactcaaaagtaaccattgaattacaatccactttgtaaaaatctgaatgtaaaacagtaaataataaattaaataattggatcctaggcataccaataaatgttatttggggaaagaagctagcactatctcatgcagtgagaataacgggttctagtgaattatcctatctacactaccacctgaagaagttgaaagaaagattgataaatcaacgggagataagactttattagaaggtaacacctgcaaggtaccccacatagttggggccactcttttttctgtcccttatgagttacagaacagggagtctgctggagacacaaagccagcagtaaggtccctttagcctgtctcctgttctctgaagctccctgccgaggctccctcacgcccagaggacacatctccccttcttctctagatgttaatgtagggcctcagatgtggcatgtcaacactcccatggggaatttatgaccatagagatagtagaaacctaaatattttcagaaaaaaaattttttttgcaggatttccaatttatctttgaaaagacagtacaatcatgtttgaatgtctgatgaaagtgtcttatttttaggtttgcaataattgttactttcttattctcattcttatgtaagatgactattgagaaacagttgaaatttattctcctcaaatgagattttgaaagggatttatgggccataaaacttaggaatttcatagaaaattttgtctggtcatcttttataagatgatgatgagtcttatctgcacatagcagagtttgtttcttaggagtttatatgttttattgattctgtttacgatgtttacatgttcttgaaaaggttgtaaaagaaatacatatggcacatattaatgatgctgatcctaatgatttgtgaacctcttagaaattcttttgtctaaaagcctagagattcttctggttcctttagaaacatgtaacaaacttgggccaggggtgctgaggcatggggaggactgcttattggcaggaacacagagggggtgggcatcaggtagggtggaactggatgaccttccagaccccctcctactcagaagtcagcatgcaagcagcgcctgctgtctcccgatgcctgcagggaggaaaatgtctgtgaaggacactttaatgaaggacgaagctctctgctgctccctcaaagctgagttcactgtggcaggcaggaagcagagaagctcctgcccgccaaacccactgcacaggtggctgctgctggtatcagattctcctttttaagtgtcaatttctgttcacagacagtttgttttcaatatggctgatttaccctttcacctctccaccatctcatttaatttgtaaatttttagttctgtcttttctcattttaacttttaaaaaatctccttgctttttaaaaataaatattacccacatagttttcagatcttttttgtctggagagcattaaatatctgcactcatcaaagggaatatagcaaatgttgatcatctgtcagcagttttgcatgtgacacctttatatgaattattttcccaatttttgctctatgtaatgggtcaccataaaactgtaagacttggcaaatgctatagaaaaggttcaggtttcagtattctctctgaaggcatcattcctgggcttccggcagcatcacacgcttccagtgcctgcagggtgagggtgtgtggcacagaggcaagcagctcctctcttctgtaggagctttgggttttcagaggtgcagggaaggcagttttacaggttaccgtaaaacagaggttccgtccagtgttccttatgatgcctccccatttaaaaagaaaagagatctatggaaaactgggaatgtaatgtggattctgtcagagctcctacagagcacagttgcctttagtttcctttaaagatgtaaaaatattgtataatacagttttgtccctacacaattgtatttgccaagcttagtgcattatgatacctttatttatttgttttgggcagtattactatatatatataaacatacagttactgttttatatattcttaggtcattcaaagccatgtatgctgtaaatgtgctagtctttagaatgacacataataaataactgacaagatattaaatgtggtcttgcctgattcatcctattaggaggactagttctatgtgaccagcctgtgactggaccattgttcttgggcattgcattgagtgctcgggtgctgaatacatgtttgtaaacatgggaccatgggagacttccattttataagcttgtttctgcctaatttgaagcagaggggcaacagcgttgaggttaagagcacggactttgggagcacacagaccaggtcccaatcctggttctgcccctgactggctggtgactctgagcaagttgcttgacctctccaagcctccgtttcctcatgtgcaaagtgtggacaacaacagtaccttcctcataaggaacgtgcgacgcgcctcagaagtacgtgttcataaatggtagccattgttgttaccttcccgtctgtgaacatggatcacatcatctctgtgggtaacccagtcctcgttgtatgacttgtcaaaatgcagttccacttgtattaatattgaccctgttcatcgtcaccaggactgcatcttgcaccactgtgccgtcttctaggcacacacgacccgttatctcccttggaaaaattcctctcactggaaatgtacaattaaaggatgattgaaatgtttaactcttggagtttttagtattaccaaactcctagaaatttaagctaccaccaaaaataacatgtgccttttccctttattctcattgatggtagcagtgcacctcgtttcagtgtcctgattccttgattactgtgaacactgaacatcttttatacctttatgatatttctatgtttgtgacttcattggaatgttgatctatttcatatagattgtttttaatatacaatgtattagcccctgtca

SEQ ID NO: 14392 - DNA, 3347 bp, Homo sapiens
  source 1..3347: mol_type = unassigned DNA
agagctggagccggagccaagggagtccaggctgccgggggctgcagacatggagggccagagcagcaggggcagcaggaggccagggacccgggctggcctgggttccctgcccatgccccagggtgttgcccaaactggggcaccctccaaggtggactcaagttttcagctcccagcaaagaagaacgcagccctaggaccctcggaaccaaggttggctctggcacctgtagggccacgggcagctatgtcagcttcctcggaaggaccgaggctggctctggcatctccccgaccaatcctggctccactgtgtacccctgaagggcagaaaacagctactgcccaccgcagctccagcctggccccaacatctgtgggccagctggtgatgtctgcctcagctggaccaaagcctcccccagcgaccacaggctcagttctggctccgacgtccctggggctggtgatgcctgcctcagcagggccaagatctcccccagtcaccctggggcccaatctggccccaacctccagagaccagaagcaggagccacctgcctccgtgggacccaagccaacactggcagcctctggcctgagcctggccctggcttctgaggagcagcccccagaactcccctccaccccttccccggtgcccagtccagttctgtctccaactcaggaacaggccctggctccagcatccacggcatcaggcgcagcctctgtgggacagacatcagctagaaagagggatgccccagcccctagacctctccctgcttctgaggggcatctccagcctccagctcagacatctggtcctacaggctccccaccctgcatccaaacctccccagaccctcggctctccccctccttccgagcccggcctgaggccctccacagcagccctgaggatcctgttttgccacggccaccccagaccttgcccttggatgtgggccagggtccttcagagcctggcactcactcccctggacttctgtcccccaccttccggcctggggccccctcaggccagactgtgcccccacctctgcccaagccaccccgatcacccagccgttccccaagccactccccgaatcgctctccctgtgttcccccagcccctgacatggccctcccaaggcttggcacacagagtacagggcctggcaggtgcctgagccccaaccttcaggcccaagaagccccagccccagtcaccacctcctcttctacatccaccctgtcatcctccccttggtcagctcagcctacctggaagagcgaccccggcttccggatcactgtggtcacatggaacgtgggcactgccatgcccccagacgatgtcacatccctcctccacctgggcggtggtgacgacagcgacggcgcagacatgatcgccatagggttgcaggaagtgaactccatgctcaacaagcgactcaaggacgccctcttcacggaccagtggagtgagctgttcatggatgcgctagggcccttcaacttcgtgctggtgagttcggtgaggatgcagggtgtcatcctgctgctgttcgccaagtactaccacctgcccttcctgcgagacgtgcagaccgactgcacgcgcactggcctgggcggctactggggtaacaagggtggcgtgagcgtgcgcctggcggccttcgggcacatgctctgcttcctgaactgccacttgcctgcgcatatggacaaggcggagcagcgcaaagacaacttccagaccatcctcagcctccagcagttccaagggccgggcgcacagggcatcctggatcatgacctcgtgttctggttcggggacctgaacttccgcattgagagctatgacctgcactttgtcaagtttgccatcgacagtgaccagctccatcagctctgggagaaggaccagctcaacatggccaagaacacctggcccattctgaagggctttcaggaggggcccctcaacttcgctcccaccttcaagtttgatgtgggtaccaacaaatacgataccagtgccaagaaacggaagccagcttggacagaccgtatcctatggaaggtcaaggctccaggtgggggtcccagcccctcaggacggaagagccaccgactccaggtgacgcagcacagctaccgcagccacatggaatacacagtcagcgaccacaagcctgtggctgcccagttcctcctgcagtttgccttcagggacgacatgccactggtgcggctggaggtggcagatgagtgggtgcggcccgagcaggcggtggtgaggtaccgcatggaaacagtgttcgcccgcagctcctgggactggatcggcttataccgggtgggtttccgccattgcaaggactatgtggcttatgtctgggccaaacatgaagatgtggatgggaatacctaccaggtaacattcagtgaggaatcactgcccaagggccatggagacttcatcctgggctactatagtcacaaccacagcatcctcatcggcatcactgaacccttccagatctcgctgccttcctcggagttggccagcagcagcacagacagctcaggcaccagctcagagggagaggatgacagcacactggagctccttgcacccaagtcccgcagccccagtcctggcaagtccaagcgacaccgcagccgcagcccgggactggccaggttccctgggcttgccctacggccctcatcccgtgaacgccgtggtgccagccgtagcccctcaccccagagccgccgcctgtcccgagtggctcctgacaggagcagtaatggcagcagccggggcagtagtgaagaggggccctctgggttgcctggcccctgggccttcccaccagctgtgcctcgaagcctgggcctgttgcccgccttgcgcctagagactgtagaccctggtggtggtggctcctggggacctgatcgggaggccctggcgcccaacagcctgtctcctagtccccagggccatcgggggctggaggaagggggcctggggccctgagggtggggtaggcagatgggccaaggtgaccaccattctgcctcaatcttttgcaagcccacctgcctctctcctgctgctcctccagctgtatctgcacctgcctctctgtcctggccaggggtggacaactggggtcccccaaaactcagtcctggcacctcaactgtgacaatcagcaaagccccacccaggcccccatctgggatgatgggagagctctggcagatgtcccaatcctggaggtcatccattaggaattaaattctccagcctc

SEQ ID NO: 14393 - DNA, 2393 bp, Homo sapiens
  source 1..2393: mol_type = unassigned DNA
aggctgccgggggctgcagacatggagggccagagcagcaggggcagcaggaggccagggacccgggctggcctgggttccctgcccatgccccagggtgttgcccaaactggggcaccctccaaggtggactcaagttttcagctcccagcaaagaagaacgcagccctaggaccctcggaaccaagcccctgacatggccctcccaaggcttggcacacagagtacagggcctggcaggtgcctgagccccaaccttcaggcccaagaagccccagccccagtcaccacctcctcttctacatccaccctgtcatcctccccttggtcagctcagcctacctggaagagcgaccccggcttccggatcactgtggtcacatggaacgtgggcactgccatgcccccagacgatgtcacatccctcctccacctgggcggtggtgacgacagcgacggcgcagacatgatcgccatagggttgcaggaagtgaactccatgctcaacaagcgactcaaggacgccctcttcacggaccagtggagtgagctgttcatggatgcgctagggcccttcaacttcgtgctggtgagttcggtgaggatgcagggtgtcatcctgctgctgttcgccaagtactaccacctgcccttcctgcgagacgtgcagaccgactgcacgcgcactggcctgggcggctactggggtaacaagggtggcgtgagcgtgcgcctggcggccttcgggcacatgctctgcttcctgaactgccacttgcctgcgcatatggacaaggcggagcagcgcaaagacaacttccagaccatcctcagcctccagcagttccaagggccgggcgcacagggcatcctggatcatgacctcgtgttctggttcggggacctgaacttccgcattgagagctatgacctgcactttgtcaagtttgccatcgacagtgaccagctccatcagctctgggagaaggaccagctcaacatggccaagaacacctggcccattctgaagggctttcaggaggggcccctcaacttcgctcccaccttcaagtttgatgtgggtaccaacaaatacgataccagtgccaagaaacggaagccagcttggacagaccgtatcctatggaaggtcaaggctccaggtgggggtcccagcccctcaggacggaagagccaccgactccaggtgacgcagcacagctaccgcagccacatggaatacacagtcagcgaccacaagcctgtggctgcccagttcctcctgcagtttgccttcagggacgacatgccactggtgcggctggaggtggcagatgagtgggtgcggcccgagcaggcggtggtgaggtaccgcatggaaacagtgttcgcccgcagctcctgggactggatcggcttataccgggtgggtttccgccattgcaaggactatgtggcttatgtctgggccaaacatgaagatgtggatgggaatacctaccaggtaacattcagtgaggaatcactgcccaagggccatggagacttcatcctgggctactatagtcacaaccacagcatcctcatcggcatcactgaacccttccagatctcgctgccttcctcggagttggccagcagcagcacagacagctcaggcaccagctcagagggagaggatgacagcacactggagctccttgcacccaagtcccgcagccccagtcctggcaagtccaagcgacaccgcagccgcagcccgggactggccaggttccctgggcttgccctacggccctcatcccgtgaacgccgtggtgccagccgtagcccctcaccccagagccgccgcctgtcccgagtggctcctgacaggagcagtaatggcagcagccggggcagtagtgaagaggggccctctgggttgcctggcccctgggccttcccaccagctgtgcctcgaagcctgggcctgttgcccgccttgcgcctagagactgtagaccctggtggtggtggctcctggggacctgatcgggaggccctggcgcccaacagcctgtctcctagtccccagggccatcgggggctggaggaagggggcctggggccctgagggtggggtaggcagatgggccaaggtgaccaccattctgcctcaatcttttgcaagcccacctgcctctctcctgctgctcctccagctgtatctgcacctgcctctctgtcctggccaggggtggacaactggggtcccccaaaactcagtcctggcacctcaactgtgacaatcagcaaagccccacccaggcccccatctgggatgatgggagagctctggcagatgtcccaatcctggaggtcatccattaggaattaaattctccagcctc

SEQ ID NO: 14394 - DNA, 2215 bp, Homo sapiens
  source 1..2215: mol_type = unassigned DNA
aggctgccgggggctgcagacatggagggccagagcagcaggggcagcaggaggccagggacccgggctggcctgggttccctgcccatgccccagggtgttgcccaaactggggcaccctccaaggtggactcaagttttcagctcccagcaaagaagaacgcagccctaggaccctcggaaccaaggatcactgtggtcacatggaacgtgggcactgccatgcccccagacgatgtcacatccctcctccacctgggcggtggtgacgacagcgacggcgcagacatgatcgccatagggttgcaggaagtgaactccatgctcaacaagcgactcaaggacgccctcttcacggaccagtggagtgagctgttcatggatgcgctagggcccttcaacttcgtgctggtgagttcggtgaggatgcagggtgtcatcctgctgctgttcgccaagtactaccacctgcccttcctgcgagacgtgcagaccgactgcacgcgcactggcctgggcggctactggggtaacaagggtggcgtgagcgtgcgcctggcggccttcgggcacatgctctgcttcctgaactgccacttgcctgcgcatatggacaaggcggagcagcgcaaagacaacttccagaccatcctcagcctccagcagttccaagggccgggcgcacagggcatcctggatcatgacctcgtgttctggttcggggacctgaacttccgcattgagagctatgacctgcactttgtcaagtttgccatcgacagtgaccagctccatcagctctgggagaaggaccagctcaacatggccaagaacacctggcccattctgaagggctttcaggaggggcccctcaacttcgctcccaccttcaagtttgatgtgggtaccaacaaatacgataccagtgccaagaaacggaagccagcttggacagaccgtatcctatggaaggtcaaggctccaggtgggggtcccagcccctcaggacggaagagccaccgactccaggtgacgcagcacagctaccgcagccacatggaatacacagtcagcgaccacaagcctgtggctgcccagttcctcctgcagtttgccttcagggacgacatgccactggtgcggctggaggtggcagatgagtgggtgcggcccgagcaggcggtggtgaggtaccgcatggaaacagtgttcgcccgcagctcctgggactggatcggcttataccgggtgggtttccgccattgcaaggactatgtggcttatgtctgggccaaacatgaagatgtggatgggaatacctaccaggtaacattcagtgaggaatcactgcccaagggccatggagacttcatcctgggctactatagtcacaaccacagcatcctcatcggcatcactgaacccttccagatctcgctgccttcctcggagttggccagcagcagcacagacagctcaggcaccagctcagagggagaggatgacagcacactggagctccttgcacccaagtcccgcagccccagtcctggcaagtccaagcgacaccgcagccgcagcccgggactggccaggttccctgggcttgccctacggccctcatcccgtgaacgccgtggtgccagccgtagcccctcaccccagagccgccgcctgtcccgagtggctcctgacaggagcagtaatggcagcagccggggcagtagtgaagaggggccctctgggttgcctggcccctgggccttcccaccagctgtgcctcgaagcctgggcctgttgcccgccttgcgcctagagactgtagaccctggtggtggtggctcctggggacctgatcgggaggccctggcgcccaacagcctgtctcctagtccccagggccatcgggggctggaggaagggggcctggggccctgagggtggggtaggcagatgggccaaggtgaccaccattctgcctcaatcttttgcaagcccacctgcctctctcctgctgctcctccagctgtatctgcacctgcctctctgtcctggccaggggtggacaactggggtcccccaaaactcagtcctggcacctcaactgtgacaatcagcaaagccccacccaggcccccatctgggatgatgggagagctctggcagatgtcccaatcctggaggtcatccattaggaattaaattctccagcctc

SEQ ID NO: 14395 - DNA, 2515 bp, Homo sapiens
  source 1..2515: mol_type = unassigned DNA
aggctgccgggggctgcagacatggagggccagagcagcaggggcagcaggaggccagggacccgggctggcctgggttccctgcccatgccccagggtgttgcccaaactggggcaccctccaagacagagaaactgaggcgctgggcagagaggtacttgcctaaggtcacacagagctgggctttgaatctacacagccagtctcagctcccagctcttgctcctgagtggagctctgggaatgggtggactcaagttttcagctcccagcaaagaagaacgcagccctaggaccctcggaaccaagcccctgacatggccctcccaaggcttggcacacagagtacagggcctggcaggtgcctgagccccaaccttcaggcccaagaagccccagccccagtcaccacctcctcttctacatccaccctgtcatcctccccttggtcagctcagcctacctggaagagcgaccccggcttccggatcactgtggtcacatggaacgtgggcactgccatgcccccagacgatgtcacatccctcctccacctgggcggtggtgacgacagcgacggcgcagacatgatcgccatagggttgcaggaagtgaactccatgctcaacaagcgactcaaggacgccctcttcacggaccagtggagtgagctgttcatggatgcgctagggcccttcaacttcgtgctggtgagttcggtgaggatgcagggtgtcatcctgctgctgttcgccaagtactaccacctgcccttcctgcgagacgtgcagaccgactgcacgcgcactggcctgggcggctactggggtaacaagggtggcgtgagcgtgcgcctggcggccttcgggcacatgctctgcttcctgaactgccacttgcctgcgcatatggacaaggcggagcagcgcaaagacaacttccagaccatcctcagcctccagcagttccaagggccgggcgcacagggcatcctggatcatgacctcgtgttctggttcggggacctgaacttccgcattgagagctatgacctgcactttgtcaagtttgccatcgacagtgaccagctccatcagctctgggagaaggaccagctcaacatggccaagaacacctggcccattctgaagggctttcaggaggggcccctcaacttcgctcccaccttcaagtttgatgtgggtaccaacaaatacgataccagtgccaagaaacggaagccagcttggacagaccgtatcctatggaaggtcaaggctccaggtgggggtcccagcccctcaggacggaagagccaccgactccaggtgacgcagcacagctaccgcagccacatggaatacacagtcagcgaccacaagcctgtggctgcccagttcctcctgcagtttgccttcagggacgacatgccactggtgcggctggaggtggcagatgagtgggtgcggcccgagcaggcggtggtgaggtaccgcatggaaacagtgttcgcccgcagctcctgggactggatcggcttataccgggtgggtttccgccattgcaaggactatgtggcttatgtctgggccaaacatgaagatgtggatgggaatacctaccaggtaacattcagtgaggaatcactgcccaagggccatggagacttcatcctgggctactatagtcacaaccacagcatcctcatcggcatcactgaacccttccagatctcgctgccttcctcggagttggccagcagcagcacagacagctcaggcaccagctcagagggagaggatgacagcacactggagctccttgcacccaagtcccgcagccccagtcctggcaagtccaagcgacaccgcagccgcagcccgggactggccaggttccctgggcttgccctacggccctcatcccgtgaacgccgtggtgccagccgtagcccctcaccccagagccgccgcctgtcccgagtggctcctgacaggagcagtaatggcagcagccggggcagtagtgaagaggggccctctgggttgcctggcccctgggccttcccaccagctgtgcctcgaagcctgggcctgttgcccgccttgcgcctagagactgtagaccctggtggtggtggctcctggggacctgatcgggaggccctggcgcccaacagcctgtctcctagtccccagggccatcgggggctggaggaagggggcctggggccctgagggtggggtaggcagatgggccaaggtgaccaccattctgcctcaatcttttgcaagcccacctgcctctctcctgctgctcctccagctgtatctgcacctgcctctctgtcctggccaggggtggacaactggggtcccccaaaactcagtcctggcacctcaactgtgacaatcagcaaagccccacccaggcccccatctgggatgatgggagagctctggcagatgtcccaatcctggaggtcatccattaggaattaaattctccagcctc

SEQ ID NO: 14396 - DNA, 3212 bp, Homo sapiens
  source 1..3212: mol_type = unassigned DNA
agagctggagccggagccaagggagtccaggctgccgggggctgcagacatggagggccagagcagcaggggcagcaggaggccagggacccgggctggcctgggttccctgcccatgccccagggtgttgcccaaactggggcaccctccaagacagagaaactgaggcgctgggcagagaggtacttgcctaaggtcacacagagctgggctttgaatctacacagccagtctcagctcccagctcttgctcctgagtggagctctgggaatgggtggactcaagttttcagctcccagcaaagaagaacgcagccctaggaccctcggaaccaaggttggctctggcacctgtagggccacgggcagctatgtcagcttcctcggaaggaccgaggctggctctggcatctccccgaccaatcctggctccactgtgtacccctgaagggcagaaaacagctactgcccaccgcagctccagcctggccccaacatctgtgggccagctggtgatgtctgcctcagctggaccaaagcctcccccagcgaccacaggctcagttctggctccgacgtccctggggctggtgatgcctgcctcagcagggccaagatctcccccagtcaccctggggcccaatctggccccaacctccagagaccagaagcaggagccacctgcctccgtgggacccaagccaacactggcagcctctggcctgagcctggccctggcttctgaggagcagcccccagaactcccctccaccccttccccggtgcccagtccagttctgtctccaactcaggaacaggccctggctccagcatccacggcatcaggcgcagcctctgtgggacagacatcagctagaaagagggatgccccagcccctagacctctccctgcttctgaggggcatctccagcctccagctcagacatctggtcctacaggctccccaccctgcatccaaacctccccagaccctcggctctccccctccttccgagcccggcctgaggccctccacagcagccctgaggatcctgttttgccacggccaccccagaccttgcccttggatgtgggccagggtccttcagagcctggcactcactcccctggacttctgtcccccaccttccggcctggggccccctcaggccagactgtgcccccacctctgcccaagccaccccgatcacccagccgttccccaagccactccccgaatcgctctccctgtgttcccccagcccctgacatggccctcccaaggcttggcacacagagtacagggcctggcaggtgcctgagccccaaccttcaggcccaagaagccccagccccagtcaccacctcctcttctacatccaccctgtcatcctccccttggtcagctcagcctacctggaagagcgaccccggcttccggatcactgtggtcacatggaacgtgggcactgccatgcccccagacgatgtcacatccctcctccacctgggcggtggtgacgacagcgacggcgcagacatgatcgccatagggttgcaggaagtgaactccatgctcaacaagcgactcaaggacgccctcttcacggaccagtggagtgagctgttcatggatgcgctagggcccttcaacttcgtgctggtgagttcggtgaggatgcagggtgtcatcctgctgctgttcgccaagtactaccacctgcccttcctgcgagacgtgcagaccgactgcacgcgcactggcctgggcggctactggggtaacaagggtggcgtgagcgtgcgcctggcggccttcgggcacatgctctgcttcctgaactgccacttgcctgcgcatatggacaaggcggagcagcgcaaagacaacttccagaccatcctcagcctccagcagttccaagggccgggcgcacagggcatcctggatcatgacctcgtgttctggttcggggacctgaacttccgcattgagagctatgacctgcactttgtcaagtttgccatcgacagtgaccagctccatcagctctgggagaaggaccagctcaacatggccaagaacacctggcccattctgaagggctttcaggaggggcccctcaacttcgctcccaccttcaagtttgatgtgggtaccaacaaatacgataccagtgccaagaaacggaagccagcttggacagaccgtatcctatggaaggtcaaggctccaggtgggggtcccagcccctcaggacggaagagccaccgactccaggtgacgcagcacagctaccgcagccacatggaatacacagtcagcgaccacaagcctgtggctgcccagttcctcctgcagtttgccttcagggacgacatgccactggtgcggctggaggtggcagatgagtgggtgcggcccgagcaggcggtggtgaggtaccgcatggaaacagtgttcgcccgcagctcctgggactggatcggcttataccgggtgggtttccgccattgcaaggactatgtggcttatgtctgggccaaacatgaagatgtggatgggaatacctaccaggtaacattcagtgaggaatcactgcccaagggccatggagacttcatcctgggctactatagtcacaaccacagcatcctcatcggcatcactgaacccttccagatctcgctgccttcctcggagttggccagcagcagcacagacagctcaggcaccagctcagagggagaggatgacagcacactggagctccttgcacccaagtcccgcagccccagtcctggcaagtccaagcgacaccgcagccgcagcccgggactggccaggttccctgggcttgccctacggccctcatcccgtgaacgccgtggtgccagccgtagcccctcaccccagagccgccgcctgtcccgagtggctcctgacaggagcagtaatggcagcagccggggcagtagtgaagaggggccctctgggttgcctggcccctgggccttcccaccagctgtgcctcgaagcctgggcctgttgcccgccttgcgcctagagactgtagaccctggtggtggtggctcctggggacctgatcgggaggccctggcgcccaacagcctgtctcctagtccccagggccatcgggggctggaggaagggggcctggggccctgagggtggggtaggcagatggg

SEQ ID NO: 14397 - DNA, 4728 bp, Homo sapiens
  source 1..4728: mol_type = unassigned DNA
atggtcccctgctggaaccatggcaacatcacccgctccaaggcggaggagctgctttccaggacaggcaaggacgggagcttcctcgtgcgtgccagcgagtccatctcccgggcatacgcgctctgcgtgctgtatcggaattgcgtttacacttacagaattctgcccaatgaagatgataaattcactgttcaggcatccgaaggcgtctccatgaggttcttcaccaagctggaccagctcatcgagttttacaagaaggaaaacatggggctggtgacccatctgcaataccctgtgccgctggaggaagaggacacaggcgacgaccctgaggaggacacagtagaaagtgtcgtgtctccacccgagctgcccccaagaaacatcccgctgactgccagctcctgtgaggccaaggaggttcctttttcaaacgagaatccccgagcgaccgagaccagccggccgagcctctccgagacattgttccagcgactgcaaagcatggacaccagtgggcttccagaagagcatcttaaggccatccaagattatttaagcactcagctcgcccaggactctgaatttgtgaagacagggtccagcagtcttcctcacctgaagaaactgaccacactgctctgcaaggagctctatgggcagatgctgagaactgttcctgggatagggaaagtcaaggaggaggaccatgttcctggtgaggccaatcccatcaacatggtgtccaagctcagccaactgacaagcctgttgtcgtccattgaagacaaggtcaaggccttgctgcacgagggtcctgagtctccgcaccggccctcccttatccctccagtcacctttgaggtgaaggcagagtctctggggattcctcagaaaatgcagctcaaagtcgacgttgagtctgggaaactgatcattaagaagtccaaggatggttctgaggacaagttctacagccacaagaaaatcctgcagctcattaagtcacagaaatttctgaataagttggtgatcttggtggaaacagagaaggagaagatcctgcggaaggaatatgtttttgctgactccaaaaagagagaaggcttctgccagctcctgcagcagatgaagaacaagcactcagagcagccggagcccgacatgatcaccatcttcatcggcacctggaacatgggtaacgccccccctcccaagaagatcacgtcctggtttctctccaaggggcagggaaagacgcgggacgactctgcggactacatcccccatgacatttacgtgatcggcacccaagaggaccccctgagtgagaaggagtggctggagatcctcaaacactccctgcaagaaatcaccagtgtgacttttaaaacagtcgccatccacacgctctggaacatccgcatcgtggtgctggccaagcctgagcacgagaaccggatcagccacatctgtactgacaacgtgaagacaggcattgcaaacacactggggaacaagggagccgtgggggtgtcgttcatgttcaatggaacctccttagggttcgtcaacagccacttgacttcaggaagtgaaaagaaactcaggcgaaaccaaaactatatgaacattctccggttcctggccctgggcgacaagaagctgagtccctttaacatcactcaccgcttcacgcacctcttctggtttggggatcttaactaccgtgtggatctgcctacctgggaggcagaaaccatcatccagaaaatcaagcagcagcagtacgcagacctcctgtcccacgaccagctgctcacagagaggagggagcagaaggtcttcctacacttcgaggaggaagaaatcacgtttgccccaacctaccgttttgagagactgactcgggacaaatacgcctacaccaagcagaaagcgacagggatgaagtacaacttgccttcctggtgtgaccgagtcctctggaagtcttatcccctggtgcacgtggtgtgtcagtcttatggcagtaccagcgacatcatgacgagtgaccacagccctgtctttgccacatttgaggcaggagtcacttcccagtttgtctccaagaacggtcccgggactgttgacagccaaggacagattgagtttctcaggtgctatgccacattgaagaccaagtcccagaccaaattctacctggagttccactcgagctgcttggagagttttgtcaagagtcaggaaggagaaaatgaagaaggaagtgagggggagctggtggtgaagtttggtgagactcttccaaagctgaagcccattatctctgaccctgagtacctgctagaccagcacatcctcatcagcatcaagtcctctgacagcgacgaatcctatggcgagggctgcattgcccttcggttagaggccacagaaacgcagctgcccatctacacgcctctcacccaccatggggagttgacaggccacttccagggggagatcaagctgcagacctctcagggcaagacgagggagaagctctatgactttgtgaagacggagcgtgatgaatccagtgggccaaagaccctgaagagcctcaccagccacgaccccatgaagcagtgggaagtcactagcagggcccctccgtgcagtggctccagcatcactgaaatcatcaaccccaactacatgggagtggggccctttgggccaccaatgcccctgcacgtgaagcagaccttgtcccctgaccagcagcccacagcctggagctacgaccagccgcccaaggactccccgctggggccctgcaggggagaaagtcctccgacacctcccggccagccgcccatatcacccaagaagtttttaccctcaacagcaaaccggggtctccctcccaggacacaggagtcaaggcccagtgacctggggaagaacgcaggggacacgctgcctcaggaggacctgccgctgacgaagcccgagatgtttgagaaccccctgtatgggtccctgagttccttccctaagcctgctcccaggaaggaccaggaatcccccaaaatgccgcggaaggaacccccgccctgcccggaacccggcatcttgtcgcccagcatcgtgctcaccaaagcccaggaggctgatcgcggcgaggggcccggcaagcaggtgcccgcgccccggctgcgctccttcacgtgctcatcctctgccgagggcagggcggccggcggggacaagagccaagggaagcccaagaccccggtcagctcccaggccccggtgccggccaagaggcccatcaagccttccagatcggaaatcaaccagcagaccccgcccaccccgacgccgcggccgccgctgccagtcaagagcccggcggtgctgcacctccagcactccaagggccgcgactaccgcgacaacaccgagctcccgcatcacggcaagcaccggccggaggaggggccaccagggcctctaggcaggactgccatgcagtgaagccctcagtgagctgccactgagtcgggagcccagaggaacggcgtgaagccactggaccctctcccgggacctcctgctggctcctcctgcccagcttcctatgcaaggctttgtgttttcaggaaagggcctagcttctgtgtggcccacagagttcactgcctgtgagacttagcaccaagtgctgaggctggaagaaaaacgcacaccagacgggcaacaaacagtctgggtccccagctcgctcttggtacttgggaccccagtgcctcgttgagggcgccattctgaagaaaggaactgcagcgccgatttgagggtggagatatagataataataatattaataataataatggccacatggatcgaacactcatgatgtgccaagtgctgtgctaagtgctttacgaacattcgtcatatcaggatgacctcgagagctgaggctctagccacctaaaaccacgtgcccaaacccaccagtttaaaacggtgtgtgttcggaggggtgaaagcattaagaagcccagtgccctcctggagtgagacaagggctcggccttaaggagctgaagagtctgggtagcttgtttagggtacaagaagcctgttctgtccagcttcagtgacacaagctgctttagctaaagtcccgcgggttccggcatggctaggctgagagcagggatctacctggcttctcagttctttggttggaaggagcaggaaatcagctcctattctccagtggagagatctggcctcagcttgggctagagatgccaaggcctgtgccaggttccctgtgccctcctcgaggtgggcagccatcaccagccacagttaagccaagccccccaacatgtattccatcgtgctggtagaagagtctttgctgttgctcccgaaagccgtgctctccagcctggctgccagggagggtgggcctcttggttccaggctcttgaaatagtgcagccttttcttcctatctctgtggctttcagctctgcttccttggttattaggagaatagatgggtgatgtctttccttatgttgctttttcaacatagcagaattaatgtagggagctaaatccagtggtgtgtgtgaatgcagaagggaatgcaccccacattcccatgatggaagtctgcgtaaccaataaattgtgcctttctcactc

SEQ ID NO: 14398 - DNA, 3628 bp, Homo sapiens
  source 1..3628: mol_type = unassigned DNA
aagagagaaggcttctgccagctcctgcagcagatgaagaacaagcactcagagcagccggagcccgacatgatcaccatcttcatcggcacctggaacatgggtaacgccccccctcccaagaagatcacgtcctggtttctctccaaggggcagggaaagacgcgggacgactctgcggactacatcccccatgacatttacgtgatcggcacccaagaggaccccctgagtgagaaggagtggctggagatcctcaaacactccctgcaagaaatcaccagtgtgacttttaaaacagtcgccatccacacgctctggaacatccgcatcgtggtgctggccaagcctgagcacgagaaccggatcagccacatctgtactgacaacgtgaagacaggcattgcaaacacactggggaacaagggagccgtgggggtgtcgttcatgttcaatggaacctccttagggttcgtcaacagccacttgacttcaggaagtgaaaagaaactcaggcgaaaccaaaactatatgaacattctccggttcctggccctgggcgacaagaagctgagtccctttaacatcactcaccgcttcacgcacctcttctggtttggggatcttaactaccgtgtggatctgcctacctgggaggcagaaaccatcatccagaaaatcaagcagcagcagtacgcagacctcctgtcccacgaccagctgctcacagagaggagggagcagaaggtcttcctacacttcgaggaggaagaaatcacgtttgccccaacctaccgttttgagagactgactcgggacaaatacgcctacaccaagcagaaagcgacagggatgaagtacaacttgccttcctggtgtgaccgagtcctctggaagtcttatcccctggtgcacgtggtgtgtcagtcttatggcagtaccagcgacatcatgacgagtgaccacagccctgtctttgccacatttgaggcaggagtcacttcccagtttgtctccaagaacggtcccgggactgttgacagccaaggacagattgagtttctcaggtgctatgccacattgaagaccaagtcccagaccaaattctacctggagttccactcgagctgcttggagagttttgtcaagagtcaggaaggagaaaatgaagaaggaagtgagggggagctggtggtgaagtttggtgagactcttccaaagctgaagcccattatctctgaccctgagtacctgctagaccagcacatcctcatcagcatcaagtcctctgacagcgacgaatcctatggcgagggctgcattgcccttcggttagaggccacagaaacgcagctgcccatctacacgcctctcacccaccatggggagttgacaggccacttccagggggagatcaagctgcagacctctcagggcaagacgagggagaagctctatgactttgtgaagacggagcgtgatgaatccagtgggccaaagaccctgaagagcctcaccagccacgaccccatgaagcagtgggaagtcactagcagggcccctccgtgcagtggctccagcatcactgaaatcatcaaccccaactacatgggagtggggccctttgggccaccaatgcccctgcacgtgaagcagaccttgtcccctgaccagcagcccacagcctggagctacgaccagccgcccaaggactccccgctggggccctgcaggggagaaagtcctccgacacctcccggccagccgcccatatcacccaagaagtttttaccctcaacagcaaaccggggtctccctcccaggacacaggagtcaaggcccagtgacctggggaagaacgcaggggacacgctgcctcaggaggacctgccgctgacgaagcccgagatgtttgagaaccccctgtatgggtccctgagttccttccctaagcctgctcccaggaaggaccaggaatcccccaaaatgccgcggaaggaacccccgccctgcccggaacccggcatcttgtcgcccagcatcgtgctcaccaaagcccaggaggctgatcgcggcgaggggcccggcaagcaggtgcccgcgccccggctgcgctccttcacgtgctcatcctctgccgagggcagggcggccggcggggacaagagccaagggaagcccaagaccccggtcagctcccaggccccggtgccggccaagaggcccatcaagccttccagatcggaaatcaaccagcagaccccgcccaccccgacgccgcggccgccgctgccagtcaagagcccggcggtgctgcacctccagcactccaagggccgcgactaccgcgacaacaccgagctcccgcatcacggcaagcaccggccggaggaggggccaccagggcctctaggcaggactgccatgcagtgaagccctcagtgagctgccactgagtcgggagcccagaggaacggcgtgaagccactggaccctctcccgggacctcctgctggctcctcctgcccagcttcctatgcaaggctttgtgttttcaggaaagggcctagcttctgtgtggcccacagagttcactgcctgtgagacttagcaccaagtgctgaggctggaagaaaaacgcacaccagacgggcaacaaacagtctgggtccccagctcgctcttggtacttgggaccccagtgcctcgttgagggcgccattctgaagaaaggaactgcagcgccgatttgagggtggagatatagataataataatattaataataataatggccacatggatcgaacactcatgatgtgccaagtgctgtgctaagtgctttacgaacattcgtcatatcaggatgacctcgagagctgaggctctagccacctaaaaccacgtgcccaaacccaccagtttaaaacggtgtgtgttcggaggggtgaaagcattaagaagcccagtgccctcctggagtgagacaagggctcggccttaaggagctgaagagtctgggtagcttgtttagggtacaagaagcctgttctgtccagcttcagtgacacaagctgctttagctaaagtcccgcgggttccggcatggctaggctgagagcagggatctacctggcttctcagttctttggttggaaggagcaggaaatcagctcctattctccagtggagagatctggcctcagcttgggctagagatgccaaggcctgtgccaggttccctgtgccctcctcgaggtgggcagccatcaccagccacagttaagccaagccccccaacatgtattccatcgtgctggtagaagagtctttgctgttgctcccgaaagccgtgctctccagcctggctgccagggagggtgggcctcttggttccaggctcttgaaatagtgcagccttttcttcctatctctgtggctttcagctctgcttccttggttattaggagaatagatgggtgatgtctttccttatgttgctttttcaacatagcagaattaatgtagggagctaaatccagtggtgtgtgtgaatgcagaagggaatgcaccccacattcccatgatggaagtctgcgtaaccaataaattgtgcctttctcactca

SEQ ID NO: 14399 - DNA, 1174 bp, Homo sapiens
  source 1..1174: mol_type = unassigned DNA
ctagggcatggcatcccacgtgggtgtcagcacggccgcagaagaaccacttctctggcccacccatgcctgctaggccatgcttcttcagaagtggccacaactctcctgacgtctccagagccggtcattccacccagggggacttcagctgccactggacacttcaattgtacgctgcgaccagttgccaggaaggagagggctggcaagagagccgcggcagccgtggcagggtgtaggggacggtggacggccagggcccccccctctctctctttctctctctctctcttgcttggtttctgtaatgaggaagttctccgcagctcagtttcctttccctcactgagcgcctgaaacaggaagtcagtcagttaagctggtggcagcagccgaggccaccaagaggcaacgggcggcaggttgcagtggaggggcctccgctcccctcggtggtgtgtgggtcctgggggtgcctgccggcccggccgaggaggcccacgcccaccatggtcccctgctggaaccatggcaacatcacccgctccaaggcggaggagctgctttccaggacaggcaaggacgggagcttcctcgtgcgtgccagcgagtccatctcccgggcatacgcgctctgcgtgctgtatcggaattgcgtttacacttacagaattctgcccaatgaagatgataaattcactgttcaggcatccgaaggcgtctccatgaggttcttcaccaagctggaccagctcatcgagttttacaagaaggaaaacatggggctggtgacccatctgcaataccctgtgccgctggaggaagaggacacaggcgacgaccctgaggaggacacagaaagtgtcgtgtctccacccgagctgcccccaagaaacatcccgctgactgccagctcctgtgaggccaaggaggttcctttttcaaacgagaatccccgagcgaccgagaccagccggccgagcctctccgagacattgttccagcgactgcaaagcatggacaccagtgggcttccagaagagcatcttaaggccatccaagattatttaagcactcagctcgcccaggactctgaatttgtgaagacagggtccagcagtcttcctcacctgaagaaactgaccacactgctctgcaaggagctctatgg

SEQ ID NO: 14400 - DNA, 3622 bp, Homo sapiens
  source 1..3622: mol_type = unassigned DNA
aagagagaaggcttctgccagctcctgcagcagatgaagaacaagcactcagagcagccggagcccgacatgatcaccatcttcatcggcacctggaacatgggtaacgccccccctcccaagaagatcacgtcctggtttctctccaaggggcagggaaagacgcgggacgactctgcggactacatcccccatgacatttacgtgatcggcacccaagaggaccccctgagtgagaaggagtggctggagatcctcaaacactccctgcaagaaatcaccagtgtgacttttaaaacagtcgccatccacacgctctggaacatccgcatcgtggtgctggccaagcctgagcacgagaaccggatcagccacatctgtactgacaacgtgaagacaggcattgcaaacacactggggaacaagggagccgtgggggtgtcgttcatgttcaatggaacctccttagggttcgtcaacagccacttgacttcaggaagtgaaaagaaactcaggcgaaaccaaaactatatgaacattctccggttcctggccctgggcgacaagaagctgagtccctttaacatcactcaccgcttcacgcacctcttctggtttggggatcttaactaccgtgtggatctgcctacctgggaggcagaaaccatcatccagaaaatcaagcagcagcagtacgcagacctcctgtcccacgaccagctgctcacagagaggagggagcagaaggtcttcctacacttcgaggaggaagaaatcacgtttgccccaacctaccgttttgagagactgactcgggacaaatacgcctacaccaagcagaaagcgacagggatgaagtacaacttgccttcctggtgtgaccgagtcctctggaagtcttatcccctggtgcacgtggtgtgtcagtcttatggcagtaccagcgacatcatgacgagtgaccacagccctgtctttgccacatttgaggcaggagtcacttcccagtttgtctccaagaacggtcccgggactgttgacagccaaggacagattgagtttctcaggtgctatgccacattgaagaccaagtcccagaccaaattctacctggagttccactcgagctgcttggagagttttgtcaagagtcaggaaggagaaaatgaagaaggaagtgagggggagctggtggtgaagtttggtgagactcttccaaagctgaagcccattatctctgaccctgagtacctgctagaccagcacatcctcatcagcatcaagtcctctgacagcgacgaatcctatggcgagggctgcattgcccttcggttagaggccacagaaacgcagctgcccatctacacgcctctcacccaccatggggagttgacaggccacttccagggggagatcaagctgcagacctctcagggcaagacgagggagaagctctatgactttgtgaagacggagcgtgatgaatccagtgggccaaagaccctgaagagcctcaccagccacgaccccatgaagcagtgggaagtcactagcagggcccctccgtgcagtggctccagcatcactgaaatcatcaaccccaactacatgggagtggggccctttgggccaccaatgcccctgcacgtgaagcagaccttgtcccctgaccagcagcccacagcctggagctacgaccagccgcccaaggactccccgctggggccctgcaggggagaaagtcctccgacacctcccggccagccgcccatatcacccaagaagtttttaccctcaacagcaaaccggggtctccctcccaggacacaggagtcaaggcccagtgacctggggaagaacgcaggggacacgctgcctcaggaggacctgccgctgacgaagcccgagatgtttgagaaccccctgtatgggtccctgagttccttccctaagcctgctcccaggaaggaccaggaatcccccaaaatgccgcggaaggaacccccgccctgcccggaacccggcatcttgtcgcccagcatcgtgctcaccaaagcccaggaggctgatcgcggcgaggggcccggcaagcaggtgcccgcgccccggctgcgctccttcacgtgctcatcctctgccgagggcagggcggccggcggggacaagagccaagggaagcccaagaccccggtcagctcccaggccccggtgccggccaagaggcccatcaagccttccagatcggaaatcaaccagcagaccccgcccaccccgacgccgcggccgccgctgccagtcaagagcccggcggtgctgcacctccagcactccaagggccgcgactaccgcgacaacaccgagctcccgcatcacggcaagcaccggccggaggaggggccaccagggcctctaggcaggactgccatgcagtgaagccctcagtgagctgccactgagtcgggagcccagaggaacggcgtgaagccactggaccctctcccgggacctcctgctggctcctcctgcccagcttcctatgcaaggctttgtgttttcaggaaagggcctagcttctgtgtggcccacagagttcactgcctgtgagacttagcaccaagtgctgaggctggaagaaaaacgcacaccagacgggcaacaaacagtctgggtccccagctcgctcttggtacttgggaccccagtgcctcgttgagggcgccattctgaagaaaggaactgcagcgccgatttgagggtggagatatagataataataatattaataataataatggccacatggatcgaacactcatgatgtgccaagtgctgtgctaagtgctttacgaacattcgtcatatcaggatgacctcgagagctgaggctctagccacctaaaaccacgtgcccaaacccaccagtttaaaacggtgtgtgttcggaggggtgaaagcattaagaagcccagtgccctcctggagtgagacaagggctcggccttaaggagctgaagagtctgggtagcttgtttagggtacaagaagcctgttctgtccagcttcagtgacacaagctgctttagctaaagtcccgcgggttccggcatggctaggctgagagcagggatctacctggcttctcagttctttggttggaaggagcaggaaatcagctcctattctccagtggagagatctggcctcagcttgggctagagatgccaaggcctgtgccaggttccctgtgccctcctcgaggtgggcagccatcaccagccacagttaagccaagccccccaacatgtattccatcgtgctggtagaagagtctttgctgttgctcccgaaagccgtgctctccagcctggctgccagggagggtgggcctcttggttccaggctcttgaaatagtgcagccttttcttcctatctctgtggctttcagctctgcttccttggttattaggagaatagatgggtgatgtctttccttatgttgctttttcaacatagcagaattaatgtagggagctaaatccagtggtgtgtgtgaatgcagaagggaatgcaccccacattcccatgatggaagtctgcgtaaccaataaattgtgcctttct

SEQ ID NO: 14401 - DNA, 3628 bp, Homo sapiens; identical to SEQ ID NO: 14398
  source 1..3628: mol_type = unassigned DNA

SEQ ID NO: 14402 - DNA, 4020 bp, Homo sapiens
  source 1..4020: mol_type = unassigned DNA
cgacctcaggttcctggtgaggccaatcccatcaacatggtgtccaagctcagccaactgacaagcctgttgtcgtccattgaagacaaggtcaaggccttgctgcacgagggtcctgagtctccgcaccggccctcccttatccctccagtcacctttgaggtgaaggcagagtctctggggattcctcagaaaatgcagctcaaagtcgacgttgagtctgggaaactgatcattaagaagtccaaggatggttctgaggacaagttctacagccacaagaaaatcctgcagctcattaagtcacagaaatttctgaataagttggtgatcttggtggaaacagagaaggagaagatcctgcggaaggaatatgtttttgctgactccaaaaagagagaaggcttctgccagctcctgcagcagatgaagaacaagcactcagagcagccggagcccgacatgatcaccatcttcatcggcacctggaacatgggtaacgccccccctcccaagaagatcacgtcctggtttctctccaaggggcagggaaagacgcgggacgactctgcggactacatcccccatgacatttacgtgatcggcacccaagaggaccccctgagtgagaaggagtggctggagatcctcaaacactccctgcaagaaatcaccagtgtgacttttaaaacagtcgccatccacacgctctggaacatccgcatcgtggtgctggccaagcctgagcacgagaaccggatcagccacatctgtactgacaacgtgaagacaggcattgcaaacacactggggaacaagggagccgtgggggtgtcgttcatgttcaatggaacctccttagggttcgtcaacagccacttgacttcaggaagtgaaaagaaactcaggcgaaaccaaaactatatgaacattctccggttcctggccctgggcgacaagaagctgagtccctttaacatcactcaccgcttcacgcacctcttctggtttggggatcttaactaccgtgtggatctgcctacctgggaggcagaaaccatcatccagaaaatcaagcagcagcagtacgcagacctcctgtcccacgaccagctgctcacagagaggagggagcagaaggtcttcctacacttcgaggaggaagaaatcacgtttgccccaacctaccgttttgagagactgactcgggacaaatacgcctacaccaagcagaaagcgacagggatgaagtacaacttgccttcctggtgtgaccgagtcctctggaagtcttatcccctggtgcacgtggtgtgtcagtcttatggcagtaccagcgacatcatgacgagtgaccacagccctgtctttgccacatttgaggcaggagtcacttcccagtttgtctccaagaacggtcccgggactgttgacagccaaggacagattgagtttctcaggtgctatgccacattgaagaccaagtcccagaccaaattctacctggagttccactcgagctgcttggagagttttgtcaagagtcaggaaggagaaaatgaagaaggaagtgagggggagctggtggtgaagtttggtgagactcttccaaagctgaagcccattatctctgaccctgagtacctgctagaccagcacatcctcatcagcatcaagtcctctgacagcgacgaatcctatggcgagggctgcattgcccttcggttagaggccacagaaacgcagctgcccatctacacgcctctcacccaccatggggagttgacaggccacttccagggggagatcaagctgcagacctctcagggcaagacgagggagaagctctatgactttgtgaagacggagcgtgatgaatccagtgggccaaagaccctgaagagcctcaccagccacgaccccatgaagcagtgggaagtcactagcagggcccctccgtgcagtggctccagcatcactgaaatcatcaaccccaactacatgggagtggggccctttgggccaccaatgcccctgcacgtgaagcagaccttgtcccctgaccagcagcccacagcctggagctacgaccagccgcccaaggactccccgctggggccctgcaggggagaaagtcctccgacacctcccggccagccgcccatatcacccaagaagtttttaccctcaacagcaaaccggggtctccctcccaggacacaggagtcaaggcccagtgacctggggaagaacgcaggggacacgctgcctcaggaggacctgccgctgacgaagcccgagatgtttgagaaccccctgtatgggtccctgagttccttccctaagcctgctcccaggaaggaccaggaatcccccaaaatgccgcggaaggaacccccgccctgcccggaacccggcatcttgtcgcccagcatcgtgctcaccaaagcccaggaggctgatcgcggcgaggggcccggcaagcaggtgcccgcgccccggctgcgctccttcacgtgctcatcctctgccgagggcagggcggccggcggggacaagagccaagggaagcccaagaccccggtcagctcccaggccccggtgccggccaagaggcccatcaagccttccagatcggaaatcaaccagcagaccccgcccaccccgacgccgcggccgccgctgccagtcaagagcccggcggtgctgcacctccagcactccaagggccgcgactaccgcgacaacaccgagctcccgcatcacggcaagcaccggccggaggaggggccaccagggcctctaggcaggactgccatgcagtgaagccctcagtgagctgccactgagtcgggagcccagaggaacggcgtgaagccactggaccctctcccgggacctcctgctggctcctcctgcccagcttcctatgcaaggctttgtgttttcaggaaagggcctagcttctgtgtggcccacagagttcactgcctgtgagacttagcaccaagtgctgaggctggaagaaaaacgcacaccagacgggcaacaaacagtctgggtccccagctcgctcttggtacttgggaccccagtgcctcgttgagggcgccattctgaagaaaggaactgcagcgccgatttgagggtggagatatagataataataatattaataataataatggccacatggatcgaacactcatgatgtgccaagtgctgtgctaagtgctttacgaacattcgtcatatcaggatgacctcgagagctgaggctctagccacctaaaaccacgtgcccaaacccaccagtttaaaacggtgtgtgttcggaggggtgaaagcattaagaagcccagtgccctcctggagtgagacaagggctcggccttaaggagctgaagagtctgggtagcttgtttagggtacaagaagcctgttctgtccagcttcagtgacacaagctgctttagctaaagtcccgcgggttccggcatggctaggctgagagcagggatctacctggcttctcagttctttggttggaaggagcaggaaatcagctcctattctccagtggagagatctggcctcagcttgggctagagatgccaaggcctgtgccaggttccctgtgccctcctcgaggtgggcagccatcaccagccacagttaagccaagccccccaacatgtattccatcgtgctggtagaagagtctttgctgttgctcccgaaagccgtgctctccagcctggctgccagggagggtgggcctcttggttccaggctcttgaaatagtgcagccttttcttcctatctctgtggctttcagctctgcttccttggttattaggagaatagatgggtgatgtctttccttatgttgctttttcaacatagcagaattaatgtagggagctaaatccagtggtgtgtgtgaatgcagaagggaatgcaccccacattcccatgatggaagtctgcgtaaccaataaattgtgcctttctcactc

SEQ ID NO: 14403 - DNA, 792 bp, Homo sapiens
  source 1..792: mol_type = unassigned DNA
gtggcagcagccgaggccaccaagaggcaacgggcggcaggttgcagtggaggggcctccgctcccctcggtggtgtgtgggtcctgggggtgcctgccggcccggccgaggaggcccacgcccaccatggtcccctgctggaaccatggcaacatcacccgctccaaggcggaggagctgctttccaggacaggcaaggacgggagcttcctcgtgcgtgccagcgagtccatctcccgggcatacgcgctctgcgtgctgtatcggaattgcgtttacacttacagaattctgcccaatgaagatgataaattcactgttcaggcatccgaaggcgtctccatgaggttcttcaccaagctggaccagctcatcgagttttacaagaaggaaaacatggggctggtgacccatctgcaataccctgtgccgctggaggaagaggacacaggcgacgaccctgaggaggacacagtagaaagtgtcgtgtctccacccgagctgcccccaagaaacatcccgctgactgccagctcctgtgaggccaaggaggttcctttttcaaacgagaatccccgagcgaccgagaccagccggccgagcctctccgagacattgttccagcgactgcaaagcatggacaccagtgggcttccagaagagcatcttaaggccatccaagattatttaagcactcagctcgcccaggactctgaatttgtgaagacagggtccagcagtcttcctcacctgaagaaactgaccacactgctctgcaaggagctctatgg

SEQ ID NO: 14404 - DNA, 4021 bp, Homo sapiens
  source 1..4021: mol_type = unassigned DNA
cctcctcaggttcctggtgaggccaatcccatcaacatggtgtccaagctcagccaactgacaagcctgttgtcgtccattgaagacaaggtcaaggccttgctgcacgagggtcctgagtctccgcaccggccctcccttatccctccagtcacctttgaggtgaaggcagagtctctggggattcctcagaaaatgcagctcaaagtcgacgttgagtctgggaaactgatcattaagaagtccaaggatggttctgaggacaagttctacagccacaagaaaatcctgcagctcattaagtcacagaaatttctgaataagttggtgatcttggtggaaacagagaaggagaagatcctgcggaaggaatatgtttttgctgactccaaaaagagagaaggcttctgccagctcctgcagcagatgaagaacaagcactcagagcagccggagcccgacatgatcaccatcttcatcggcacctggaacatgggtaacgccccccctcccaagaagatcacgtcctggtttctctccaaggggcagggaaagacgcgggacgactctgcggactacatcccccatgacatttacgtgatcggcacccaagaggaccccctgagtgagaaggagtggctggagatcctcaaacactccctgcaagaaatcaccagtgtgacttttaaaacagtcgccatccacacgctctggaacatccgcatcgtggtgctggccaagcctgagcacgagaaccggatcagccacatctgtactgacaacgtgaagacaggcattgcaaacacactggggaacaagggagccgtgggggtgtcgttcatgttcaatggaacctccttagggttcgtcaacagccacttgacttcaggaagtgaaaagaaactcaggcgaaaccaaaactatatgaacattctccggttcctggccctgggcgacaagaagctgagtccctttaacatcactcaccgcttcacgcacctcttctggtttggggatcttaactaccgtgtggatctgcctacctgggaggcagaaaccatcatccagaaaatcaagcagcagcagtacgcagacctcctgtcccacgaccagctgctcacagagaggagggagcagaaggtcttcctacacttcgaggaggaagaaatcacgtttgccccaacctaccgttttgagagactgactcgggacaaatacgcctacaccaagcagaaagcgacagggatgaagtacaacttgccttcctggtgtgaccgagtcctctggaagtcttatcccctggtgcacgtggtgtgtcagtcttatggcagtaccagcgacatcatgacgagtgaccacagccctgtctttgccacatttgaggcaggagtcacttcccagtttgtctccaagaacggtcccgggactgttgacagccaaggacagattgagtttctcaggtgctatgccacattgaagaccaagtcccagaccaaattctacctggagttccactcgagctgcttggagagttttgtcaagagtcaggaaggagaaaatgaagaaggaagtgagggggagctggtggtgaagtttggtgagactcttccaaagctgaagcccattatctctgaccctgagtacctgctagaccagcacatcctcatcagcatcaagtcctctgacagcgacgaatcctatggcgagggctgcattgcccttcggttagaggccacagaaacgcagctgcccatctacacgcctctcacccaccatggggagttgacaggccacttccagggggagatcaagctgcagacctctcagggcaagacgagggagaagctctatgactttgtgaagacggagcgtgatgaatccagtgggccaaagaccctgaagagcctcaccagccacgaccccatgaagcagtgggaagtcactagcagggcccctccgtgcagtggctccagcatcactgaaatcatcaaccccaactacatgggagtggggccctttgggccaccaatgcccctgcacgtgaagcagaccttgtcccctgaccagcagcccacagcctggagctacgaccagccgcccaaggactccccgctggggccctgcaggggagaaagtcctccgacacctcccggccagccgcccatatcacccaagaagtttttaccctcaacagcaaaccggggtctccctcccaggacacaggagtcaaggcccagtgacctggggaagaacgcaggggacacgctgcctcaggaggacctgccgctgacgaagcccgagatgtttgagaaccccctgtatgggtccctgagttccttccctaagcctgctcccaggaaggaccaggaatcccccaaaatgccgcggaaggaacccccgccctgcccggaacccggcatcttgtcgcccagcatcgtgctcaccaaagcccaggaggctgatcgcggcgaggggcccggcaagcaggtgcccgcgccccggctgcgctccttcacgtgctcatcctctgccgagggcagggcggccggcggggacaagagccaagggaagcccaagaccccggtcagctcccaggccccggtgccggccaagaggcccatcaagccttccagatcggaaatcaaccagcagaccccgcccaccccgacgccgcggccgccgctgccagtcaagagcccggcggtgctgcacctccagcactccaagggccgcgactaccgcgacaacaccgagctcccgcatcacggcaagcaccggccggaggaggggccaccagggcctctaggcaggactgccatgcagtgaagccctcagtgagctgccactgagtcgggagcccagaggaacggcgtgaagccactggaccctctcccgggacctcctgctggctcctcctgcccagcttcctatgcaaggctttgtgttttcaggaaagggcctagcttctgtgtggcccacagagttcactgcctgtgagacttagcaccaagtgctgaggctggaagaaaaacgcacaccagacgggcaacaaacagtctgggtccccagctcgctcttggtacttgggaccccagtgcctcgttgagggcgccattctgaagaaaggaactgcagcgccgatttgagggtggagatatagataataataatattaataataataatggccacatggatcgaacactcatgatgtgccaagtgctgtgctaagtgctttacgaacattcgtcatatcaggatgacctcgagagctgaggctctagccacctaaaaccacgtgcccaaacccaccagtttaaaacggtgtgtgttcggaggggtgaaagcattaagaagcccagtgccctcctggagtgagacaagggctcggccttaaggagctgaagagtctgggtagcttgtttagggtacaagaagcctgttctgtccagcttcagtgacacaagctgctttagctaaagtcccgcgggttccggcatggctaggctgagagcagggatctacctggcttctcagttctttggttggaaggagcaggaaatcagctcctattctccagtggagagatctggcctcagcttgggctagagatgccaaggcctgtgccaggttccctgtgccctcctcgaggtgggcagccatcaccagccacagttaagccaagccccccaacatgtattccatcgtgctggtagaagagtctttgctgttgctcccgaaagccgtgctctccagcctggctgccagggagggtgggcctcttggttccaggctcttgaaatagtgcagccttttcttcctatctctgtggctttcagctctgcttccttggttattaggagaatagatgggtgatgtctttccttatgttgctttttcaacatagcagaattaatgtagggagctaaatccagtggtgtgtgtgaatgcagaagggaatgcaccccacattcccatgatggaagtctgcgtaaccaataaattgtgcctttctcactca

SEQ ID NO: 14405 - DNA, 2180 bp, Homo sapiens
  source 1..2180: mol_type = unassigned DNA
atggtcccctgctggaaccatggcaacatcacccgctccaaggcggaggagctgctttccaggacaggcaaggacgggagcttcctcgtgcgtgccagcgagtccatctcccgggcatacgcgctctgcgtgctgtatcggaattgcgtttacacttacagaattctgcccaatgaagatgataaattcactgttcaggcatccgaaggcgtctccatgaggttcttcaccaagctggaccagctcatcgagttttacaagaaggaaaacatggggctggtgacccatctgcaataccctgtgccgctggaggaagaggacacaggcgacgaccctgaggaggacacagtagaaagtgtcgtgtctccacccgagctgcccccaagaaacatcccgctgactgccagctcctgtgaggccaaggaggttcctttttcaaacgagaatccccgagcgaccgagaccagccggccgagcctctccgagacattgttccagcgactgcaaagcatggacaccagtgggcttccagaagagcatcttaaggccatccaagattatttaagcactcagctcgcccaggactctgaatttgtgaagacagggtccagcagtcttcctcacctgaagaaactgaccacactgctctgcaaggagctctatgggtattgtttggaggtcttgttatcatatcctctttccctcctctcccaggttcctggtgaggccaatcccatcaacatggtgtccaagctcagccaactgacaagcctgttgtcgtccattgaagacaaggtcaaggccttgctgcacgagggtcctgagtctccgcaccggccctcccttatccctccagtcacctttgaggtgaaggcagagtctctggggattcctcagaaaatgcagctcaaagtcgacgttgagtctgggaaactgatcattaagaagtccaaggatggttctgaggacaagttctacagccacaagaaaatcctgcagctcattaagtcacagaaatttctgaataagttggtgatcttggtggaaacagagaaggagaagatcctgcggaaggaatatgtttttgctgactccaaaaagagagaaggcttctgccagctcctgcagcagatgaagaacaagcactcagagcagccggagcccgacatgatcaccatcttcatcggcacctggaacatgggtaacgccccccctcccaagaagatcacgtcctggtttctctccaaggggcagggaaagacgcgggacgactctgcggactacatcccccatgacatttacgtgatcggcacccaagaggaccccctgagtgagaaggagtggctggagatcctcaaacactccctgcaagaaatcaccagtgtgacttttaaaacagtcgccatccacacgctctggaacatccgcatcgtggtgctggccaagcctgagcacgagaaccggatcagccacatctgtactgacaacgtgaagacaggcattgcaaacacactggggaacaagggagccgtgggggtgtcgttcatgttcaatggaacctccttagggttcgtcaacagccacttgacttcaggaagtgaaaagaaactcaggcgaaaccaaaactatatgaacattctccggttcctggccctgggcgacaagaagctgagtccctttaacatcactcaccgcttcacgcacctcttctggtttggggatcttaactaccgtgtggatctgcctacctgggaggcagaaaccatcatccagaaaatcaagcagcagcagtacgcagacctcctgtcccacgaccagctgctcacagagaggagggagcagaaggtcttcctacacttcgaggaggaagaaatcacgtttgccccaacctaccgttttgagagactgactcgggacaaatacgcctacaccaagcagaaagcgacagggatgaagtacaacttgccttcctggtgtgaccgagtcctctggaagtcttatcccctggtgcacgtggtgtgtcagtcttatggcagtaccagcgacatcatgacgagtgaccacagccctgtctttgccacatttgaggcaggagtcacttcccagtttgtctccaagaacggtcccgggactgttgacagccaaggacagattgagtttctcaggtgctatgccacatt

SEQ ID NO: 14406 - DNA, 832 bp, Homo sapiens
  source 1..832: mol_type = unassigned DNA
gcagaagaactggcttcgggaattttaccaggtcgtgcacacacacaagccgcacttcatggccttgcactgtcaggagtttggagggaagaactacgaggcctccatgtcccacgtggacaagttcgtcaaagaactattgtcgagtgatgcgatgaaagaatataacagggctcgagtctacctggatgaaaactacaaatcccaggagcacttcacggcactaggaagcttttattttcttcatgagtccttaaaaaacatctaccagtttgactttaaagctaagaagtatagaaaggtcgctggcaaagagatctactcggataccttagagagcacgcccatgctggagaaggagaagtttccgcaggactacttccccgagtgcaaatggtcaagaaaaggcttcatccggacgaggtggtgcattgcagactgtgcctttgacttggtgaatatccatcttttccatgatgcttccaatctggtcgcctgggaaacaagcccttccgtgtactcgggaatccggcacaaggcactgggctacgtgctggacagaatcattgatcagcgattcgagaaggtttcctactttgtatttggtgatttcaacttccggctggattccaagtccgtcgtggagctcttggagtttgacaaggagttgtctgtctttaaggacagactgtatgaactggacatctcgttccctcccagctacccgtacagtgaggacgcccgccagggtgagcagtacatgaacacccggtgcccagcctggtgtgaccgcatcctcatgtccccgtctgccaaggagctggtgctgcgg

SEQ ID NO: 14407 - DNA, 1432 bp, Homo sapiens
  source 1..1432: mol_type = unassigned DNA
gcgcgggccgctgtgaggcgcggcggcgagcgacgggcgcggggccgcggagcagcgagcgagcgagcgagcgcgaggccggagccccggccaggcccggccgacccgccgagcccgcgatgcgccccggggccgccccccggcgcagctgacgccccgcggccccgcgaagaccccggccggccggtcccggaggaagcggccgccgccgccgccgcccagcccagcgcccgcgccgcccgggcaccatggcggggaaggcggccgccccgggcaccgcggtgctgctggtcacggccaacgtgggctcgctcttcgacgacccagaaaacctgcagaagaactggcttcgggaattttaccaggtcgtgcacacacacaagccgcacttcatggccttgcactgtcaggagtttggagggaagaactacgaggcctccatgtcccacgtggacaagttcgtcaaagaactattgtcgagtgatgcgatgaaagaatataacagggctcgagtctacctggatgaaaactacaaatcccaggagcacttcacggcactaggaagcttttattttcttcatgagtccttaaaaaacatctaccagtttgactttaaagctaagaagtatagaaaggtcgctggcaaagagatctactcggataccttagagagcacgcccatgctggagaaggagaagtttccgcaggactacttccccgagtgcaaatggtcaagaaaaggcttcatccggacgaggtggtgcattgcagactgtgcctttgacttggtgaatatccatcttttccatgatgcttccaatctggtcgcctgggaaacaagcccttccgtgtactcgggaatccggcacaaggcactgggctacgtgctggacagaatcattgatcagcgattcgagaaggtttcctactttgtatttggtgatttcaacttccggctggattccaagtccgtcgtggagacgctctgcacaaaagccaccatgcagacggtccgggccgccgacaccaatgaagtggtgaagctcatatttcgtgagtcggacaacgaccggaaggttatgctccagttagaaaagaaactcttcgactacttcaaccaggaggttttccgagacaacaacggcaccgcgctcttggagtttgacaaggagttgtctgtctttaaggacagactgtatgaactggacatctcgttccctcccagctacccgtacagtgaggacgcccgccagggtgagcagtacatgaacacccggtgcccagcctggtgtgaccgcatcctcatgtccccgtctgccaaggagctggtgctgcgggtgagtgtgtgctgccccagccctgggcacagagggatgtggagcgctgggtctggtctggcccagccctggtgacagggccccaggggtggggg

SEQ ID NO: 14408 - DNA, 2962 bp, Homo sapiens
  source 1..2962: mol_type = unassigned DNA
ggaactttcccagcggatctaatggctgcgcgcgggccgctgtgaggcgcggcggcgagcgacgggcgcggggccgcggagcagcgagcgagcgagcgagcgcgaggccggagccccggccaggcccggccgacccgccgagcccgcgatgcgccccggggccgccccccggcgcagctgacgccccgcggccccgcgaagaccccggccggccggtcccggaggaagcggccgccgccgccgccgcccagcccagcgcccgcgccgcccgggcaccatggcggggaaggcggccgccccgggcaccgcggtgctgctggtcacggccaacgtgggctcgctcttcgacgacccagaaaacctgcagaagaactggcttcgggaattttaccaggtcgtgcacacacacaagccgcacttcatggccttgcactgtcaggagtttggagggaagaactacgaggcctccatgtcccacgtggacaagttcgtcaaagaactattgtcgagtgatgcgatgaaagaatataacagggctcgagtctacctggatgaaaactacaaatcccaggagcacttcacggcactaggaagcttttattttcttcatgagtccttaaaaaacatctaccagtttgactttaaagctaagaagtatagaaaggtcgctggcaaagagatctactcggataccttagagagcacgcccatgctggagaaggagaagtttccgcaggactacttccccgagtgcaaatggtcaagaaaaggcttcatccggacgaggtggtgcattgcagactgtgcctttgacttggtgaatatccatcttttccatgatgcttccaatctggtcgcctgggaaacaagcccttccgtgtactcgggaatccggcacaaggcactgggctacgtgctggacagaatcattgatcagcgattcgagaaggtttcctactttgtatttggtgatttcaacttccggctggattccaagtccgtcgtggagacgctctgcacaaaagccaccatgcagacggtccgggccgccgacaccaatgaagtggtgaagctcatatttcgtgagtcggacaacgaccggaaggttatgctccagttagaaaagaaactcttcgactacttcaaccaggaggttttccgagacaacaacggcaccgcgctcttggagtttgacaaggagttgtctgtctttaaggacagactgtatgaactggacatctcgttccctcccagctacccgtacagtgaggacgcccgccagggtgagcagtacatgaacacccggtgcccagcctggtgtgaccgcatcctcatgtccccgtctgccaaggagctggtgctgcggtcggagagcgaggagaaggttgtcacctatgaccacattgggcccaacgtctgcatgggagaccacaagcccgtgttcctggccttccgaatcatgcccggggcaggtaaacctcatgcccatgtgcacaagtgttgtgtcgtgcagtgacgtggtgggaagagatgccagcgccacgagaggacacttcgtgagcctccctgtagccgtggaccgaatacgcactcttgaaagctgcatcgagaacccgcccaagcgccacctgctagacggccagccccacacttcgcttcagcctccggaccattccggagcagcctcacatacctcactgtctcgtctgtctatgtgacattaagtagaaatattggttttttttttttttttttaaataagtcacagtcctgttgtcaaaactctaatagacagcaaagagggtctgtaccgtagacttcacagttttcagtttttaatgattgccagtggaggggcttcttcagcacagagaccccccactgtgtccagggaccccctctgccaggtggaggtgtgtccaggggctggggaagccgagacgggcactccctctgccggccggcagcgtggccctgagcatggcaagggggtctgtctctgccgatgctccttccgcggcactgactctgcgccgtgtcacatggtttttgaatcacactgcagctgctttccatttttatatatatataaatatatataaatatatactttttaaaaataatttataaatcttaccaaaacttatgctaaatatactttccagtatgaacgcacaggagagtcccatcagcaggcggcattggagtctaggagctcagctgtgtgtccatcaacacacaaattcgtaaaaaacacacatggcctcgccatcgtgggtaaaatcggccccacagcacgtctgcaccagcgggccgttactcccatgccgttcttctgtgtaatattaagaactgaatgtgaagtttatagctagcctgggtgtaccttttaagaattttgtaaaccgtttgtctgtcttttgttactgttttatggtgccaagtatcctacgttacaacaataatatcatgggagaaatagaaatagcctagtttgcttccaatagaaactgcttttaacatgggctgtatataaaaatattaaagagaaacaaaactgtacatttcctcattgctccgctacagacaacccatgtcataaccttgttgcaaatatttttctcctatagcagtaagtacagcattagaaggtgattagagagtctgttgatgaaacacaaatgtatgttttattgattttactttagaacactacagagttcctggaccgggtgaaggcattagctgggtgtttgtgtgggataaatactaccactgcaagtgactgctgtccgctgcggaatctgttcttggtggaagcacaggtccgtgtcgctgctgtggttgccgctgtccgcggttcaacacggagtccgccccgcgggtttcagctgttggtcgttctgaggggcctttggaagtgaccggtctggttcctaagcaataaaattgaccgtggtga

SEQ ID NO: 14409 - DNA, 806 bp, Homo sapiens
  source 1..806: mol_type = unassigned DNA
gcgcgggccgctgtgaggcgcggcggcgagcgacgggcgcggggccgcggagcagcgagcgagcgagcgagcgcgaggccggagccccggccaggcccggccgacccgccgagcccgcgatgcgccccggggccgccccccggcgcagctgacgccccgcggccccgcgaagaccccggccggccggtcccggaggaagcggccgccgccgccgccgcccagcccagcgcccgcgccgcccgggcaccatggcggggaaggcggccgccccgggcaccgcggtgctgctggtcacggccaacgtgggctcgctcttcgacgacccagaaaacctgcagaagaactggcttcgggaattttaccaggtcgtgcacacacacaagccgcacttcatggccttgcactgtcaggagtttggagggaagaactacgaggcctccatgtcccacgtggacaagttcgtcaaagaactattgtcgagtgatgcgatgaaagaatataacagggctcgagtctacctggatgaaaactacaaatcccaggagcacttcacggcactaggaagcttttattttcttcatgagtccttaaaaaacatctaccagtttgactttaaagctaagaagtatagaaaggtcgctggcaaagagatctactcggataccttagagagcacgcccatgctggagaaggagaagtttccgcaggactacttccccgagcggcatgttccacacacctcattggaggctctactgattttgcatgaggacccccagctgcctgacccccacctgccactctga

SEQ ID NO: 14410 - DNA, 2767 bp, Homo sapiens
  source 1..2767: mol_type = unassigned DNA
gcgcgggccgctgtgaggcgcggcggcgagcgacgggcgcggggccgcggagcagcgagcgagcgagcgagcgcgaggccggagccccggccaggcccggccgacccgccgagcccgcgatgcgccccggggccgccccccggcgcagctgacgccccgcggccccgcgaagaccccggccggccggtcccggaggaagcggccgccgccgccgccgcccagcccagcgcccgcgccgcccgggcaccatggcggggaaggcggccgccccgggcaccgcggtgctgctggtcacggccaacgtgggctcgctcttcgacgacccagaaaacctgcagaagaactggcttcgggaattttaccaggtcgtgcacacacacaagccgcacttcatggccttgcactgtcaggagtttggagggaagaactacgaggcctccatgtcccacgtggacaagttcgtcaaagaactattgtcgagtgatgcgatgaaagaatataacagggctcgagtctacctggatgaaaactacaaatcccaggagcacttcacggcactaggaagcttttattttcttcatgagtccttaaaaaacatctaccagtttgactttaaagctaagaagtatagaaaggtcgctggcaaagagatctactcggataccttagagagcacgcccatgctggagaaggagaagtttccgcaggactacttccccgagtgcaaatggtcaagaaaaggcttcatccggacgaggtggtgcattgcagactgtgcctttgacttggtgaatatccatcttttccatgatgcttccaatctggtcgcctgggaaacaagcccttccgtgtactcgggaatccggcacaaggcactgggctacgtgctggacagaatcattgatcagcgattcgagaaggtttcctactttgtatttggtgatttcaacttccggctggattccaagtccgtcgtggagctcttggagtttgacaaggagttgtctgtctttaaggacagactgtatgaactggacatctcgttccctcccagctacccgtacagtgaggacgcccgccagggtgagcagtacatgaacacccggtgcccagcctggtgtgaccgcatcctcatgtccccgtctgccaaggagctggtgctgcggtcggagagcgaggagaaggttgtcacctatgaccacattgggcccaacgtctgcatgggagaccacaagcccgtgttcctggccttccgaatcatgcccggggcaggtaaacctcatgcccatgtgcacaagtgttgtgtcgtgcagtgacgtggtgggaagagatgccagcgccacgagaggacacttcgtgagcctccctgtagccgtggaccgaatacgcactcttgaaagctgcatcgagaacccgcccaagcgccacctgctagacggccagccccacacttcgcttcagcctccggaccattccggagcagcctcacatacctcactgtctcgtctgtctatgtgacattaagtagaaatattggttttttttttttttttttaaataagtcacagtcctgttgtcaaaactctaatagacagcaaagagggtctgtaccgtagacttcacagttttcagtttttaatgattgccagtggaggggcttcttcagcacagagaccccccactgtgtccagggaccccctctgccaggtggaggtgtgtccaggggctggggaagccgagacgggcactccctctgccggccggcagcgtggccctgagcatggcaagggggtctgtctctgccgatgctccttccgcggcactgactctgcgccgtgtcacatggtttttgaatcacactgcagctgctttccatttttatatatatataaatatatataaatatatactttttaaaaataatttataaatcttaccaaaacttatgctaaatatactttccagtatgaacgcacaggagagtcccatcagcaggcggcattggagtctaggagctcagctgtgtgtccatcaacacacaaattcgtaaaaaacacacatggcctcgccatcgtgggtaaaatcggccccacagcacgtctgcaccagcgggccgttactcccatgccgttcttctgtgtaatattaagaactgaatgtgaagtttatagctagcctgggtgtaccttttaagaattttgtaaaccgtttgtctgtcttttgttactgttttatggtgccaagtatcctacgttacaacaataatatcatgggagaaatagaaatagcctagtttgcttccaatagaaactgcttttaacatgggctgtatataaaaatattaaagagaaacaaaactgtacatttcctcattgctccgctacagacaacccatgtcataaccttgttgcaaatatttttctcctatagcagtaagtacagcattagaaggtgattagagagtctgttgatgaaacacaaatgtatgttttattgattttactttagaacactacagagttcctggaccgggtgaaggcattagctgggtgtttgtgtgggataaatactaccactgcaagtgactgctgtccgctgcggaatctgttcttggtggaagcacaggtccgtgtcgctgctgtggttgccgctgtccgcggttcaacacggagtccgccccgcgggtttcagctgttggtcgttctgaggggcctttggaagtgaccggtctggttcctaagcaataaaattgaccgtggtgaaaata

SEQ ID NO: 14411 - DNA, 416 bp, Homo sapiens
  source 1..416: mol_type = unassigned DNA
gtcacggccaacgtgggctcgctcttcgacgacccagaaaacctgcagaagaactggcttcgggaattttaccaggcactaggaagcttttattttcttcatgagtccttaaaaaacatctaccagtttgactttaaagctaagaagtatagaaaggtcgctggcaaagagatctactcggataccttagagagcacgcccatgctggagaaggagaagtttccgcaggactacttccccgagtgcaaatggtcaagaaaaggcttcatccggacgaggtggtgcattgcagactgtgcctttgacttggtgaatatccatcttttccatgatgcttccaatctggtcgcctgggaaacaagcccttccgtgtactcgggaatccggcacaaggcactgggctacgtgctggacag

SEQ ID NO: 14412 - DNA, 2929 bp, Homo sapiens
  source 1..2929: mol_type = unassigned DNA
gcgcgggccgctgtgaggcgcggcggcgagcgacgggcgcggggccgcggagcagcgagcgagcgagcgagcgcgaggccggagccccggccaggcccggccgacccgccgagcccgcgatgcgccccggggccgccccccggcgcagctgacgccccgcggccccgcgaagaccccggccggccggtcccggaggaagcggccgccgccgccgccgcccagcccagcgcccgcgccgcccgggcaccatggcggggaaggcggccgccccgggcaccgcggtgctgctggtcacggccaacgtgggctcgctcttcgacgacccagaaaacctgcagaagaactggcttcgggaattttaccaggtcgtgcacacacacaagccgcacttcatggccttgcactgtcaggagtttggagggaagaactacgaggcctccatgtcccacgtggacaagttcgtcaaagaactattgtcgagtgatgcgatgaaagaatataacagggctcgagtctacctggatgaaaactacaaatcccaggagcacttcacggcactaggaagcttttattttcttcatgagtccttaaaaaacatctaccagtttgactttaaagctaagaagtatagaaaggtcgctggcaaagagatctactcggataccttagagagcacgcccatgctggagaaggagaagtttccgctacttccccgagtgcaaatggtcaagaaaaggcttcatccggacgaggtgattgcagactgtgcctttgacttggtgaatatccatcttttccatgatgcttccaatctggtcgcctgggaaacaagcccttccgtgtactcgggaatccggcacaaggcactgggctacgtgctggacagaatcattgatcagcgattcgagaaggtttcctactttgtatttggtgatttcaacttccggctggattccaagtccgtcgtggagacgctctgcacaaaagccaccatgcagacggtccgggccgccgacaccaatgaagtggtgaagctcatatttcgtgagtcggacaacgaccggaaggttatgctccagttagaaaagaaactcttcgactacttcaaccaggaggttttccgagacaacaacggcaccgcgctcttggagtttgacaaggagttgtctgtctttaaggacagactgtatgaactggacatctcgttccctcccagctacccgtacagtgaggacgcccgccagggtgagcagtacatgaacacccggtgcccagcctggtgtgaccgcatcctcatgtccccgtctgccaaggagctggtgctgcggtcggagagcgaggagaaggttgtcacctatgaccacattgggcccaacgtctgcatgggagaccacaagcccgtgttcctggccttccgaatcatgcccggggcaggtaaacctcatgcccatgtgcacaagtgttgtgtcgtgcagtgacgtggtgggaagagatgccagcgccacgagaggacacttcgtgagcctccctgtagccgtggaccgaatacgcactcttgaaagctgcatcgagaacccgcccaagcgccacctgctagacggccagccccacacttcgcttcagcctccggaccattccggagcagcctcacatacctcactgtctcgtctgtctatgtgacattaagtagaaatattggttttttttttttttttttaaataagtcacagtcctgttgtcaaaactctaatagacagcaaagagggtctgtaccgtagacttcacagttttcagtttttaatgattgccagtggaggggcttcttcagcacagagaccccccactgtgtccagggaccccctctgccaggtggaggtgtgtccaggggctggggaagccgagacgggcactccctctgccggccggcagcgtggccctgagcatggcaagggggtctgtctctgccgatgctccttccgcggcactgactctgcgccgtgtcacatggtttttgaatcacactgcagctgctttccatttttatatatatataaatatatataaatatatactttttaaaaataatttataaatcttaccaaaacttatgctaaatatactttccagtatgaacgcacaggagagtcccatcagcaggcggcattggagtctaggagctcagctgtgtgtccatcaacacacaaattcgtaaaaaacacacatggcctcgccatcgtgggtaaaatcggccccacagcacgtctgcaccagcgggccgttactcccatgccgttcttctgtgtaatattaagaactgaatgtgaagtttatagctagcctgggtgtaccttttaagaattttgtaaaccgtttgtctgtcttttgttactgttttatggtgccaagtatcctacgttacaacaataatatcatgggagaaatagaaatagcctagtttgcttccaatagaaactgcttttaacatgggctgtatataaaaatattaaagagaaacaaaactgtacatttcctcattgctccgctacagacaacccatgtcataaccttgttgcaaatatttttctcctatagcagtaagtacagcattagaaggtgattagagagtctgttgatgaaacacaaatgtatgttttattgattttactttagaacactacagagttcctggaccgggtgaaggcattagctgggtgtttgtgtgggataaatactaccactgcaagtgactgctgtccgctgcggaatctgttcttggtggaagcacaggtccgtgtcgctgctgtggttgccgctgtccgcggttcaacacggagtccgccccgcgggtttcagctgttggtcgttctgaggggcctttggaagtgaccggtctggttcctaagcaataaaattgaccgtggtgaaaata

SEQ ID NO: 14413 - DNA, 610 bp, Homo sapiens
  source 1..610: mol_type = unassigned DNA
ctggacatctcgttccctcccagctacccgtacagtgaggacgcccgccagggtgagcagtacatgaacacccggtgcccagcctggtgtgaccgcatcctcatgtccccgtctgccaaggagctggtgctgcggtcggagagcgaggagaaggttgtcacctatgaccacattgggcccaacgtctgcatgggagaccacaagcccgtgttcctggccttccgaatcatgcccggggcagggaagagatgccagcgccacgagaggacacttcgtgagcctccctgtagccgtggaccgaatacgcactcttgaaagctgcatcgagaacccgcccaagcgccacctgctagacggccagccccacacttcgcttcagcctccggaccattccggagcagcctcacatacctcactgtctcgtctgtctatgtgacattaagtagaaatattggttttttttttttttttttaaataagtcacagtcctgttgtcaaaactctaatagacagcaaagagggtctgtaccgtagacttcacagttttcagtttttaatgattgccagtggaggggcttcttcagcacagagaccccccactgtgtccagg

SEQ ID NO: 14414 - DNA, 594 bp, Homo sapiens
  source 1..594: mol_type = unassigned DNA
gcggccgccccgggcaccgcggtgctgctggtcacggccaacgtgggctcgctcttcgacgacccagaaaacctgcagaagaactggcttcgggaattttaccaggtcgtgcacacacacaagccgcacttcatggccttgcactgtcaggagtttggagggaagaactacgaggcctccatgtcccacgtggacaagttcgtcaaagaactattgtcgagtgatgcgatgaaagaatataacagggctcgagtctacctggatgaaaactacaaatcccaggagcacttcacggcactaggaagcttttattttcttcatgagtccttaaaaaacatctaccagtttgactttaaagctaagaagtatagaaaggtcgctggcaaagagatctactcggataccttagagagcacgcccatgctggagaaggagaagtttccgcaggactacttccccgagcggcatgttccacacacctcattggaggctctactgattttgcatgaggacccccagctgcctgacccccacctgccactctgacccttttggttcacggcgatgcattcggagcattgtcactgttccctg

SEQ ID NO: 14415 - DNA, 2749 bp, Homo sapiens
  source 1..2749: mol_type = unassigned DNA
gcgcgggccgctgtgaggcgcggcggcgagcgacgggcgcggggccgcggagcagcgagcgagcgagcgagcgcgaggccggagccccggccaggcccggccgacccgccgagcccgcgatgcgccccggggccgccccccggcgcagctgacgccccgcggccccgcgaagaccccggccggccggtcccggaggaagcggccgccgccgccgccgcccagcccagcgcccgcgccgcccgggcaccatggcggggaaggcggccgccccgggcaccgcggtgctgctggtcacggccaacgtgggctcgctcttcgacgacccagaaaacctgcagaagaactggcttcgggaattttaccaggcactaggaagcttttattttcttcatgagtccttaaaaaacatctaccagtttgactttaaagctaagaagtatagaaaggtcgctggcaaagagatctactcggataccttagagagcacgcccatgctggagaaggagaagtttccgcaggactacttccccgagtgcaaatggtcaagaaaaggcttcatccggacgaggtggtgcattgcagactgtgcctttgacttggtgaatatccatcttttccatgatgcttccaatctggtcgcctgggaaacaagcccttccgtgtactcgggaatccggcacaaggcactgggctacgtgctggacagaatcattgatcagcgattcgagaaggtttcctactttgtatttggtgatttcaacttccggctggattccaagtccgtcgtggagacgctctgcacaaaagccaccatgcagacggtccgggccgccgacaccaatgaagtggtgaagctcatatttcgtgagtcggacaacgaccggaaggttatgctccagttagaaaagaaactcttcgactacttcaaccaggaggttttccgagacaacaacggcaccgcgctcttggagtttgacaaggagttgtctgtctttaaggacagactgtatgaactggacatctcgttccctcccagctacccgtacagtgaggacgcccgccagggtgagcagtacatgaacacccggtgcccagcctggtgtgaccgcatcctcatgtccccgtctgccaaggagctggtgctgcggtcggagagcgaggagaaggttgtcacctatgaccacattgggcccaacgtctgcatgggagaccacaagcccgtgttcctggccttccgaatcatgcccggggcaggtaaacctcatgcccatgtgcacaagtgttgtgtcgtgcagtgacgtggtgggaagagatgccagcgccacgagaggacacttcgtgagcctccctgtagccgtggaccgaatacgcactcttgaaagctgcatcgagaacccgcccaagcgccacctgctagacggccagccccacacttcgcttcagcctccggaccattccggagcagcctcacatacctcactgtctcgtctgtctatgtgacattaagtagaaatattggttttttttttttttttttaaataagtcacagtcctgttgtcaaaactctaatagacagcaaagagggtctgtaccgtagacttcacagttttcagtttttaatgattgccagtggaggggcttcttcagcacagagaccccccactgtgtccagggaccccctctgccaggtggaggtgtgtccaggggctggggaagccgagacgggcactccctctgccggccggcagcgtggccctgagcatggcaagggggtctgtctctgccgatgctccttccgcggcactgactctgcgccgtgtcacatggtttttgaatcacactgcagctgctttccatttttatatatatataaatatatataaatatatactttttaaaaataatttataaatcttaccaaaacttatgctaaatatactttccagtatgaacgcacaggagagtcccatcagcaggcggcattggagtctaggagctcagctgtgtgtccatcaacacacaaattcgtaaaaaacacacatggcctcgccatcgtgggtaaaatcggccccacagcacgtctgcaccagcgggccgttactcccatgccgttcttctgtgtaatattaagaactgaatgtgaagtttatagctagcctgggtgtaccttttaagaattttgtaaaccgtttgtctgtcttttgttactgttttatggtgccaagtatcctacgttacaacaataatatcatgggagaaatagaaatagcctagtttgcttccaatagaaactgcttttaacatgggctgtatataaaaatattaaagagaaacaaaactgtacatttcctcattgctccgctacagacaacccatgtcataaccttgttgcaaatatttttctcctatagcagtaagtacagcattagaaggtgattagagagtctgttgatgaaacacaaatgtatgttttattgattttactttagaacactacagagttcctggaccgggtgaaggcattagctgggtgtttgtgtgggataaatactaccactgcaagtgactgctgtccgctgcggaatctgttcttggtggaagcacaggtccgtgtcgctgctgtggttgccgctgtccgcggttcaacacggagtccgccccgcgggtttcagctgttggtcgttctgaggggcctttggaagtgaccggtctggttcctaagcaataaaattgaccgtggtgaaaata

SEQ ID NO: 14416 - DNA, 3394 bp, Homo sapiens
  source 1..3394: mol_type = unassigned DNA
gccgggctgactccgcttctgggcggccgggcctccgcgagtaccgggtcgacttcggagtctgcgagcccagccaggggtgcccgcttcccacccctctccccgagcggcgtccccgtcggggtcgaacctcccccgcgacaggcgcccagccgcctgttcccccaggccttgcctgcggaccgccctgggaacggcgtctgggagccccgaggggctggcgggactcggggcccgggccatgcggcagccgcccccgcccctccgcgaccatccccggcccaagcgggagccgcagcggcgtttctgctcctcgctgcgccggcgaccccggacccggcacccgtgacccctcgcgctgcctgcggcctcgcgccgaggcctgccccgggagagaccgtccatgccgtccaaggcggagaatctgcggccctccgagccggccccgcagccgccggaagggaggacgctccaaggacagcttcccggcgctccgccggcccagcgcgcggggtccccacccgatgctccgggctccgagagccccgcgcttgcctgcagcactccggccacgcccagcggcgaggacccgccagcccgagcagcacccatcgccccgcggccccccgccaggcctcgactggagcgagccctgtccctggacgacaagggctggaggaggaggcgttttcgaggcagccaggaggacctggaagcccggaatgggaccagtccctccaggggctcagtgcagagcgagggccccggggcccccgcccacagctgctccccgccctgcctgagcacctccttgcaggaaatccccaagtcccgcggggtcctgagcagtgagagagggagcccgtcctcggggggtaaccctctctctggggtggccagcagctccccgaacctcccgcacagagacgccgccgtggcggggagctcgcccaggctgcccagcctgctgcccccgcgcccaccgcctgccctgagcctggacatcgcctccgactccctgaggacagcaaacaaggtcgactcggatcttgcagactacaagctccgcgcgcagccgctcctggtgcgggcccacagcagcctgggccccggccggccgcggagccccctggcctgcgacgactgttcccttcgctcggccaaatcctccttcagcctcctggcgcccatccgcagcaaggacgtccgcagcaggagttacctggagggcagcctcctggccagcggggccctgttgggggcggatgagctggcccgctacttcccagaccggaacgtggcactcttcgtggccacctggaacatgcagggccagaaggagctcccgcccagcctggacgagttcctgctcccagccgaggccgactatgcccaggacctgtatgtcatcggggtccaggagggctgttctgacaggcgggagtgggagactcgtctgcaggagacgctgggcccgcactatgtgctgctgtcctcggcggcccacggcgtgctctacatgtcgctcttcatccgcagggacctcatctggttctgctcagaggtggagtgctccacggtgaccacacgcatcgtgtctcagatcaagaccaagggggccttgggcatcagcttcaccttttttggcacttccttcctcttcatcacgtcccacttcacctcaggtgacgggaaggtggcggagcggctgctggactacaccaggactgtacaagccctggtcctgcccagaaatgtgcccgacaccaacccctatcgctccagcgcagcggacgtcaccacccgcttcgatgaggtgttctggtttggagacttcaacttccgcctgagtggcgggcgcacagtcgtggacgccctcctgtgccagggcctggtggtggacgtgccggcgctgctgcagcacgaccagctcatccgggagatgcggaaagggtccatcttcaagggcttccaggagccggacatccacttcctcccatcatacaagtttgacatcgggaaggacacgtacgacagcacctccaagcagaggacgccctcatacacggaccgcgtcttgtacagaagccgccacaagggtgacatctgtcctgtgagctactcttcctgccccgggatcaagacgtccgaccaccgccctgtgtatggcctcttccgggtgaaagtgaggccggggcgagacaacattccgttggcagctggcaaatttgatagagaactgtacttactaggaattaaaagacggatttcgaaggagattcagaggcagcaagcactacagagtcagaactccagcaccatctgctccgtttcttgaagtttgctgaacgaggactcacagctgcaacgtggggtgattgtattgatcaaaacccactgggaaggacaaagagtttgccgcctttcggggatccgagggactgtggcgaccgtgcctctgtgccagcgtcccaggaaggaagccaaccctgagcgagcctgtcctctgtggcaggtccacacggtgtgggtgggcagggcttggacccccgtctccatggcaggtccatacagcatgggtggcagggtttggacccgcccagcagcaccacggaccccagccactctcgggggcagacgtcagaatccgttcctgagcagctcctgtgccctgggggcagtcacagagccccccaacacccccgtgctctgcaccagcctctccctccacacccgaagcaggcgtccatctgtgtcctcctggcagcccctcaaacacacaccaccccatgtcacacgggtatccagagcaaggctggatctgggctaggtgacccctggggcctcagacctctgagtgggccccagagcccagctgaggaagccacacagcctccaggacgtggcacggttcccctccacttggctgcaagtcgcctgccatggggcgaggaggcctgcaccccagtataagggcctccccagctgagtaagaagctgcttcccctcctctcataggccaagcctattgtgtgaaaccatctcatggtcttggtgacgtagaccatttttgaaaccgtctcatggtcttggtgacgtagaccgtttgcttctttaactccagccgcggaatgacattagtggaaccgggctagggaactgctggaagttcaggatgccaccaccttgaacacctaggccagggatccccaccatgtcccgggtttctttcttcgagagtatagaaccgttcattcttgctttgtgtcccattccatctcttgaaaaaatgtagtctttgaatgtgtgaaaatctagggacattcaatctagtcttttaaattatttttccatatttatatttttaaataaatgcatatattgagtcttaaaa

SEQ ID NO: 14417 - DNA, 3934 bp, Homo sapiens
  source 1..3934: mol_type = unassigned DNA
ggtgtgtgcgctcagcaggggccagcatggaccagtctgtggcaatccaggagacgctggctgagggggaatactgcgtcatcgcggtgcaaggtgtgctgtgtgagggggacagccggcagagccgcctcctgggactcgtgcgctaccgcctggagcacggcggccaggaacacgctctcttcctctatacgcaccggaggatggccattaccggggacgatgtctctctggaccagatagtgccagtctcgcgggattttacgctggaagaagtgtccccagatggtgaactctacatccttggctcagatgtgaccgtccagctggacacagcagagcttagcctcgtattccaactgccctttggttcacaaaccaggatgttcctccacgaagttgccagggcctgtccaggcttcgattctgcgacccgggatcctgaattcctgtggctgtctcggtataggtgcgcagagctggagctggagatgccaacgccgcgcggttgtaactcggccctagttacctggccagggtacgcgacaattggcggaggcaggtatccgtcccggaagaaacggtggggattggaggaggcccggccacagggggcgggctccgttctgttttggggcggagcgatggagaagacaggctttcgattgatggagcgggcacacgggggcgggttcgtctgggggcggagcgcgcgggacgggcggcgggatgaggagcttgaggaagcaggcagggaaatgtctgccgccgccggctctcgggagcgcaacactgcaggttcggcgggcggcgggaagctgggctggggagctgggccgggggcggcggtgcgcccggccctcgggtgggcagggtcggcggtttggccagtggacgctcggggcgaagaccaaagtcctggtggccctctggaggctgggacactggggcagaagttctgtgatgttcttcttaggcgtgcgtgacgagggtaggcgggtgggaatggggtacttgggaatccggaggctggggttttagtaaagctccgttccgaactcgctgtgtgacctcgggccactcgctgcccctctctgggcctgttgctccatctgagcttgctcttcaatcctgatcttccgagtttgtcgcgtggggcgggtgggggagtggtgccctgcctacgatagagtcttcctttgggtgaggtatggtatgtgttggggctctgtcagttctcagcccctgtgatgatagcgcagtgtacagggctggagtcttggggagccctgtctactctgggactagaggccaggatgaagttacaggttataaaaggactaggttttttcccacccagcagttggtggataatggggagcacagaaggccagttgctgagcaggagcttgtcgtttggagatgggaggctcagggctgaaatttgggtgagtccgtgctctgggaggacctgcagacctgtctttttttgtccagctccagggttttctgcaagggcccctggtgcttttttcccctgggtgtgtccgtgaggctccatttatgtgtgagctttggcatgacccctagtacctatttgtgacagtcatttgccagcaatgaagagcctgtcaagtagctgtgtaaagtgtgggccagccctccacttgctcttacaaggcttggaaactatgaggggcagggaggagtggcatgttgcacaagagtttgtaaactgagaggaaacgaggtgagcagaggacttcctcggtgcttgtttctccttcattgcagccatcacaaggtgcgatcgaagcgcctgatggtgctgatagtttgcatcttccttgggcttatctcagagttcactatcactagagtttccatgacattctgggctatggtgctgggacgggtgagagtttaagagcacctcatctccttgccccttcacaagagactgccagaatccagacaattggcggaggacaaggccaatggcagcagaaagaggtgggtgctgtgttctcagccagtacaccagagccaggccatgcaggcacttcattcccttagtcttctatgacaagtcaggccagctagctctgaagccagttagctgccccgactgagaaatgtgcagggatctcaatctttcatttcctttcaaaaaacagagactagccatatgctggtgaggaattattgttacggtttcggttttatttttattttaaaataatttgaaagctgaacatggtggcgcgtacctgtagtcccagccacttgagaggctgaggtggaaggcttgagcccaggagtttgagggtgatgtgcactatgattgatcctgtgaattagttgctgcactccagcctaggcaacatagtgagactgtctctaaaataaataaataaatagttttaaaaattttgtcagccaggcgtggtgactcatgcctgtaatcccagcactgtgggaagctgaggcgggcggatcacctgaggtcaggagttcgagaccagcctggccaacatggcgaaactccgtcactactaaaaatacaaaaattagatgggcgtggtggcaggtgcctgtaatcccatgtactctggaggctgaggtaggagaattgcttgaacccaggaggcagaggttgcagtgagccgagatcgtgccattgcattccagcctgggagacggagcaagactccatctcgaaaaaaaaaaaaatttttctcttaaaatacctacagtaagtggggtgacactattaattgctaagttgctcctgctaaaattggtaagaaatggtatcaagcccctcagttctatttgggtcatctgtttccagagttattatggcctcagaggagagttacatcttctataacaggtaggaagaaccctttgggctgcctttggatgtcgatacaggccccaagggaaacagagtagtagattgttttttcctatatgcatatgatcaaaatacccactttttgatagcctagagaacccaaagcaaacagttgcttaaaaatgctgtttctggctgggcacgatgactcatgcctttaatcccaacactttggaaggctgaggcgggcggatcatgaggtcaggagttcgagaccagcctggccaacatggcgaaaccctgtctctactaaaaatacaaaaattagatgggtgtagtggcacatggctataatcccaggtacttgggaagctgaggtaggagaatcgcttgaacccaggaggcagaggttgcagtgcgctgagatcgtgccactgcactccagcctgggagacagagcgagactccatctcaaaaaaaaaaaaatttttttttatcttatcgtaatacctacagtaagtgactgggtgacactgttaattgctaagttgctgctgctaaaattggtaagaaatggtatcaagctctccagttctgtttgggtcatctctgtttccagagttgttctggcctcagaggagagttacatcttctataacaggtgggaagaaccctttgggctgcctctggatgtcgatacaggccccaagggaaacggagtagtagatttgttttttcctatatgcatatgatcaaaatacccactacttgatagcctagagaaaccaaggcaaatggttgcttaaaaatgctgtttttggctgggcgcggtggctcatgcctaatcctagcactttgggaggccgaggtgggcggatcacaagatcaggagttcaagaccaggctgggcaacatgacgaaatcctgtctctactaaaaatataaaaattaggccaggcacagtggcttatgcctgtaatcccagcactttgggaggctgaggcaggcggatcacaaggtcaggagatcaagaccatcctggctaacacggtgaaaccccatctctactaaaaa

SEQ ID NO: 14418 - DNA, 4694 bp, Homo sapiens
  source 1..4694: mol_type = unassigned DNA
aaatgtagtcactgtcccggaacctggggcagcggagtcccgtgcgccctgtggtgacagctcaggagggtgtgtgcgctcagcaggggccagcatggaccagtctgtggcaatccaggagacgctggctgagggggaatactgcgtcatcgcggtgcaaggtgtgctgtgtgagggggacagccggcagagccgcctcctgggactcgtgcgctaccgcctggagcacggcggccaggaacacgctctcttcctctatacgcaccggaggatggccattaccggggacgatgtctctctggaccagatagtgccagtctcgcgggattttacgctggaagaagtgtccccagatggtgaactctacatccttggctcagatgtgaccgtccagctggacacagcagagcttagcctcgtattccaactgccctttggttcacaaaccaggatgttcctccacgaagttgccagggcctgtccaggcttcgattctgcgacccgggatcctgaattcctgtggctgtctcggtataggtgcgcagagctggagctggagatgccaacgccgcgcggttgtaactcggccctagttacctggccagggtacgcgacaattggcggaggcaggtatccgtcccggaagaaacggtggggattggaggaggcccggccacagggggcgggctccgttctgttttggggcggagcgatggagaagacaggctttcgattgatggagcgggcacacgggggcgggttcgtctgggggcggagcgcgcgggacgggcggcgggatgaggagcttgaggaagcaggcagggaaatgtctgccgccgccggctctcgggagcgcaacactgcaggtggttctaactttgatggtttgagaccaaatgggaagggagtgcctatggaccaaagctccaggggtcaagataaaccagaaagcttgcaaccaagacagaataaatccaagtccgaaattactgacatggttcgctcctccactatcacagtgtcggacaaggctcatattttatccatgcagaagtttggactgcgagatacaattgtgaaatcacatctactacagaaagaagaggattacacctatatccagaacttcaggttttttgcgggaacatacaatgtaaatgggcagtcccccaaagaatgcctccggctgtggctgagcaatggtatccaggccccagatgtctattgtgtagggttccaggagcttgatctgagtaaggaagcttttttctttcacgataccccaaaggaggaagagtggttcaaagctgtgtcagagggtcttcatccagatgccaaatatgcaaaggtgaagcttatccgactggttgggattatgctgctgttatatgtcaaacaggagcatgcagcttatatctcagaagtggaagccgagactgtggggacaggaatcatggggaggatgggcaacaagggaggcgtggcgatcaggttccagttccacaacaccagcatctgcgttgtgaattctcacttggcagcccacattgaagagtatgagaggaggaaccaggactataaggacatttgttctcgaatgcagttttgtcagcctgacccaagccttccccctctcaccatcagcaaccatgatgtgatcttgtggctgggggacctcaactacaggatagaagagctggatgtggaaaaagtgaaaaagctcatcgaagagaaggactttcaaatgctgtatgcatatgatcagctgaaaattcaggtggccgcaaagactgtctttgaaggcttcacagagggtgagctcacattccagcctacttacaagtatgatacgggctctgacgactgggataccagtgagaagtgccgtgctcctgcctggtgtgatcggattctctggaaagggaagaacatcactcagctgagttaccagagccacatggccctgaagaccagtgaccacaagcctgtcagctcagtgtttgacatcggggtgagggtcgtaaatgacgagctttaccggaagacactggaggaaattgttcgctccctggataagatggaaaatgccaacattccttctgtgtccctgtccaagcgagagttctgttttcagaatgtgaagtacatgcaattgaaagtagaatcctttacaattcataatggacaagtaccctgtcattttgaattcatcaacaagcctgatgaagagtcttactgtaagcagtggctgaatgccaaccccagcagaggcttcctcctgccagattctgatgttgagattgacttggagctcttcgtaaataagatgacagctacaaagctcaactcgggtgaagacaaaattgaggacattctggttctgcacttggacaggggaaaggattactttttgtctgtgtctgggaactacctgcccagctgttttgggtctcccattcatacactgtgttacatgagagagccaatcttggacctaccacttgaaaccattagtgagctgactctgatgccagtatggactggagatgatgggagccagttggatagccccatggaaatccccaaagagctctggatgatggttgattacctgtaccgaaatgctgtccagcaggaagatctgtttcagcaaccaggcctgaggtcagaatttgaacatatcagggactgcttggatactggaatgattgataacctctctgccagcaatcattctgtagccgaagccctgctgcttttcctggagagccttccagagcctgtcatctgttacagcacctaccataactgcttggagtgttctggcaactacacagcaagcaaacaggtcatttctactctccccatattccacaaaaatgtcttccactacttgatggcgtttttgcgagaactgctgaaaaattcagcaaaaaatcatttggatgagaatattctagctagcatatttggcagcttattgcttcgaaacccagctggtcaccaaaagcttgatatgacagagaagaagaaggctcaagaatttattcaccagttcctctgcaacccactctgagcctctctctcctcctattttacttgaggctgccaattaccagccccacctgtttcagctcaagagatgccttaagataattatgtgaggccacttggtagcaagaatggcagctatttcctgagcctagtaccccaattaagcccaccattggttagcacactcagcgctgtgagtcgtgaagacacgggagaaaatccaccataataaaactgacattcaattttcaactttagttatttaacacagatttttttattttttatttttttttattttgagacggagttttgctctgtcgcgcagggtggagtgcggtggcacgatctcggctcactgcaacctctgcctcctgggtgcaagcaattatcctgcctcagcctcccgagtagctgggactgcaggcacacactgccacgcccagctaattttttgcattttagtagagacggggtttcaccgtgttgcccaggctgttctaaaactcctgaactcaggtaatctgcctgcctcggcctccccaagtgctaggattacagatgtgagccaccacgcccggccttttttttttttttttcttttttgagatggagtttcactcttgttgcccaggctggagtgcgttggcgtggtcttggctcactgcaacctctgcctccttggttcaagcaattctcctgcctcagcctctcgagtagctgggattataggcgtccgccaccatgcctggctaatttttttgtgtgtttttagtatagacacggtttcaccatgttggccaggctggtctcgaatgcctggcctcaggtgatccacctgccttggcctcccaaagtgctgggattacaggcatgaaccaccacgcctggcctaaaatgtttttaaataactgtacttgtactcactcaccctacctccagggcatagtcagtctgggctgagatccccatgatcagatatttgatggaaagtcctgaaaggccaatgagttggatggcaagaatgcaggcagaagctgctggataaaataggctacagccacctcagatgctttcagtgctctgtctgaggatgtgtatatgcatatgcaaactcgacccccgttcctgcccagataatggctcaataactctgaggctggttgctcagcctctgagggcaatacaggcatttaaaaaattaaaatgaccaggcacagtggctcacgcctgtaatctcggcactttgggagactgaggtgggagcatcacttgagaccaggagtttgggaccaggctgggcaacacagggagaccccctctctacaaaaacatttttaaaaaattagctgggtgtggtgatgcatgcctgtggtcccagttacttgggaggctgacgtgggtggctcacttgagcacaggagtttgaggctgcagtgacctatgaccacatcactgtacgccagcccgggtgagagagggagaccccgtctctaaaaataaaatgtaaaatcactgaaaaaatgagtgttcggtgaaacaagtgggattttctgggccagcaagtcttccaaactgtatatgatgcatcctgtctccatgtgtaatatattttaatgataaatgtatttttaacagtg

SEQ ID NO: 14419 - DNA, 3060 bp, Homo sapiens
  source 1..3060: mol_type = unassigned DNA
agtcactgtcccggaacctggggcagcggagtcccgtgcgccctgtggtgacagctcaggagggtgtgtgcgctcagcaggggccagcatggaccagtctgtggcaatccaggagacgctggctgagggggaatactgcgtcatcgcggtgcaaggtgtgctgtgtgagggggacagccggcagagccgcctcctgggactcgtgcgctaccgcctggagcacggcggccaggaacacgctctcttcctctatacgcaccggaggatggccattaccggggacgatgtctctctggaccagatagtgccagtctcgcgggattttacgctggaagaagtgtccccagatggtgaactctacatccttggctcagatgtgaccgtccagctggacacagcagagcttagcctcgtattccaactgccctttggttcacaaaccaggatgttcctccacgaagttgccagggcctgtccaggcttcgattctgcgacccgggatcctgaattcctgtggctgtctcggtataggtgcgcagagctggagctggagatgccaacgccgcgcggttgtaactcggccctagttacctggccagggtacgcgacaattggcggaggtggttctaactttgatggtttgagaccaaatgggaagggagtgcctatggaccaaagctccaggggtcaagataaaccagaaagcttgcaaccaagacagaataaatccaagtccgaaattactgacatggttcgctcctccactatcacagtgtcggacaaggctcatattttatccatgcagaagtttggactgcgagatacaattgtgaaatcacatctactacagaaagaagaggattacacctatatccagaacttcaggttttttgcgggaacatacaatgtaaatgggcagtcccccaaagaatgcctccggctgtggctgagcaatggtatccaggccccagatgtctattgtgtagggttccaggagcttgatctgagtaaggaagcttttttctttcacgataccccaaaggaggaagagtggttcaaagctgtgtcagagggtcttcatccagatgccaaatatgcaaaggtgaagcttatccgactggttgggattatgctgctgttatatgtcaaacaggagcatgcagcttatatctcagaagtggaagccgagactgtggggacaggaatcatggggaggatgggcaacaagggaggcgtggcgatcaggttccagttccacaacaccagcatctgcgttgtgaattctcacttggcagcccacattgaagagtatgagaggaggaaccaggactataaggacatttgttctcgaatgcagttttgtcagcctgacccaagccttccccctctcaccatcagcaaccatgatgtgatcttgtggctgggggacctcaactacaggatagaagagctggatgtggaaaaagtgaaaaagctcatcgaagagaaggactttcaaatgctgtatgcatatgatcagctgaaaattcaggtggccgcaaagactgtctttgaaggcttcacagagggtgagctcacattccagcctacttacaagtatgatacgggctctgacgactgggataccagtgagaagtgccgtgctcctgcctggtgtgatcggattctctggaaagggaagaacatcactcagctgagttaccagagccacatggccctgaagaccagtgaccacaagcctgtcagctcagtgtttgacatcggggtgagggtcgtaaatgacgagctttaccggaagacactggaggaaattgttcgctccctggataagatggaaaatgccaacattccttctgtgtccctgtccaagcgagagttctgttttcagaatgtgaagtacatgcaattgaaagtagaatcctttacaattcataatggacaagtaccctgtcattttgaattcatcaacaagcctgatgaagagtcttactgtaagcagtggctgaatgccaaccccagcagaggcttcctcctgccagattctgatgttgagattgacttggagctcttcgtaaataagatgacagctacaaagctcaactcgggtgaagacaaaattgaggacattctggttctgcacttggacaggggaaaggattactttttgtctgtgtctgggaactacctgcccagctgttttgggtctcccattcatacactgtgttacatgagagagccaatcttggacctaccacttgaaaccattagtgagctgactctgatgccagtatggactggagatgatgggagccagttggatagccccatggaaatccccaaagagctctggatgatggttgattacctgtaccgaaatgctgtccagcaggaagatctgtttcagcaaccaggcctgaggtcagaatttgaacatatcagggactgcttggatactggaatgattgataacctctctgccagcaatcattctgtagccgaagccctgctgcttttcctggagagccttccagagcctgtcatctgttacagcacctaccataactgcttggagtgttctggcaactacacagcaagcaaacaggtcatttctactctccccatattccacaaaaatgtcttccactacttgatggcgtttttgcgagaactgctgaaaaattcagcaaaaaatcatttggatgagaatattctagctagcatatttggcagcttattgcttcgaaacccagctggtcaccaaaagcttgatatgacagagaagaagaaggctcaagaatttattcaccagttcctctgcaacccactctgagcctctctctcctcctattttacttgaggctgccaattaccagccccacctgtttcagctcaagagatgccttaagataattatgtgaggccacttggtagcaagaatggcagctatttcctgagcctagtaccccaattaagcccaccattggttagcacactcagcgctgtgagtcgtgaagacacgggagaaaatccaccataataaaactgacattcaattttcaa

SEQ ID NO: 14420 - DNA, 3230 bp, Homo sapiens
  source 1..3230: mol_type = unassigned DNA
catggaccagtctgtggcaatccaggagacgctggctgagggggaatactgcgtcatcgcggtgcaaggtgtgctgtgtgagggggacagccggcagagccgcctcctgggactcgtgcgctaccgcctggagcacggcggccaggaacacgctctcttcctctatacgcaccggaggatggccattaccggggacgatgtctctctggaccagatagtgccagtctcgcgggattttacgctggaagaagtgtccccagatggtgaactctacatccttggctcagatgtgaccgtccagctggacacagcagagcttagcctcgtattccaactgccctttggttcacaaaccaggatgttcctccacgaagttgccagggcctgtccaggcttcgattctgcgacccgggatcctgaattcctgtggctgtctcggtataggtgcgcagagctggagctggagatgccaacgccgcgcggttgtaactcggccctagttacctggccagggtacgcgacaattggcggaggcaggtatccgtcccggaagaaacggtggggattggaggaggcccggccacagggggcgggctccgttctgttttggggcggagcgatggagaagacaggctttcgattgatggagcgggcacacgggggcgggttcgtctgggggcggagcgcgcgggacgggcggcgggatgaggagcttgaggaagcaggcagggaaatgtctgccgccgccggctctcgggagcgcaacactgcaggtggttctaactttgatggtttgagaccaaatgggaagggagtgcctatggaccaaagctccaggggtcaagataaaccagaaagcttgcaaccaagacagaataaatccaagtccgaaattactgacatggttcgctcctccactatcacagtgtcggacaaggctcatattttatccatgcagaagtttggactgcgagatacaattgtgaaatcacatctactacagaaagaagaggattacacctatatccagaacttcaggttttttgcgggaacatacaatgtaaatgggcagtcccccaaagaatgcctccggctgtggctgagcaatggtatccaggccccagatgtctattgtgtagggttccaggagcttgatctgagtaaggaagcttttttctttcacgataccccaaaggaggaagagtggttcaaagctgtgtcagagggtcttcatccagatgccaaatatgcaaaggtgaagcttatccgactggttgggattatgctgctgttatatgtcaaacaggagcatgcagcttatatctcagaagtggaagccgagactgtggggacaggaatcatggggaggatgggcaacaagggaggcgtggcgatcaggttccagttccacaacaccagcatctgcgttgtgaattctcacttggcagcccacattgaagagtatgagaggaggaaccaggactataaggacatttgttctcgaatgcagttttgtcagcctgacccaagccttccccctctcaccatcagcaaccatgatgtgatcttgtggctgggggacctcaactacaggatagaagagctggatgtggaaaaagtgaaaaagctcatcgaagagaaggactttcaaatgctgtatgcatatgatcagctgaaaattcaggtggccgcaaagactgtctttgaaggcttcacagagggtgagctcacattccagcctacttacaagtatgatacgggctctgacgactgggataccagtgagaagtgccgtgctcctgcctggtgtgatcggattctctggaaagggaagaacatcactcagctgagttaccagagccacatggccctgaagaccagtgaccacaagcctgtcagctcagtgtttgacatcggggtgagggtcgtaaatgacgagctttaccggaagacactggaggaaattgttcgctccctggataagatggaaaatgccaacattccttctgtgtccctgtccaagcgagagttctgttttcagaatgtgaagtacatgcaattgaaagtagaatcctttacaattcataatggacaagtaccctgtcattttgaattcatcaacaagcctgatgaagagtcttactgtaagcagtggctgaatgccaaccccagcagaggcttcctcctgccagattctgatgttgagattgacttggagctcttcgtaaataagatgacagctacaaagctcaactcgggtgaagacaaaattgaggacattctggttctgcacttggacaggggaaaggattactttttgtctgtgtctgggaactacctgcccagctgttttgggtctcccattcatacactgtgttacatgagagagccaatcttggacctaccacttgaaaccattagtgagctgactctgatgccagtatggactggagatgatgggagccagttggatagccccatggaaatccccaaagagctctggatgatggttgattacctgtaccgaaatgctgtccagcaggaagatctgtttcagcaaccaggcctgaggtcagaatttgaacatatcagggactgcttggatactggaatgattgataacctctctgccagcaatcattctgtagccgaagccctgctgcttttcctggagagccttccagagcctgtcatctgttacagcacctaccataactgcttggagtgttctggcaactacacagcaagcaaacaggtcatttctactctccccatattccacaaaaatgtcttccactacttgatggcgtttttgcgagaactgctgaaaaattcagcaaaaaatcatttggatgagaatattctagctagcatatttggcagcttattgcttcgaaacccagctggtcaccaaaagcttgatatgacagagaagaagaaggctcaagaatttattcaccagttcctctgcaacccactctgagcctctctctcctcctattttacttgaggctgccaattaccagccccacctgtttcagctcaagagatgccttaagataattatgtgaggccacttggtagcaagaatggcagctatttcctgagcctagtaccccaattaagcccaccattggttagcacactcagcgctgtgagtcgtgaagacacgggagaaaatccaccataataaaactgacattcaattttcaactttagttatttaacac

SEQ ID NO: 14421 - DNA, 3905 bp, Homo sapiens
  source 1..3905: mol_type = unassigned DNA
gcggcgggatgaggagcttgaggaagcaggcagggaaatgtctgccgccgccggctctcgggagcgcaacactgcaggtggttctaactttgatggtttgagaccaaatgggaagggagtgcctatggaccaaagctccaggggtcaagataaaccagaaagcttgcaaccaagacagaataaatccaagtccgaaattactgacatggttcgctcctccactatcacagtgtcggacaaggctcatattttatccatgcagaagtttggactgcgagatacaattgtgaaatcacatctactacagaaagaagaggattacacctatatccagaacttcaggttttttgcgggaacatacaatgtaaatgggcagtcccccaaagaatgcctccggctgtggctgagcaatggtatccaggccccagatgtctattgtgtagggttccaggagcttgatctgagtaaggaagcttttttctttcacgataccccaaaggaggaagagtggttcaaagctgtgtcagagggtcttcatccagatgccaaatatgcaaaggtgaagcttatccgactggttgggattatgctgctgttatatgtcaaacaggagcatgcagcttatatctcagaagtggaagccgagactgtggggacaggaatcatggggaggatgggcaacaagggaggcgtggcgatcaggttccagttccacaacaccagcatctgcgttgtgaattctcacttggcagcccacattgaagagtatgagaggaggaaccaggactataaggacatttgttctcgaatgcagttttgtcagcctgacccaagccttccccctctcaccatcagcaaccatgatgtgatcttgtggctgggggacctcaactacaggatagaagagctggatgtggaaaaagtgaaaaagctcatcgaagagaaggactttcaaatgctgtatgcatatgatcagctgaaaattcaggtggccgcaaagactgtctttgaaggcttcacagagggtgagctcacattccagcctacttacaagtatgatacgggctctgacgactgggataccagtgagaagtgccgtgctcctgcctggtgtgatcggattctctggaaagggaagaacatcactcagctgagttaccagagccacatggccctgaagaccagtgaccacaagcctgtcagctcagtgtttgacatcggggtgagggtcgtaaatgacgagctttaccggaagacactggaggaaattgttcgctccctggataagatggaaaatgccaacattccttctgtgtccctgtccaagcgagagttctgttttcagaatgtgaagtacatgcaattgaaagtagaatcctttacaattcataatggacaagtaccctgtcattttgaattcatcaacaagcctgatgaagagtcttactgtaagcagtggctgaatgccaaccccagcagaggcttcctcctgccagattctgatgttgagattgacttggagctcttcgtaaataagatgacagctacaaagctcaactcgggtgaagacaaaattgaggacattctggttctgcacttggacaggggaaaggattactttttgtctgtgtctgggaactacctgcccagctgttttgggtctcccattcatacactgtgttacatgagagagccaatcttggacctaccacttgaaaccattagtgagctgactctgatgccagtatggactggagatgatgggagccagttggatagccccatggaaatccccaaagagctctggatgatggttgattacctgtaccgaaatgctgtccagcaggaagatctgtttcagcaaccaggcctgaggtcagaatttgaacatatcagggactgcttggatactggaatgattgataacctctctgccagcaatcattctgtagccgaagccctgctgcttttcctggagagccttccagagcctgtcatctgttacagcacctaccataactgcttggagtgttctggcaactacacagcaagcaaacaggtcatttctactctccccatattccacaaaaatgtcttccactacttgatggcgtttttgcgagaactgctgaaaaattcagcaaaaaatcatttggatgagaatattctagctagcatatttggcagcttattgcttcgaaacccagctggtcaccaaaagcttgatatgacagagaagaagaaggctcaagaatttattcaccagttcctctgcaacccactctgagcctctctctcctcctattttacttgaggctgccaattaccagccccacctgtttcagctcaagagatgccttaagataattatgtgaggccacttggtagcaagaatggcagctatttcctgagcctagtaccccaattaagcccaccattggttagcacactcagcgctgtgagtcgtgaagacacgggagaaaatccaccataataaaactgacattcaattttcaactttagttatttaacacagatttttttattttttatttttttttattttgagacggagttttgctctgtcgcgcagggtggagtgcggtggcacgatctcggctcactgcaacctctgcctcctgggtgcaagcaattatcctgcctcagcctcccgagtagctgggactgcaggcacacactgccacgcccagctaattttttgcattttagtagagacggggtttcaccgtgttgcccaggctgttctaaaactcctgaactcaggtaatctgcctgcctcggcctccccaagtgctaggattacagatgtgagccaccacgcccggccttttttttttttttttcttttttgagatggagtttcactcttgttgcccaggctggagtgcgttggcgtggtcttggctcactgcaacctctgcctccttggttcaagcaattctcctgcctcagcctctcgagtagctgggattataggcgtccgccaccatgcctggctaatttttttgtgtgtttttagtatagacacggtttcaccatgttggccaggctggtctcgaatgcctggcctcaggtgatccacctgccttggcctcccaaagtgctgggattacaggcatgaaccaccacgcctggcctaaaatgtttttaaataactgtacttgtactcactcaccctacctccagggcatagtcagtctgggctgagatccccatgatcagatatttgatggaaagtcctgaaaggccaatgagttggatggcaagaatgcaggcagaagctgctggataaaataggctacagccacctcagatgctttcagtgctctgtctgaggatgtgtatatgcatatgcaaactcgacccccgttcctgcccagataatggctcaataactctgaggctggttgctcagcctctgagggcaatacaggcatttaaaaaattaaaatgaccaggcacagtggctcacgcctgtaatctcggcactttgggagactgaggtgggagcatcacttgagaccaggagtttgggaccaggctgggcaacacagggagaccccctctctacaaaaacatttttaaaaaattagctgggtgtggtgatgcatgcctgtggtcccagttacttgggaggctgacgtgggtggctcacttgagcacaggagtttgaggctgcagtgacctatgaccacatcactgtacgccagcccgggtgagagagggagaccccgtctctaaaaataaaatgtaaaatcactgaaaaaatgagtgttcggtgaaacaagtgggattttctgggccagcaagtcttccaaactgtatatgatgcatcctgtctccatgtgtaatatattttaatgataaatgtatttttaacagtg

SEQ ID NO: 14422 - DNA, 4255 bp, Homo sapiens
  source 1..4255: mol_type = unassigned DNA
aaatgtagtcactgtcccggaacctggggcagcggagtcccgtgcgccctgtggtgacagctcaggagggtgtgtgcgctcagcaggggccagcatggaccagtctgtggcaatccaggagacgctggctgagggggaatactgcgtcatcgcggtgcaaggtgtgctgtgtgagggggacagccggcagagccgcctcctgggactcgtgcgctaccgcctggagcacggcggccaggaacacgctctcttcctctatacgcaccggaggatggccattaccggggacgatgtctctctggaccagatagtgccagtctcgcgggattttacgctggaagaagtgtccccagatggtgaactctacatccttggctcagatgtgaccgtccagctggacacagcagagcttagcctcgtattccaactgccctttggttcacaaaccaggatgttcctccacgaagttgccagggcctgtccaggcttcgattctgcgacccgggatcctgaattcctgtggctgtctcggtataggtgcgcagagctggagctggagatgccaacgccgcgcggttgtaactcggccctagttacctggccagggtacgcgacaattggcggaggcaggtatccgtcccggaagaaacggtggggattggaggaggcccggccacagggggcgggctccgttctgttttggggcggagcgatggagaagacaggctttcgattgatggagcgggcacacgggggcgggttcgtctgggggcggagcgcgcgggacgggcggcgggatgaggagcttgaggaagcaggcagggaaatgtctgccgccgccggctctcgggagcgcaacactgcaggtggttctaactttgatggtttgagaccaaatgggaagggagtgcctatggaccaaagctccaggggtcaagataaaccagaaagcttgcaaccaagacagaataaatccaagtccgaaattactgacatggttcgctcctccactatcacagtgtcggacaaggctcatattttatccatgcagaagtttggactgcgagatacaattgtgaaatcacatctactacagaaagaagaggattacacctatatccagaacttcaggttttttgcgggaacatacaatgtaaatgggcagtcccccaaagaatgcctccggctgtggctgagcaatggtatccaggccccagatgtctattgtgtagggttccaggagcttgatctgagtaaggaagcttttttctttcacgataccccaaaggaggaagagtggttcaaagctgtgtcagagggtcttcatccagatgccaaatatgcaaaggtgaagcttatccgactggttgggattatgctgctgttatatgtcaaacaggagcatgcagcttatatctcagaagtggaagccgagactgtggggacaggaatcatggggaggatgggcaacaagggaggcgtggcgatcaggttccagttccacaacaccagcatctgcgttgtgaattctcacttggcagcccacattgaagagtatgagaggaggaaccaggactataaggacatttgttctcgaatgcagttttgtcagcctgacccaagccttccccctctcaccatcagcaaccatgatgtgatcttgtggctgggggacctcaactacaggatagaagagctggatgtggaaaaagtgaaaaagctcatcgaagagaaggactttcaaatgctgtatgcatatgatcagctgaaaattcaggtggccgcaaagactgtctttgaaggcttcacagagggtgagctcacattccagcctacttacaagtatgatacgggctctgacgactgggataccagtgagaagtgccgtgctcctgcctggtgtgatcggattctctggaaagggaagaacatcactcagctgagttaccagagccacatggccctgaagaccagtgaccacaagcctgtcagctcagtgtttgacatcggggtgagggtcgtaaatgacgagctttaccggaagacactggaggaaattgttcgctccctggataagatggaaaatgccaacattccttctgtgtccctgtccaagcgagagttctgttttcagaatgtgaagtacatgcaattgaaagtagaatcctttacaattcataatggacaagtaccctgtcattttgaattcatcaacaagcctgatgaagagtcttactgtaagcagtggctgaatgccaaccccagcagaggcttcctcctgccagattctgatgttgagattgacttggagctcttcgtaaataagatgacagctacaaagctcaactcgggtgaagacaaaattgaggacattctggttctgcacttggacaggggaaaggattactttttgtctgtgtctgggaactacctgcccagctgttttgggtctcccattcatacactgtgttacatgagagagccaatcttggacctaccacttgaaaccattagtgagctgctagcatatttggcagcttattgcttcgaaacccagctggtcaccaaaagcttgatatgacagagaagaagaaggctcaagaatttattcaccagttcctctgcaacccactctgagcctctctctcctcctattttacttgaggctgccaattaccagccccacctgtttcagctcaagagatgccttaagataattatgtgaggccacttggtagcaagaatggcagctatttcctgagcctagtaccccaattaagcccaccattggttagcacactcagcgctgtgagtcgtgaagacacgggagaaaatccaccataataaaactgacattcaattttcaactttagttatttaacacagatttttttattttttatttttttttattttgagacggagttttgctctgtcgcgcagggtggagtgcggtggcacgatctcggctcactgcaacctctgcctcctgggtgcaagcaattatcctgcctcagcctcccgagtagctgggactgcaggcacacactgccacgcccagctaattttttgcattttagtagagacggggtttcaccgtgttgcccaggctgttctaaaactcctgaactcaggtaatctgcctgcctcggcctccccaagtgctaggattacagatgtgagccaccacgcccggccttttttttttttttttcttttttgagatggagtttcactcttgttgcccaggctggagtgcgttggcgtggtcttggctcactgcaacctctgcctccttggttcaagcaattctcctgcctcagcctctcgagtagctgggattataggcgtccgccaccatgcctggctaatttttttgtgtgtttttagtatagacacggtttcaccatgttggccaggctggtctcgaatgcctggcctcaggtgatccacctgccttggcctcccaaagtgctgggattacaggcatgaaccaccacgcctggcctaaaatgtttttaaataactgtacttgtactcactcaccctacctccagggcatagtcagtctgggctgagatccccatgatcagatatttgatggaaagtcctgaaaggccaatgagttggatggcaagaatgcaggcagaagctgctggataaaataggctacagccacctcagatgctttcagtgctctgtctgaggatgtgtatatgcatatgcaaactcgacccccgttcctgcccagataatggctcaataactctgaggctggttgctcagcctctgagggcaatacaggcatttaaaaaattaaaatgaccaggcacagtggctcacgcctgtaatctcggcactttgggagactgaggtgggagcatcacttgagaccaggagtttgggaccaggctgggcaacacagggagaccccctctctacaaaaacatttttaaaaaattagctgggtgtggtgatgcatgcctgtggtcccagttacttgggaggctgacgtgggtggctcacttgagcacaggagtttgaggctgcagtgacctatgaccacatcactgtacgccagcccgggtgagagagggagaccccgtctctaaaaataaaatgtaaaatcactgaaaaaatgagtgttcggtgaaacaagtgggattttctgggccagcaagtcttccaaactgtatatgatgcatcctgtctccatgtgtaatatattttaatgataaatgtatttttaacagtg

SEQ ID NO: 14423 - DNA, 1241 bp, Homo sapiens
  source 1..1241: mol_type = unassigned DNA
cacagtgtcggacaaggctcatattttatccatgcagaagtttggactgcgagatacaattgtgaaatcacatctactacagaaagaagaggattacacctatatccagaacttcaggttttttgcgggaacatacaatgtaaatgggcagtcccccaaagaatgcctccggctgtggctgagcaatggtatccaggccccagatgtctattgtgtagggttccaggagcttgatctgagtaaggaagcttttttctttcacgataccccaaaggaggaagagtggttcaaagctgtgtcagagggtcttcatccagatgccaaatatgcaaaggtgaagcttatccgactggttgggattatgctgctgttatatgtcaaacaggagcatgcagcttatatctcagaagtggaagccgagactgtggggacaggaatcatggggaggatgtgtgatcttgtggctgggggacctcaactacaggatagaagagctggatgtggaaaaagtgaaaaagctcatcgaagagaaggactttcaaatgctgtatgcatatgatcagctgaaaattcaggtggccgcaaagactgtctttgaaggcttcacagagggtgagctcacattccagcctacttacaagtatgatacgggctctgacgactgggataccaggatacatgttatcccttggtgggcccgaattgctcttgctgcctcagatgacttagccacatggacatgaaggccctgattcatcactccccacctgagccagggcactcgccaggcagcgggcactgctgtttctgtgagtacttccagtgtggactttgcatttcagtgagaagtgccgtgctcctgcctggtgtgatcggattctctggaaagggaagaacatcactcagctgagttaccagagccacatggccctgaagaccagtgaccacaagcctgtcagctcagtgtttgacatcggggtgagggtcgtaaatgacgagctttaccggaagacactggaggaaattgttcgctccctggataagatggaaaatgccaacattccttctgtgtccctgtccaagcgagagttctgttttcagaatgtgaagtacatgcaattgaaagtagaatcctttacaattcataatggacaagtaccctgtcattttgaattcatcaacaagcctgatgaagagtcttactgtaagcagtggctgaatgccaaccccagcagaggctt

SEQ ID NO: 14424 - DNA, 2690 bp, Homo sapiens
  source 1..2690: mol_type = unassigned DNA
gttagcacctaaaagctgcataatcggaatcatatctgcaatctgggttttgtcaaaatagtactatagaataaatgggagaaagaagaaagcaagctaaatgggaaaccgtgaatgaatggaggacgaaagaagaaaaaggcaaagtaaagagagaagtaatgtttaaaaactgagagatgaaaagacaagcaggagaaaagaaccagaagctagaatgaagaggcagtatcccatgctccagcgcgggtcaggacccggcccggcctggcagaggctcgcagggcgcagctcggggcggggcccagcaaagcaaccacgccccctcaggaatggagtttttaagggcggaacttcctgttgcgagtagcccctctacctccggaagagacgagtgcggtaacaccgttcacagagctagccggacgtcctccgactcaagatatttgtcaaatattttcagaagatggctgatccttggcaggaatgcatggattatgcagtaactctagcaagacaagctggagaggtagtttgtgaagctataaaaaatgaaatgaatgttatgctgaaaagttctccagttgatttggtaactgctacggaccaaaaagttgaaaaaatgcttatctcttccataaaggaaaagtatccatctcacagtttcattggtgaagaatctgtggcagctggggaaaaaagtatcttaaccgacaaccccacatggatcattgaccctattgatggaacaactaactttgtacatagatttccttttgtagctgtttcaattggctttgctgtaaataaaaagatagaatttggagttgtgtacagttgtgtggaaggcaagatgtacactgccagaaaaggaaaaggtgccttttgtaatggtcaaaaactacaagtttcacaacaagaagatattaccaaatctctcttggtgactgagttgggctcttccagaacaccagagactgtgagaatggttctttctaatatggaaaagcttttttgcattcctgttcatgggatccggagtgttggaacagcagctgttaatatgtgccttgtggcaactggcggagcagatgcatattatgaaatgggaattcactgctgggatgttgcaggagctggcattattgttactgaagctggtggcgtgctaatggatgttacaggtggaccatttgatttgatgtcacgaagagtaattgctgcaaataatagaatattagcagaaaggatagctaaagaaattcaggttatacctttgcaacgagacgacgaagattaattaaggcagcctcatagtcaatcccagttgcttttccccagatttggtgactcatcaatggatatgtgttttggatgtatgatatgcttggtttaaattctctttgtccaggtcaaaaatttggaacttgtttcttattttactatgtctaggtttgcaagaattgacataatgtttgtttcactgatttaaaaaattttgcatgtaagaatgtactttaggaaacatacccaggaagtacagttgataaatataacatcaactgaaatagtcaattagcaattttgtgtttctaaatatctatggtcccctgaaattttgacttagtatataggtgcagagacacccacttagaaagttaactgtttggaaaaacatttctctttagtttcaaaaaccatatataattaaatttgtaaggatatactgagtaccctaggccaacttttttttctttgcagagaaccttttttgttttattcttcagtgttcatatagcacctggcccattacatatctaggcaactaaaaacaaacattgtaagaatgaatatttttaatgtagtaattcctagttacaatagatacataaagtaatgaactcagcattctgtacttttgcttcaggtttgaagtaaaaattatctagttaaattttttttatttcacgttaccatgccatttcacattaccataccatcagatagcatggcttattgtgggcatttctgcagtgaatacattttccaaaacagttaaattgtctgtttggatttgctttaaagtcttgtgtaagagagaagaaactatttctataataaaaagcactctcatcagatatctgacataattagatacaatataacattttactaagttcagtattcatgttttaaaggtgtttatactgatttgattgtgctggcaaatatactgtattgttaatattgaactgtttatttttctcttagtcttcttatttaattaacttcattgccgctggattctgttcagcctttaaaaatatttcttagtggtcattgctctgcagaactcaaaaagaaaattgtacttgttcatagacatttttaaagggttaatttattgttcagccttatcccttggcacgtaaacagactactagacttattgtaggttcgtttgagctttgtgttgtaaaattaaaaatgcttctgtaaagttttcaaggtagggagtgattttattattgtgtatatctaatatattaagtatgtgtgatactaaggtttgactgctataattatttgtactgttgatcacatgtacttaaaacatctgatactgtattctaagacaggttgtttttgcaattaaatttattttaataagacgatcatgaataaaactt

SEQ ID NO: 14425 - DNA, 1106 bp, Homo sapiens
  source 1..1106: mol_type = unassigned DNA
gagtgcggtaacaccgttcacagagctagccggacgtcctccgactcaagatatttgtcaaatattttcagaagatggctgatccttggcaggaatgcatggattatgcagtaactctagcaagacaagctggagaggtagtttgtgaagctataaaaaatgaaatgaatgttatgctgaaaagttctccagttgatttggtaactgctacggaccaaaaagttgaaaaaatgcttatctcttccataaaggaaaagtatccatctcacagtttcattggtgaagaatctgtggcagctggggaaaaaagtatcttaaccgacaaccccacatggatcattgaccctattgatggaacaactaactttgtacatagatttccttttgtagctgtttcaattggctttgctgtaaataaaaagatagaatttggagttgtgtacagttgtgtggaaggcaagatgtacactgccagaaaaggaaaaggtgccttttgtaatggtcaaaaactacaagtttcacaacaagaaggatccggagtgttggaacagcagctgttaatatgtgccttgtggcaactggcggagcagatgcatattatgaaatgggaattcactgctgggatgttgcaggagctggcattattgttactgaagctggtggcgtgctaatggatgttacaggtggaccatttgatttgatgtcacgaagagtaattgctgcaaataatagaatattagcagaaaggatagctaaagaaattcaggttatacctttgcaacgagacgacgaagattaattaaggcagcctcatagtcaatcccagttgcttttccccagatttggtgactcatcaatggatatgtgttttggatgtatgatatgcttggtttaaattctctttgtccaggtcaaaaatttggaacttgtttcttattttactatgtctaggtttgcaagaattgacataatgtttgtttcactgatttaaaaaattttgcatgtaagaatgtactttaggaaacatacccaggaagtacagttgataaatataacatcaactgaaatagtcaattagcaattttgtgtttctaaatatctatggt

SEQ ID NO: 14426 - DNA, 1180 bp, Homo sapiens
  source 1..1180: mol_type = unassigned DNA
cacagagctagccggacgtcctccgactcaagctcctagaaacttggtgcatccccaggcccaggtagtcactctaagtgatggggcagcgcccaggtcctgtgctgcccgcagtcgcggtgctgggacaggtggcaaaaaggaaggtggcctggctcctacgctggaaggctgtgaccaggacagaaacagcaggaaacagttcaggtgtttatggctttgggaaaatgaaaatatttgtcaaatattttcagaagatggctgatccttggcaggaatgcatggattatgcagtaactctagcaagacaagctggagaggtagtttgtgaagctataaaaaatgaaatgaatgttatgctgaaaagttctccagttgatttggtaactgctacggaccaaaaagttgaaaaaatgcttatctcttccataaaggaaaagtatccatctcacagtttcattggtgaagaatctgtggcagctggggaaaaaagtatcttaaccgacaaccccacatggatcattgaccctattgatggaacaactaactttgtacatagatttccttttgtagctgtttcaattggctttgctgtaaataaaaagatagaatttggagttgtgtacagttgtgtggaaggcaagatgtacactgccagaaaaggaaaaggtgccttttgtaatggtcaaaaactacaagtttcacaacaagaagatattaccaaatctctcttggtgactgagttgggctcttccagaacaccagagactgtgagaatggttctttctaatatggaaaagcttttttgcattcctgttcatgggatccggagtgttggaacagcagctgttaatatgtgccttgtggcaactggcggagcagatgcatattatgaaatgggaattcactgctgggatgttgcaggagctggcattattgttactgaagctggtggcgtgctaatggatgttacaggtggaccatttgatttgatgtcacgaagagtaattgctgcaaataatagaatattagcagaaaggatagctaaagaaattcaggttatacctttgcaacgagacgacgaagattaattaaggcagcctcatagtcaatcccagttgcttttccccagatttggtgactcatcaatggatatgtgttttggatgtatgatatgctt

SEQ ID NO: 14427 - DNA, 543 bp, Homo sapiens
  source 1..543: mol_type = unassigned DNA
ggaagagacgagtgcggtaacaccgttcacagagctagccggacgtcctccgactcaagatatttgtcaaatattttcagaagatggctgatccttggcaggaatgcatggattatgcagtaactctagcaagacaagctggagaggtagtttgtgaagctataaaaaatgaaatgaatgttatgctgaaaagttctccagttgatttggtaactgctacggaccaaaaagttgaaaaaatgcttatctcttccataaaggaaaagtatccatctcacagatttccttttgtagctgtttcaattggctttgctgtaaataaaaagatagaatttggagttgtgtacagttgtgtggaaggcaagatgtacactgccagaaaaggaaaaggtgccttttgtaatggtcaaaaactacaagtttcacaacaagaagatattaccaaatctctcttggtgactgagttgggctcttccagaacaccagagactgtgagaatggttctttctaatatggaaaagcttttttgcattcctgttcatg

SEQ ID NO: 14428 - DNA, 770 bp, Homo sapiens
  source 1..770: mol_type = unassigned DNA
gtagcggttcgctcacgcgacctcacttaacctctgtggcggcttctgtggaataattgcccctttttatgtccccaactccgaaaagctcctagaaacttggtgcatccccaggcccaggtagtcactctaagtgatggggcagcgcccaggtcctgtgctgcccgcagtcgcggtgctgggacaggtggcaaaaaggaaggtggcctggctcctacgctggaaggctgtgaccaggacagaaacagcaggaaacagttcaggtgtttatggctttgggaaaatgaaaatatttgtcaaatattttcagaagatggctgatccttggcaggaatgcatggattatgcagtaactctagcaagacaagctggagaggtagtttgtgaagctataaaaaatgaaatgaatgttatgctgaaaagttctccagttgatttggtaactgctacggaccaaaaagttgaaaaaatgcttatctcttccataaaggaaaagtatccatctcacagtttcattggtgaagaatctgtggcagctggggaaaaaagtatcttaaccgacaaccccacatggatcattgaccctattgatggaacaactaactttgtacatagatttccttttgtagctgtttcaattggctttgctgtaaataaaaagatagaatttggagttgtgtacagttgtgtggaaggcaagatgtacactgccagaaaaggaaaaggtgccttttgtaatggtcaaaaactacaagtttcacaacaagaag

SEQ ID NO: 14429 - DNA, 1528 bp, Homo sapiens
  source 1..1528: mol_type = unassigned DNA
gctgggctgggctcggcacggggcggggcggagggtggggagcggaaagcaggacgcacggctcccgcggcccgctggctgcccttcccgccagcgcaggtgtgggacgggcggcggactaggcacagagctgcgggagcaggcacagggagtgtggagcctggcggcgggacggcgggatccggtgggagccggagtcccgccgaggggggctggaggtggaggggcccggcgaggccgcgatgaagccgagcggcgaggaccaggcggcgctggcggccggcccctgggaggagtgcttccaggcggccgtgcagctggcgctgcgggcaggacagatcatcagaaaagcccttactgaggaaaaacgtgtctcaacaaaaacatcagctgcagatcttgtgacagaaacagatcaccttgtggaagatttaattatttctgagttgcgagagaggtttccttcacacaggttcattgcagaagaggccgcggcttctggggccaagtgtgtgctcacccacagcccgacgtggatcatcgaccccatcgacggcacctgcaattttgtgcacagattcccgactgtggcggttagcattggatttgctgttcgacaagagcttgaattcggagtgatttaccactgcacagaggagcggctgtacacgggccggcggggtcggggcgccttctgcaatggccagcggctccgggtctccggggagacagatctctcaaaggccttggttctgacagaaattggccccaaacgtgaccctgcgaccctgaagctgttcctgagtaacatggagcggctgctgcatgccaaggcgcatggggtccgagtgattggaagctccacattggcactctgccacctggcctcaggggccgcggatgcctattaccagtttggcctgcactgctgggatctggcggctgccacagtcatcatcagagaagcaggcggcatcgtgatagacacttcgggtggacccctcgacctcatggcttgcagagtggttgcggccagcacccgggagatggcgatgctcatagctcaggccttacagacgattaactatgggcgggatgatgagaagtgactgcggctgaggcaaagctgctcccaaggcctccctgggctgctgtgggctcctggggaggtggccctcgtggcccacgctccatgccagtggctcacgctctgctcctggctaccccagagggagttgtcacgctacagtgagtggctggccttttaaatcgacgtctctctcaccaggatttggtgtttagctgtttctctctttaatctcacgtagcctttttcaggttagtacgtgttcttctgtcagggccaaaactcaaatctcctgtgaaatacgtattgataatccaatcttgatttttccccccagaatataaatctcaggtaataaggctttagaactgctgataaagcggatcgttctcaggccctccccccggagtacttcagaatgcaataaatcaaaataatggc

SEQ ID NO: 14430 - DNA, 1574 bp, Homo sapiens
  source 1..1574: mol_type = unassigned DNA
cgccagcgcaggtgtgggacgggcggcggactaggcacagagctgcgggagcaggcacagggagtgtggagcctggcggcgggacggcgggatccggtgggagccggagtcccgccgaggggggctggaggtggaggggcccggcgaggccgcgatgaagccgagcggcgaggaccaggcggcgctggcggccggcccctgggaggagtgcttccaggcggccgtgcagctggcgctgcgggcaggacagatcatcagaaaagcccttactgaggaaaaacgtgtctcaacaaaaacatcagctgcagatcttgtgacagaaacagatcaccttgtggaagatttaattatttctgagttgcgagagaggtttccttcacacaggtctcctttttctctagtacacatgtgaacccggcacaggaactggatagaaaacctctcggcaaggccacatagtcatgcacagaacagatgtttgcttagcgcctgcccaaggcctcacccttagtgaacttgggacagtccaagagtgtcaaaagcactgccctgaatgctttagatctagtcttttctttgatcctgagaatgcctttggaaggtgtaaacagcggccagctccacagggaccagcctgcagaaggttcattgcagaagaggccgcggcttctggggccaagtgtgtgctcacccacagcccgacgtggatcatcgaccccatcgacggcacctgcaattttgtgcacagattcccgactgtggcggttagcattggatttgctgttcgacaagagcttgaattcggagtgatttaccactgcacagaggagcggctgtacacgggccggcggggtcggggcgccttctgcaatggccagcggctccgggtctccggggagacaggatctcactctgtcacccaggctggagtgcggtggtgcagtcttggctcactgcagcctccacatcctaggttcaagcaattctcctgcctcatcctcctgagtagctgggactacaggcatgcgccaccacatctggctaatttttttgtattttttagtagagacggggtttcaccatgttggccaggctggtctcaaactgctgacctcaagtgagccttttgcctcggcctccgaaagtgctggggttacagttgtgagccactgcacctgaccatatttttaaaatatagagtcgataatgagttatactgggtttttttttttctgtttttttttttctgagatggagtttcactcttgttgcccaggctggagtgcaatggggcgatctcggctcactgcaacctccgcctccctggttcaagtgattttcctcctaagcctcccaagtagctgggattacaggcgcatgccaccatgcccagctaatttttgtatttttagtggagacagggttttgtcatgttggccaggctggtcttgaactcctgacctcaggtgatccacccgcccgggcctcccaaagtattgggattacaggcatgagccaccacacccggcctcaaccccatctcttaaaaaaataaaaagataacctttgctctc

SEQ ID NO: 14431 - DNA, 1647 bp, Homo sapiens
  source 1..1647: mol_type = unassigned DNA
ccggaggtcgcgcgcccgagagcccgcgctgtccgccgccgctgcctgagtcgactctgcgccgcccgccgcgatggaggccgccgcccagttcttcgtcgagagcccggacgtggtctacggccccgaggccatcgaggcgcaatacgagtaccggacgacgcgcgtcagccgcgagggtggcgttctcaaggtgcaccccacgtccacgcgcttcaccttccggaccgcccggcaggtgccccggctcggggtcatgcttgtcggctggggcgggaacaacggctccacactcaccgccgcggtgctggccaatcgactgcgtttgtcctggcccacgcgcagcggccgcaaggaggccaactactacggctcgctgactcaggcgggcaccgtgagcctgggcctggacgccgagggccaggaggtgttcgtacccttcagcgcggtgctgcccatggtggcgcccaacgacctcgtgttcgatgctggagcagatccgcagggacatccgagacttccggtctagcgcggggctggacaaagtcatagtgctgtggacggcgaacacggagcgcttctgtgaggtgattccaggcctcaacgacacagccgagaacctgctgcgcaccattgagctcggtctggaggtgtcgccctccacgctcttcgccgtggccagcatcctggagggctgtgccttcctcaatgggtctccgcagaacaccctggtgcccggagctcttgagctcgcgtggcagcaccgggtttttgtgggcggagatgacttcaagtcaggccagaccaaagtcaagtccgtgcttgtggacttcctcattggctccggcctcaagaccatgtccatcgtgagttacaaccacctgggcaacaacgatggggagaacctatcggcgccattgcagttccgctctaaggaggtgtccaagagcaacgtggtggacgacatggtgcagagcaacccagtgctctatacgcccggcgaagagcctgaccactgcgtggtcatcaagtatgtgccgtacgtgggtgacagcaagcgcgcgctggatgagtatacctcggagctgatgctgggcggaaccaacacactggtgctgcacaacacgtgtgaggactcgctgctggccgcacccatcatgctggacctagcgctgctgaccgagctgtgccagcgcgtgagcttctgcactgacatggaccccgagccgcagaccttccaccccgtgctgtccctgctcagcttcctcttcaaggcgccactagtgccgcccggcagcccggtggtcaatgcgcttttccgccagcgcagctgcatcgagaacatcctcagggcctgcgtggggctcccgccacagaaccacatgctcctggaacacaaaatggagcgcccagggcccagcctcaagcgagttggacccgtggctgccacctaccctatgttgaacaagaaaggaccggtacccgctgccaccaatggctgcaccggtgatgccaatgggcatctgcaagaggagcccccaatgcccaccacctgaggccccggtcacacagtttctcggctcttcctccccgctgccccccacgaccctaccttgaaggcccccacaaataaaggcgctgccactc

SEQ ID NO: 14432 - DNA, 2420 bp, Homo sapiens
  source 1..2420: mol_type = unassigned DNA
acttccgccaggcggggacccgatggccacggtggctctgggttgtcgggcctcgaaccgggtctccagacgttgggcccctccctcccagcgcgggagaggcggggaagggggcggggcgggggaggggccgcagcgcttttctccggaggtcgcgcgcccgagagcccgcgctgtccgccgccgctgcctgagtcgactctgcgccgcccgccgcgatggaggccgccgcccagttcttcgtcgagagcccggacgtggtctacggccccgaggccatcgaggcgcaatacgagtaccggacgacgcgcgtcagccgcgagggtggcgttctcaaggtgcaccccacgtccacgcgcttcaccttccggaccgcccggcaggtgccccggctcggggtcatgcttgtcggctggggcgggaacaacggctccacactcaccgccgcggtgctggccaatcgactgcgtttgtcctggcccacgcgcagcggccgcaaggaggccaactactacggctcgctgactcaggcgggcaccgtgagcctgggcctggacgccgagggccaggaggtgttcgtacccttcagcgcggtgctgcccatggtggcgcccaacgacctcgtgttcgatggctgggacatctcgtcgctgaacctggccgaggcgatgcggcgcgcgaaggtgctggactgggggctgcaggagcaactgtggccgcacatggaggccctgcggccccggccttctgtttacatccccgaattcatcgcggccaaccagagcgcgcgcgcggacaacctcatcccaggctcgcgtgcgcagcagctggagcagatccgcagggacatccgagacttccggtctagcgcggggctggacaaagtcatagtgctgtggacggcgaacacggagcgcttctgtgaggtgattccaggcctcaacgacacagccgagaacctgctgcgcaccattgagctcggtctggaggtgtcgccctccacgctcttcgccgtggccagcatcctggagggctgtgccttcctcaatgggtctccgcagaacaccctggtgcccggagctcttgagctcgcgtggcagcaccgggtttttgtgggcggagatgacttcaagtcaggccagaccaaagtcaagtccgtgcttgtggacttcctcattggctccggcctcaagaccatgtccatcgtgagttacaaccacctgggcaacaacgatggggagaacctatcggcgccattgcagttccgctctaaggaggtgtccaagagcaacgtggtggacgacatggtgcagagcaacccagtgctctatacgcccggcgaagagcctgaccactgcgtggtcatcaagtatgtgccgtacgtgggtgacagcaagcgcgcgctggatgagtatacctcggagctgatgctgggcggaaccaacacactggtgctgcacaacacgtgtgaggactcgctgctggccgcacccatcatgctggacctagcgctgctgaccgagctgtgccagcgcgtgagcttctgcactgacatggaccccgagccgcagaccttccaccccgtgctgtccctgctcagcttcctcttcaaggcgccactagtgccgcccggcagcccggtggtcaatgcgcttttccgccagcgcagctgcatcgagaacatcctcagggcctgcgtggggctcccgccacagaaccacatgctcctggaacacaaaatggagcgcccagggcccagcctcaagcgagttggacccgtggctgccacctaccctatgttgaacaagaaaggaccggtacccgctgccaccaatggctgcaccggtgatgccaatgggcatctgcaagaggagcccccaatgcccaccacctgaggccccggtcacacagtttctcggctcttcctccccgctgccccccacgaccctaccttgaaggcccccacaaataaaggcgctgccactcagccctccttccacctggggttcttggggcctgtgacctgactctgcctccctctacttccccgactcttgagcgcccagcttcagtcccatcccctctgcccatggtcatcaccccaactcccagggagagcccagaacctggagcctcgctctgcccccagttctcaaaggtggggctagatgggggcggggacggaacaagaccacagggtggagagtgtggtggcagaaggccaaagagggaatctgagacaagctaccaaaaaccaaaaccagcttccatttatttatgggccccaccccctgacgtcctggggagaggggccccccaaagagcctttctctctgggacaaaatacaaatggcaggaagggtccatacagaaaagaacgtctctgaggtccttgcgtttttaataaaatggtaagagtc

SEQ ID NO: 14433 - DNA, 2258 bp, Homo sapiens
  source 1..2258: mol_type = unassigned DNA
acttccgccaggcggggacccgatggccacggtggctctgggttgtcgggcctcgaaccgggtctccagacgttgggcccctccctcccagcgcgggagaggcggggaagggggcggggcgggggaggggccgcagcgcttttctccggaggtcgcgcgcccgagagcccgcgctgtccgccgccgctgcctgagtcgactctgcgccgcccgccgcgatggaggccgccgcccagttcttcgtcgagagcccggacgtggtctacggccccgaggccatcgaggcgcaatacgagtaccggacgacgcgcgtcagccgcgagggtggcgttctcaaggaggccaactactacggctcgctgactcaggcgggcaccgtgagcctgggcctggacgccgagggccaggaggtgttcgtacccttcagcgcggtgctgcccatggtggcgcccaacgacctcgtgttcgatggctgggacatctcgtcgctgaacctggccgaggcgatgcggcgcgcgaaggtgctggactgggggctgcaggagcaactgtggccgcacatggaggccctgcggccccggccttctgtttacatccccgaattcatcgcggccaaccagagcgcgcgcgcggacaacctcatcccaggctcgcgtgcgcagcagctggagcagatccgcagggacatccgagacttccggtctagcgcggggctggacaaagtcatagtgctgtggacggcgaacacggagcgcttctgtgaggtgattccaggcctcaacgacacagccgagaacctgctgcgcaccattgagctcggtctggaggtgtcgccctccacgctcttcgccgtggccagcatcctggagggctgtgccttcctcaatgggtctccgcagaacaccctggtgcccggagctcttgagctcgcgtggcagcaccgggtttttgtgggcggagatgacttcaagtcaggccagaccaaagtcaagtccgtgcttgtggacttcctcattggctccggcctcaagaccatgtccatcgtgagttacaaccacctgggcaacaacgatggggagaacctatcggcgccattgcagttccgctctaaggaggtgtccaagagcaacgtggtggacgacatggtgcagagcaacccagtgctctatacgcccggcgaagagcctgaccactgcgtggtcatcaagtatgtgccgtacgtgggtgacagcaagcgcgcgctggatgagtatacctcggagctgatgctgggcggaaccaacacactggtgctgcacaacacgtgtgaggactcgctgctggccgcacccatcatgctggacctagcgctgctgaccgagctgtgccagcgcgtgagcttctgcactgacatggaccccgagccgcagaccttccaccccgtgctgtccctgctcagcttcctcttcaaggcgccactagtgccgcccggcagcccggtggtcaatgcgcttttccgccagcgcagctgcatcgagaacatcctcagggcctgcgtggggctcccgccacagaaccacatgctcctggaacacaaaatggagcgcccagggcccagcctcaagcgagttggacccgtggctgccacctaccctatgttgaacaagaaaggaccggtacccgctgccaccaatggctgcaccggtgatgccaatgggcatctgcaagaggagcccccaatgcccaccacctgaggccccggtcacacagtttctcggctcttcctccccgctgccccccacgaccctaccttgaaggcccccacaaataaaggcgctgccactcagccctccttccacctggggttcttggggcctgtgacctgactctgcctccctctacttccccgactcttgagcgcccagcttcagtcccatcccctctgcccatggtcatcaccccaactcccagggagagcccagaacctggagcctcgctctgcccccagttctcaaaggtggggctagatgggggcggggacggaacaagaccacagggtggagagtgtggtggcagaaggccaaagagggaatctgagacaagctaccaaaaaccaaaaccagcttccatttatttatgggccccaccccctgacgtcctggggagaggggccccccaaagagcctttctctctgggacaaaatacaaatggcaggaagggtccatacagaaaagaacgtctctgaggtccttgcgtttttaataaaatggtaagagtc

SEQ ID NO: 14434 - DNA, 2039 bp, Homo sapiens
  source 1..2039: mol_type = unassigned DNA
ctgagtcgactctgcgccggtgagtgcggttcggggcagggacggcctccgtggggacccaggctggcttggccccggccgcttagagtccccgctgaccccctgctcaccccgggcccccagcccgccgcgatggaggccgccgcccagttcttcgtcgagagcccggacgtggtctacggccccgaggccatcgaggcgcaatacgagtaccggacgacgcgcgtcagccgcgagggtggcgttctcaaggctgggacatctcgtcgctgaacctggccgaggcgatgcggcgcgcgaaggtgctggactgggggctgcaggagcaactgtggccgcacatggaggccctgcggccccggccttctgtttacatccccgaattcatcgcggccaaccagagcgcgcgcgcggacaacctcatcccaggctcgcgtgcgcagcagctggagcagatccgcagggacatccgagacttccggtctagcgcggggctggacaaagtcatagtgctgtggacggcgaacacggagcgcttctgtgaggtgattccaggcctcaacgacacagccgagaacctgctgcgcaccattgagctcggtctggaggtgtcgccctccacgctcttcgccgtggccagcatcctggagggctgtgccttcctcaatgggtctccgcagaacaccctggtgcccggagctcttgagctcgcgtggcagcaccgggtttttgtgggcggagatgacttcaagtcaggccagaccaaagtcaagtccgtgcttgtggacttcctcattggctccggcctcaagaccatgtccatcgtgagttacaaccacctgggcaacaacgatggggagaacctatcggcgccattgcagttccgctctaaggaggtgtccaagagcaacgtggtggacgacatggtgcagagcaacccagtgctctatacgcccggcgaagagcctgaccactgcgtggtcatcaagtatgtgccgtacgtgggtgacagcaagcgcgcgctggatgagtatacctcggagctgatgctgggcggaaccaacacactggtgctgcacaacacgtgtgaggactcgctgctggccgcacccatcatgctggacctagcgctgctgaccgagctgtgccagcgcgtgagcttctgcactgacatggaccccgagccgcagaccttccaccccgtgctgtccctgctcagcttcctcttcaaggcgccactagtgccgcccggcagcccggtggtcaatgcgcttttccgccagcgcagctgcatcgagaacatcctcagggcctgcgtggggctcccgccacagaaccacatgctcctggaacacaaaatggagcgcccagggcccagcctcaagcgagttggacccgtggctgccacctaccctatgttgaacaagaaaggaccggtacccgctgccaccaatggctgcaccggtgatgccaatgggcatctgcaagaggagcccccaatgcccaccacctgaggccccggtcacacagtttctcggctcttcctccccgctgccccccacgaccctaccttgaaggcccccacaaataaaggcgctgccactcagccctccttccacctggggttcttggggcctgtgacctgactctgcctccctctacttccccgactcttgagcgcccagcttcagtcccatcccctctgcccatggtcatcaccccaactcccagggagagcccagaacctggagcctcgctctgcccccagttctcaaaggtggggctagatgggggcggggacggaacaagaccacagggtggagagtgtggtggcagaaggccaaagagggaatctgagacaagctaccaaaaaccaaaaccagcttccatttatttatgggccccaccccctgacgtcctggggagaggggccccccaaagagcctttctctctgggacaaaatacaaatggcaggaagggtccatacagaaaagaacgtctctgaggtccttgcgtttttaataaaatggtaagagtc

SEQ ID NO: 14435 - DNA, 1838 bp, Homo sapiens
  source 1..1838: mol_type = unassigned DNA
gccgagccgctccagtccccggcgcgccgcgggctggtgggctcagcggcggcgccggcactgggaaatgaccctgcccgggggcccaacgggcatggcgcggccggggggcgcgaggccctgcagcccggggctggagcgggccccgcgccggagtgtcggggagctgcgcctgctcttcgaggcgcgctgtgcggcggtcgctgcggccgccgccgcgggggagccccgggcccgcggggccaagcggcgtgggggacaggtccccaacgggcttccgcgggctcccccggccccggtgatccctcagctgaccgtgacagccgaggagcccgacgtgcccccgaccagccctgggccgccggagcgggagagggactgcctcccggcagcgggctcttcgcacctgcagcagccgcgccgcctttccacctcgtcggtctcctccactggctcctcgtcgctgctcgaggactcggaggacgacctgctgagcgacagtgagagccggagccgcggcaacgtgcagctggaagcgggcgaggacgtgggtcagaaaaaccactggcagaagatccggaccatggtcaatctgccggtcataagccctttcaagaagcgctacgcctgggtgcagctggcagggcacactgggagttttaaggcggcgggcaccagcgggctgatcctgaagcgctgctcggagccggagcgctactgcctggcgcggctgatggctgacgcgctgcgcggctgcgtgcctgccttccacggcgtggtggagcgcgacggcgaaagctacctgcagctgcaggacctgctcgatggcttcgacggaccttgtgtgctcgactgcaaaatgggcgtcaggacttacctagaggaggagctgaccaaggcccgtgagcggcccaagctgcggaaggacatgtacaagaaaatgctggcggtggatcctgaagctcccacggaggaggagcacgcgcagcgcgccgtcaccaagccgcgctacatgcagtggcgggaaggcatcagctccagcaccaccctcggcttccgcatcgagggcatcaagaaagcggacggctcctgcagcaccgacttcaagactacgcgaagccgagagcaggtgcttcgcgtctttgaagagtttgtgcaaggagatgaggaagtgctgaggcggtatctgaaccgcctgcagcagatccgggacaccctggaggtatccgagttcttcaggaggcacgaggtgatcggcagctcgctcctctttgtgcacgatcactgccatcgcgccggcgtgtggctcatcgacttcggcaagaccacgcccctccccgatggccagatcctggaccaccggcggccctgggaggagggcaaccgcgaggacggctatttgctggggctggacaatctcattggcatcctggccagcctggctgagagatgaggctggactcctgtccccgcgggccgctcacctgacatgtggacctgcagctttgtccccactgtgcatgccggcttgagactggagccccgcggtgcagggcagttcaccgggtcctgcaggaccaggtgccagccactaagggggggcaccgccgatgccaggggttttgcccacccgggccccagcgttcccagagccaaatgacactaacttatagaaggggagggggcaaagggcttcttcctcaggccagctcttctgaggaggctctgccctctccagaggtgccagaccgcggattttatttagcaagcccagaccttccggtctaacgtctcacaccacgacggactccccttcctaataaaactcaaagacaaga

SEQ ID NO: 14436 - DNA, 5822 bp, Homo sapiens
  source 1..5822: mol_type = unassigned DNA
atggctgtgtactgctatgcgctcaatagcctggtgatcatgaatagcgccaacgagatgaagagcggcggcggcccggggcccagtggcagcgagacgcccccgcccccgaggagggcagtgctgagccccggcagcgttttcagccccgggagaggcgcctctttcctcttccccccagccgagtcgctgtcccccgaggagccccggagccccgggggctggcggagcggccggcgcaggctgaatagtagcagcggcagtggcagcggcagcagcggcagtagcgtgagcagcccaagttgggctggtcgcctgcgaggggaccggcagcaggtggtggcagccggtaccctctccccgccagggccggaggaggccaagaggaagctgcggatcttgcagcgcgagttgcagaacgtgcaggtgaaccagaaagtgggcatgtttgaggcgcacatccaggcacagagctccgccattcaagcgccccgcagcccgcgtttgggcagggctcgctcgccctccccgtgccccttccgcagcagcagtcagccccctggaagggtcctggttcagggcgcccggagcgaggaacggaggacaaagtcctggggggagcaatgtccagagacttcaggaaccgactccgggaggaaaggagggcccagcctatgctcctcgcaggtgaagaaaggaatgccacctcttcccggccgggctgcccctacaggatcagaggctcagggtccatccgcttttgtaaggatggagaagggtatccctgccagtccccgctgtggctcacccacagctatggaaattgacaaaaggggctctcctaccccgggaactcggagctgcctagctccctcattggggctgttcggagctagcttaacgatggccacggaagtggcagcgagagttacatccactgggccacaccgtccacaggatcttgccctcactgagccgtctgggagagcccgtgagcttgaggacctgcagcccccagaggccctggtggagaggcaggggcagtttctgggcagtgagacaagcccagccccagaaaggggcgggccccgcgatggagaaccccctgggaagatggggaaaggatatctgccctgtggcatgccgggctctggggagcctgaagtgggcaaaaggccagaggagacgactgtgagcgtgcaaagcgcagagtcctctgattccctgagctggtccaggctgcccagggccctggcctccgtaggccctgaggaggcccgaagtggggcccccgtgggcggggggcgttggcagctctccgacagagtggagggagggtccccaacgctgggcttgcttgggggcagcccctcagcacagccggggaccgggaatgtggaggcgggaattccttctggcagaatgctggagcctttgccctgttgggacgctgcgaaagatctgaaagaacctcagtgccctcctggggacagggtgggtgtgcagcctgggaactccagggtttggcagggcaccatggagaaagccggtttggcttggacgcgtggcacaggggtgcaatcagaggggacttgggaaagccagcggcaggacagtgatgccctcccaagtccggagctgctaccccaagatccggacaagcctttcctgaggaaggcctgcagccccagcaacatacctgctgtcatcattacagacatgggcacccaggaggatggggccttggaggagacgcagggaagccctcggggcaacctgcccctgaggaaactgtcctcttcctcggcctcctccacgggcttctcctcatcctacgaagactcagaggaggacatctccagtgaccctgagcgcaccctggaccccaactcagccttcctgcataccctggaccagcagaaacctagagtgagcaaatcatggaggaagataaaaaacatggtgcactggtctcccttcgtcatgtccttcaagaagaagtacccctggatccagctggcaggacacgcagggagtttcaaggcagctgccaatggcaggatcctgaagaagcactgtgagtcagagcagcgctgcctggaccggctgatggtggatgtgctgaggcccttcgtacctgcctaccatggggatgtggtgaaggacggggagcgctacaaccagatggacgacctgctggccgacttcgactcgccctgtgtgatggactgcaagatgggaatcaggacctacctggaggaggagctcacgaaggcccggaagaagcccagcctgcggaaggacatgtaccagaagatgatcgaggtggaccccgaggcccccaccgaggaggaaaaagcacagcgggctgtgaccaagccacggtacatgcagtggcgggagaccatcagctccacggccaccctggggttcaggatcgagggaatcaagaaagaagacggcaccgtgaaccgggacttcaagaagaccaaaacgagggagcaggtcaccgaggccttcagagagttcactaaaggaaaccataacatcctgatcgcctatcgggaccggctgaaggccattcgaaccactctagaagtttctcccttcttcaagtgccacgaggtcattggcagctccctcctcttcatccacgacaagaaggaacaggccaaagtgtggatgatcgactttgggaaaaccacgcccctgcctgagggccagaccctgcagcatgacgtcccctggcaggaggggaaccgggaggatggctacctctcggggctcaataacctcgtcgacatcctgaccgagatgtcccaggatgccccactcgcctgagctgcccacgccctccctggcccccgcctgggcctcctttcctcctcctgtgcttcctttctcgttcctaacttttccttcacttacacctgactgaccctcctgaactgcactacaagacactttgtagaagaggagatgagagtttctagtcattttcctaacttcagggcttggaggtggtgtttgcactgctttttgtagagagggtcacctactagaagagaaatgcccagtcttagaggtgggtcaggtgtagagctggagggggtccctggctgctgaggggaccctaccagatgagccctgcctctgggagccccctaggaagcaccagcctggacctaccacctgcggaggcctgctgccccctggcggccagtgctgttagagtgctgccaagcacagccttatttctgccggggcctccccaccggagagcccagggggccggccgggttcctggtccctggctgggagcagggctttctggtagttggggcacaaaaccatcggggaaccacatgttgactgtgagcaaagtgtcttccgattagcagcctcagggatgccctggtggcctctccagggctgctcaggcaaggccccccacccatctggtatggaaacctgccggctccaggccagacccaggagccaagagaaggctgaagccagcttggctgtgttctctgatctaggccttcccagaggaggcgagcagaagctgtgccacttggaattgcaacccatgagttcagaaggcacactctgccatgctgagctccaagggtgctaccaggggaagatgggatctatagagtctctgggccctggccccagggaggagcacatttttcttgaccctcacctacctggtgctagttggtcaaccctgcctgcatacatgggctcctgtcatggggcccagagtcccttgcagatatagaaataggggaggagctcaggtctgcgccaggcaggaagaaggcaggcttctggcttccagaggtgccgcggtggcctcctggcatcatttgttattgcctctgaaacaagccttactgcctggagggcttagattcctgcttctccaatgtagtgtgggtatcttgtagggtatgtggtggatgccagggcgtgctccaggcacctcttcctgaagtctctgcatttggagattcgtggagaacctatttaagcccaattttaactgaaagccagtgagtctgatatggaagggaatgtaaaatttgcctgacttcttaagaacaaaacccccagctctgtgccccatgctccttggggcttgccacccactcctttgctgtcagaggtacaggagctgggagagtccaggagctagggacacagagggagactatggaccaaggtgtgtgtgtctggaggaaccactgcccaccccaccaccccggggtctctggggaactgtcaacctgcccacgggacatgtacatttccccttttgtgctggaagtgtgagtgacacttgctgggggtggagggtgggacacatgaggatgtataagtacagattttaaaaaaggaaatcaacttacacttcctggctcttgtttaaaacagtggtgagctcctgtgtgggccgacttgctaaaggtcacacacgcgcccggtggagcacgagagacctcgtggcagcatgtgatctggaaggcaggcaggacgggggcgttggggagccaaagtcaactctgggcctctggagctatagtgacttttgggctagaagggaccctggtggtctgtgcttcagccatttgcagggcaggggcatcattaattcagacgtaaagattctatgaatatggactggccaaaagttatccttactccatctgtgaaagaagtttgctaaagcaaatcatgatatgaacaaaaattacaggggacctgtttaagagaacaaaatgttccaagcactttaggcagacaccagctgtttgcaaacaatgtgctaatatgcaaatgatgtgcttattaaaggaggcccatggggcctcttattggcaatacttggctgtgggttacattaaatatgtgaacatagtatgaagtagcatcattttagggttattctgttacttagggtttttgttttctgttttttttttctctttttttgtatttaccgtgctagttctcttctacacctactctgtctctcaagccattttgccactcgcttccctgccatctggcccttccctttgtctcagtgggatagatggattgtgaaatggaatctcccagaacccctgccctggcagcctggaagaccgtgcctgcccagccctcgtcaccacagggactccttgggtcctggcagtgcatgtgccagcaggcaggacaaactctgtgtacctgtgcccaggtgaatgggcgcagggtcctcttgccctgtcctgcggggggccccacgagttcctggcattcagcactgcttagcattctcggaaggtttcttcaactgcttgcttttcccaggcttgcctttagtgtcatgtaagacatttttaagttatatttattttgttgggttttaaaattgcacagaacactaagaccgaaaggctggactcttgtttctccttgaaagctttgcctttgttttgaacttcctttcccacttggtagaaagagcccagaagcagccctggccctgtaagatggactctttcatccttcagttgtatttagctttgagtttctctgcatctgtccaccccatgtgtatataacccagcccctggctctggggtggtcacctcgtcagtgccttttgttctggaggagaggaccccccccgcctgccgagaggctctcttcctgttctgcacccctctccccatgggaccttggagaaaactgaactgttacaaacccctgcacagtgcctgtcaaacagatgcaaaccttcctgaataaagccttggagacca

SEQ ID NO: 14437 - DNA, 3146 bp, Homo sapiens
  source 1..3146: mol_type = unassigned DNA
attgaacaaacactgaagtagcccggagcagacactgacaggggcagtatctccacggtcgaaaagggcgtgcagggccggcttggcgtcgccactgccgggatcgccgggcccctgaaccgaagagctttcccccctctttcgcactcctcttttttgtcttccatagcttgtgagaaaataatttctgagcatttttacttttaaagccatctcgtccctacgaggtttgcgcctctgggcatgtagtctacacaggacctgagaatctgagaaactgcagccgcacggttgtttatggagctttgggcgggggctgagcccgcggtcgtgcccccagcccgctgcccaggccatgccgccccatctgcgcgcggagccgcggctgccgggcctccggggctgagccgggagcgccgggaggaggaggcgccggcggcggagcaggagcgggagccgcggcggcgggcagcgcgggacccagtactatggctgtgtactgctatgcgctcaatagcctggtgatcatgaatagcgccaacgagatgaagagcggcggcggcccggggcccagtggcagcgagacgcccccgcccccgaggagggcagtgctgagccccggcagcgttttcagccccgggagaggcgcctctttcctcttccccccagccgagtcgctgtcccccgaggagccccggagccccgggggctggcggagcggccggcgcaggctgaatagtagcagcggcagtggcagcggcagcagcggcagtagcgtgagcagcccaagttgggctggtcgcctgcgaggggaccggcagcaggtggtggcagccggtaccctctccccgccagggccggaggaggccaagaggaagctgcggatcttgcagcgcgagttgcagaacgtgcaggtgaaccagaaagtgggcatgtttgaggcgcacatccaggcacagagctccgccattcaagcgccccgcagcccgcgtttgggcagggctcgctcgccctccccgtgccccttccgcagcagcagtcagccccctggaagggtcctggttcagggcgcccggagcgaggaacggaggacaaagtcctggggggagcaatgtccagagacttcaggaaccgactccgggaggaaaggagggcccagcctatgctcctcgcaggtgaagaaaggaatgccacctcttcccggccgggctgcccctacaggatcagaggctcagggtccatccgcttttgtaaggatggagaagggtatccctgccagtccccgctgtggctcacccacagctatggaaattgacaaaaggggctctcctaccccgggaactcggagctgcctagctccctcattggggctgttcggagctagcttaacgatggccacggaagtggcagcgagagttacatccactgggccacaccgtccacaggatcttgccctcactgagccgtctgggagagcccgtgagcttgaggacctgcagcccccagaggccctggtggagaggcaggggcagtttctgggcagtgagacaagcccagccccagaaaggggcgggccccgcgatggagaaccccctgggaagatggggaaaggatatctgccctgtggcatgccgggctctggggagcctgaagtgggcaaaaggccagaggagacgactgtgagcgtgcaaagcgcagagtcctctgattccctgagctggtccaggctgcccagggccctggcctccgtaggccctgaggaggcccgaagtggggcccccgtgggcggggggcgttggcagctctccgacagagtggagggagggtccccaacgctgggcttgcttgggggcagcccctcagcacagccggggaccgggaatgtggaggcgggaattccttctggcagaatgctggagcctttgccctgttgggacgctgcgaaagatctgaaagaacctcagtgccctcctggggacagggtgggtgtgcagcctgggaactccagggtttggcagggcaccatggagaaagccggtttggcttggacgcgtggcacaggggtgcaatcagaggggacttgggaaagccagcggcaggacagtgatgccctcccaagtccggagctgctaccccaagatccggacaagcctttcctgaggaaggcctgcagccccagcaacatacctgctgtcatcattacagacatgggcacccaggaggatggggccttggaggagacgcagggaagccctcggggcaacctgcccctgaggaaactgtcctcttcctcggcctcctccacgggcttctcctcatcctacgaagactcagaggaggacatctccagtgaccctgagcgcaccctggaccccaactcagccttcctgcataccctggaccagcagaaacctagagtgtgacttcttgggaagtgttcccctcagtggtactgctggggcaacgtccaataccaagaatgatgtatagcatatttcatcttcctacactactctctggaaagactgagccaattacggggtcatctgtaaagtctaagtgctgcagtttccctacgaccattggattttgtttgtagtttgatattgtcttactgtcccttgaagttgtaatttgtaattctttagttttcaagagggactctacatgtttccttgtgatgatggccttgagttactcatgtgtacactgcctatttatccccattgagcccccactgcccgaacatgttgatggcattttatatagtaagctgtcagttacttaatgtacaaatattcttccattccatgtttttctcttaaaattttactttattggccaggcgcagtggctcacatctgtaatcccagcactttaggaggccaaggcgggcggatcacctgaggtcaagagattgagaccagcctggccaacatggtgaaaccccgtctctactaaaaaatacaaaaattagccaggtgtagtggtgggcacctgtaatcccagctacttgggaggctgaggcaggagaattgcttgaacctgagaggcggaggttgcggtgagccgagatagcaccactgcactccagcctgggcgaaagagctaaactccatctcaaaaataaataaataaataaaaaa

SEQ ID NO: 14438 - DNA, 6150 bp, Homo sapiens
  source 1..6150: mol_type = unassigned DNA
cttccatagcttgtgagaaaataatttctgagcatttttacttttaaagccatctcgtccctacgaggtttgcgcctctgggcatgtagtctacacaggacctgagaatctgagaaactgcagccgcacggttgtttatggagctttgggcgggggctgagcccgcggtcgtgcccccagcccgctgcccaggccatgccgccccatctgcgcgcggagccgcggctgccgggcctccggggctgagccgggagcgccgggaggaggaggcgccggcggcggagcaggagcgggagccgcggcggcgggcagcgcgggacccagtactatggctgtgtactgctatgcgctcaatagcctggtgatcatgaatagcgccaacgagatgaagagcggcggcggcccggggcccagtggcagcgagacgcccccgcccccgaggagggcagtgctgagccccggcagcgttttcagccccgggagaggcgcctctttcctcttccccccagccgagtcgctgtcccccgaggagccccggagccccgggggctggcggagcggccggcgcaggctgaatagtagcagcggcagtggcagcggcagcagcggcagtagcgtgagcagcccaagttgggctggtcgcctgcgaggggaccggcagcaggtggtggcagccggtaccctctccccgccagggccggaggaggccaagaggaagctgcggatcttgcagcgcgagttgcagaacgtgcaggtgaaccagaaagtgggcatgtttgaggcgcacatccaggcacagagctccgccattcaagcgccccgcagcccgcgtttgggcagggctcgctcgccctccccgtgccccttccgcagcagcagtcagccccctggaagggtcctggttcagggcgcccggagcgaggaacggaggacaaagtcctggggggagcaatgtccagagacttcaggaaccgactccgggaggaaaggagggcccagcctatgctcctcgcaggtgaagaaaggaatgccacctcttcccggccgggctgcccctacaggatcagaggctcagggtccatccgcttttgtaaggatggagaagggtatccctgccagtccccgctgtggctcacccacagctatggaaattgacaaaaggggctctcctaccccgggaactcggagctgcctagctccctcattggggctgttcggagctagcttaacgatggccacggaagtggcagcgagagttacatccactgggccacaccgtccacaggatcttgccctcactgagccgtctgggagagcccgtgagcttgaggacctgcagcccccagaggccctggtggagaggcaggggcagtttctgggcagtgagacaagcccagccccagaaaggggcgggccccgcgatggagaaccccctgggaagatggggaaaggatatctgccctgtggcatgccgggctctggggagcctgaagtgggcaaaaggccagaggagacgactgtgagcgtgcaaagcgcagagtcctctgattccctgagctggtccaggctgcccagggccctggcctccgtaggccctgaggaggcccgaagtggggcccccgtgggcggggggcgttggcagctctccgacagagtggagggagggtccccaacgctgggcttgcttgggggcagcccctcagcacagccggggaccgggaatgtggaggcgggaattccttctggcagaatgctggagcctttgccctgttgggacgctgcgaaagatctgaaagaacctcagtgccctcctggggacagggtgggtgtgcagcctgggaactccagggtttggcagggcaccatggagaaagccggtttggcttggacgcgtggcacaggggtgcaatcagaggggacttgggaaagccagcggcaggacagtgatgccctcccaagtccggagctgctaccccaagatccggacaagcctttcctgaggaaggcctgcagccccagcaacatacctgctgtcatcattacagacatgggcacccaggaggatggggccttggaggagacgcagggaagccctcggggcaacctgcccctgaggaaactgtcctcttcctcggcctcctccacgggcttctcctcatcctacgaagactcagaggaggacatctccagtgaccctgagcgcaccctggaccccaactcagccttcctgcataccctggaccagcagaaacctagagtgagcaaatcatggaggaagataaaaaacatggtgcactggtctcccttcgtcatgtccttcaagaagaagtacccctggatccagctggcaggacacgcagggagtttcaaggcagctgccaatggcaggatcctgaagaagcactgtgagtcagagcagcgctgcctggaccggctgatggtggatgtgctgaggcccttcgtacctgcctaccatggggatgtggtgaaggacggggagcgctacaaccagatggacgacctgctggccgacttcgactcgccctgtgtgatggactgcaagatgggaatcaggacctacctggaggaggagctcacgaaggcccggaagaagcccagcctgcggaaggacatgtaccagaagatgatcgaggtggaccccgaggcccccaccgaggaggaaaaagcacagcgggctgtgaccaagccacggtacatgcagtggcgggagaccatcagctccacggccaccctggggttcaggatcgagggaatcaagaaagaagacggcaccgtgaaccgggacttcaagaagaccaaaacgagggagcaggtcaccgaggccttcagagagttcactaaaggaaaccataacatcctgatcgcctatcgggaccggctgaaggccattcgaaccactctagaagtttctcccttcttcaagtgccacgaggtcattggcagctccctcctcttcatccacgacaagaaggaacaggccaaagtgtggatgatcgactttgggaaaaccacgcccctgcctgagggccagaccctgcagcatgacgtcccctggcaggaggggaaccgggaggatggctacctctcggggctcaataacctcgtcgacatcctgaccgagatgtcccaggatgccccactcgcctgagctgcccacgccctccctggcccccgcctgggcctcctttcctcctcctgtgcttcctttctcgttcctaacttttccttcacttacacctgactgaccctcctgaactgcactacaagacactttgtagaagaggagatgagagtttctagtcattttcctaacttcagggcttggaggtggtgtttgcactgctttttgtagagagggtcacctactagaagagaaatgcccagtcttagaggtgggtcaggtgtagagctggagggggtccctggctgctgaggggaccctaccagatgagccctgcctctgggagccccctaggaagcaccagcctggacctaccacctgcggaggcctgctgccccctggcggccagtgctgttagagtgctgccaagcacagccttatttctgccggggcctccccaccggagagcccagggggccggccgggttcctggtccctggctgggagcagggctttctggtagttggggcacaaaaccatcggggaaccacatgttgactgtgagcaaagtgtcttccgattagcagcctcagggatgccctggtggcctctccagggctgctcaggcaaggccccccacccatctggtatggaaacctgccggctccaggccagacccaggagccaagagaaggctgaagccagcttggctgtgttctctgatctaggccttcccagaggaggcgagcagaagctgtgccacttggaattgcaacccatgagttcagaaggcacactctgccatgctgagctccaagggtgctaccaggggaagatgggatctatagagtctctgggccctggccccagggaggagcacatttttcttgaccctcacctacctggtgctagttggtcaaccctgcctgcatacatgggctcctgtcatggggcccagagtcccttgcagatatagaaataggggaggagctcaggtctgcgccaggcaggaagaaggcaggcttctggcttccagaggtgccgcggtggcctcctggcatcatttgttattgcctctgaaacaagccttactgcctggagggcttagattcctgcttctccaatgtagtgtgggtatcttgtagggtatgtggtggatgccagggcgtgctccaggcacctcttcctgaagtctctgcatttggagattcgtggagaacctatttaagcccaattttaactgaaagccagtgagtctgatatggaagggaatgtaaaatttgcctgacttcttaagaacaaaacccccagctctgtgccccatgctccttggggcttgccacccactcctttgctgtcagaggtacaggagctgggagagtccaggagctagggacacagagggagactatggaccaaggtgtgtgtgtctggaggaaccactgcccaccccaccaccccggggtctctggggaactgtcaacctgcccacgggacatgtacatttccccttttgtgctggaagtgtgagtgacacttgctgggggtggagggtgggacacatgaggatgtataagtacagattttaaaaaaggaaatcaacttacacttcctggctcttgtttaaaacagtggtgagctcctgtgtgggccgacttgctaaaggtcacacacgcgcccggtggagcacgagagacctcgtggcagcatgtgatctggaaggcaggcaggacgggggcgttggggagccaaagtcaactctgggcctctggagctatagtgacttttgggctagaagggaccctggtggtctgtgcttcagccatttgcagggcaggggcatcattaattcagacgtaaagattctatgaatatggactggccaaaagttatccttactccatctgtgaaagaagtttgctaaagcaaatcatgatatgaacaaaaattacaggggacctgtttaagagaacaaaatgttccaagcactttaggcagacaccagctgtttgcaaacaatgtgctaatatgcaaatgatgtgcttattaaaggaggcccatggggcctcttattggcaatacttggctgtgggttacattaaatatgtgaacatagtatgaagtagcatcattttagggttattctgttacttagggtttttgttttctgttttttttttctctttttttgtatttaccgtgctagttctcttctacacctactctgtctctcaagccattttgccactcgcttccctgccatctggcccttccctttgtctcagtgggatagatggattgtgaaatggaatctcccagaacccctgccctggcagcctggaagaccgtgcctgcccagccctcgtcaccacagggactccttgggtcctggcagtgcatgtgccagcaggcaggacaaactctgtgtacctgtgcccaggtgaatgggcgcagggtcctcttgccctgtcctgcggggggccccacgagttcctggcattcagcactgcttagcattctcggaaggtttcttcaactgcttgcttttcccaggcttgcctttagtgtcatgtaagacatttttaagttatatttattttgttgggttttaaaattgcacagaacactaagaccgaaaggctggactcttgtttctccttgaaagctttgcctttgttttgaacttcctttcccacttggtagaaagagcccagaagcagccctggccctgtaagatggactctttcatccttcagttgtatttagctttgagtttctctgcatctgtccaccccatgtgtatataacccagcccctggctctggggtggtcacctcgtcagtgccttttgttctggaggagaggaccccccccgcctgccgagaggctctcttcctgttctgcacccctctccccatgggaccttggagaaaactgaactgttacaaacccctgcacagtgcctgtcaaacagatgcaaaccttcctgaataaagccttggagacca

SEQ ID NO: 14439 - DNA, 3383 bp, Homo sapiens
  source 1..3383: mol_type = unassigned DNA
gggtcggccgaagcccgaaccgaaggagcgggcatgaggcgctgcccgtgccgtgggagcctgaacgaggcggaggccggggcgctgcccgcggcggcccgcatgggactggaggcgccgcgaggagggcggcggcggcagccgggacagcagcgacctgggcccggcgcaggggccccggcggggcggccggaggggggcgggccctgggcccggacagaggggtccagcctccacagcgagcctgagagggccggcctcgggcctgcgccggggacagagagtccgcaggcagaattctggacagacggacagactgagcccgcggcagctggccttggagtagagaccgagaggcccaagcaaaagacggagccagacaggtccagcctccggacgcatctagaatggagctggtcagagctggagacgacttgtctttggacggagaccgggacagatggcctttggactgatccgcacaggtccgacctccagtttcagcccgaggaggccagcccctggacacagccaggggttcatgggccctggacagagctggaaacgcatgggtcacagactcagccagagagggtcaagtcctgggctgataacctctggacccaccagaacagttccagcctccagactcacccagaaggagcctgtccctcaaaagagccaagtgctgatggctcctggaaagaattgtatactgatggctccaggacacaacaggatattgaaggtccctggacagagccatatactgatggctcccagaaaaaacaggatactgaagcagccaggaaacagcctggcactggtggtttccaaatacaacaggatactgatggctcctggacacaacctagcactgacggttcccagacagcacctgggacagactgcctcttgggagagcctgaggatggcccattagaggaaccagagcctggagaattgctgactcacctgtactctcacctgaagtgtagccccctgtgccctgtgccccgcctcatcattacccctgagacccctgagcctgaggcccagccagtgggacccccctcccgggttgaggggggcagcggcggcttctcctctgcctcttctttcgacgagtctgaggatgacgtggtggccgggggcggaggtgccagcgatcccgaggacaggtctgggagcaaaccctggaagaagctgaagacagttctgaagtattcaccctttgtggtctccttccgaaaacactacccttgggtccagctttctggacatgctgggaacttccaggcaggagaggatggtcggattctgaaacgtttctgtcagtgtgagcagcgcagcctggagcagctgatgaaagacccgctgcgacctttcgtgcctgcctactatggcatggtgctgcaggatggccagaccttcaaccagatggaagacctcctggctgactttgagggcccctccattatggactgcaagatgggcagcaggacctatctggaagaggagctagtgaaggcacgggaacgtccccgtccccggaaggacatgtatgagaagatggtggctgtggaccctggggcccctacccctgaggagcatgcccagggtgcagtcaccaagccccgctacatgcagtggagggaaaccatgagctccacctctaccctgggcttccggatcgagggcatcaagaaggcagatgggacctgtaacaccaacttcaagaagacgcaggcactggagcaggtgacaaaagtgctggaggacttcgtggatggagaccacgtcatcctgcaaaagtacgtggcatgcctagaagaacttcgtgaagctctggagatctcccccttcttcaagacccacgaggtggtaggcagctccctcctcttcgtgcacgaccacaccggcctggccaaggtctggatgatagacttcggcaagacggtggccttgcccgaccaccagacgctcagccacaggctgccctgggctgagggcaaccgtgaggacggctacctctggggcctggacaacatgatctgcctcctgcaggggctggcacagagctgagctgctcagccaccatcaggttaattggatggcgccagtctggctggaggagccctgagatgccatgggaggcctgaggttggccacgggggagctggcctccagggacgggagagattgtgtcatgtgccacacgagaccaacgtggaaaagtctgaagggccttgggagaccaggtagcacctggccccatcatgatgcaggggttttggggacctggaaggaaggtgatgaggcagtgagtcagaaaaaccagaacggggtccccggatctgccgggaaggcttctgaggggctgccctgagagcattcagttcacatgtcacagggtatggtgtgacagggtgcctgtggacacatgaatcacttctaacctgcctccctgtcagcctccaggctgccagctggctgaggccagggactgggtcaggctcatctgtggcgcctcagagggtcagcatcattggtgaacagatgcaggcgctgctggaccatctggggagagtgacagtccatgtcttcaccagggagccatttgagtgctgagcgacaagaggctcagagggcatgaccccatgggactggatgcggcctgagggctgataccgctgggcggtatcctgccctgctgtggccctgtgggatcctccgtgttcctcggcggactctgctgacctcctgcagacccaaaccacagccacatcccagcttctgtgccagcactgtgacagtacctcgctcctctgtgcaccagatccggcctcaggacttacacctcctgcctgacccccaggcttctctctcctttctcccagcaaactgcagtggcagaaaggaggttcagaggctgggaaagtgggcctccccttgcaactcagagctgctgcactcaggagggccccatccaatcccgggcccctgcagggaaaagcgctgggtgtgtgtcagaggcgcagggtgggtggggctgccagccaggaccctggcctgcagcctgatccaaaccaaagactgtagaaccctggggtgtggctaacggcccctccagcacccatagccaggtcttcctggcccttgaggctgggctggcggacaggcacctacctcttccttaagctgaagctcccacactgtcttccagggctgaggagatgctctccttttctactgaccatcttgatacttatttatacgagaggcagttgctggacggggtagtactgggaagcaggaggcagaatggctctgctgagcctcctacccatgacaacaccccaataaacagaacattcagagcc

SEQ ID NO: 14440 - DNA, 2954 bp, Homo sapiens
  source 1..2954: mol_type = unassigned DNA
ggcctctgtaaggagacttggagtcgctgcagccaaggctggagccatgagacggccccctggcaatggagaggcggccagcgaaggtccaggtggctggggtctatggggagtccaggagtccaggaggctgtgctgtgccggtcacgaccgctgcaagcaggctttgctgcagattgggatcaacatgatggcactgcctggaggtcgccacctggactccgtcaccctgccgggtcagcggctacacctgatgcaggtggactcagtccagcgctggatggaagatctgaagctcatgaccgagtgcgagtgcatgtgtgtcctgcaggccaagcccatcagcctggaagaggatgcacagggtgacctcatcctggcaggtggccctggccctggagaccccctgcagctgctgctcaaacggggttgggtcattagcacagagctgcgcaggatcgggcagaagctggcccaggaccgctgggcacgggtgcacagcatgagcgtgcgtctgacctgccatgcccgctccatggtcagcgagtacagtgctgtcagcaggaactccttgaaggaaatgggcgagattgagaagctgctaatggagaaatgctcggagctctcggcagtcacagagaggtgccttcaggttgagaatgagcatgtcctgaagtcaatgaaggcctgcgtgagtgagaccctgagcatgctgggccagcactttggtcagctgctggagctggccctgacacgggaggttcaggcactggtgagaaaaattgatgcctcagacaatatctacaccacagagtccaccacagggaacctgttcagcctgacccaggagggggctcccttgtgccgcatcatagccaaggagggtggggtcgtagcactcttcaaggtttgccggcaggacagtttccggtgcttgtacccccaggcgctccgcacgctggcctccatctgctgcgtggaagagggtgtccaccagctggagaaggtggatggcgttctgtgcttggccgacatcctgaccgacaacagccactcagaggccacacgggctgaggctgcggctgtggtggcccaggtcacctccccacacctgcccgtcacccagcacctcagtagcttcctggagagcatggaggagatcgtgacagccctcgtcaaactgtgccaagaggcctcatcaggggaagtcttcctactggcctctgcggcccttgccaacatcacgttctttgacacaatggcctgcgagatgctcctgcagttgaatgccatccgtgttctcctggaagcctgcagtgacaagcagagagtggacacgccttacactcgggaccagattgtgaccatcttggcaaacatgtctgtcctagaacagtgtgcctctgacatcattcaggaaaatggggtccagcttatcatgggcatgctgtctgaaaaaccaaggtctgggactcctgctgaagtggcagcctgtgagcgagtccagcagaaagctgcagtgaccctggctcgtctcagccgagacccagatgtggcacgggaggccgtgcggctcagctgcatgtcccgtctcatcgagctctgcagatccccatcagagaggaacagcagtgacgccgtgcttgtggcctgcctggctgctctgcgtagattggctggggtctgccctgaaggcctccaggactctgactttcagcagttggtccagcctcggctggtggactccttcttactctgcagcaacatggaggagagttttgtgtagtgagtgtgggcgaagaaatacatttggctgttctcacaccccctctgactatgcaccagtgaacacatctgagtacataccagctctcctcatcttcttatttatacttaacttatttttgtgtgaaataaatggaggacaaaatcttagagcaacatcatcaaacagtctttggtccttgagaatcttctttgtgttttattttttgatttctgtagcttttcagttgcagatgttgaaattcgtaatgacaaatatgacaaattgtcatgggtgattccacttcatcttattttttctactctcactatacaatcttgcctcattttttaaaactttggaaccagaggatttcaactgcctagcaagttttttttttaagttggatttgctcttcccaaaaatctaaaatgaatttaataattgggtagaatatattggaaagaagtttctttttctttaataaatggaatcatataaaatgtatcccggattttcttattaaattgtattttaaactaggttcttgcttcccaggtttcattccccaaaaacttttccaaccattaaaagtacacacagaattgtcttgttttcataggtgtataaataggttaagttctgagtgacttagtgagaaaccaaagtgactttcaaaaatacacccaaaggcaccagaaaccctgcttcctttggcttctttgcttttgtgtaacctcctgttcacctcctggtgaatagaatcctcagatgaggcttattgaatgattgattcctcctcaaaagtatacttgaaagcagtggtgtgctgaagccagctcatgcccactcacaagggacaactgtgagaatttcttcctaactctgcactcagtgaccttgcgttggtagccatgagctacttcatgagccctcatgttgaaattggccatagtgggagtatttacaccacagaaattcacagatgctataaagcacagctttcgctttttttttttttagagagagctggtttaccaatttcactgcttgaaagtatcacaaaaatctggggatccttttgaaaatataaatgccatcatattgtgatataatttatacaatataatataattgtgtaaaatcatgattataataatgtttcaataaacatttcttaaattcccaa

SEQ ID NO: 14441 - DNA, 2878 bp, Homo sapiens
  source 1..2878: mol_type = unassigned DNA
tctggagctccagctgcgccccgccaccactggccgctcgcactaccagcctgtctcgcacgctaaggtcacgaccgctgcaagcaggctttgctgcagattgggatcaacatgatggcactgcctggaggtcgccacctggactccgtcaccctgccgggtcagcggctacacctgatgcaggtggactcagtccagcgctggatggaagatctgaagctcatgaccgagtgcgagtgcatgtgtgtcctgcaggccaagcccatcagcctggaagaggatgcacagggtgacctcatcctggcaggtggccctggccctggagaccccctgcagctgctgctcaaacggggttgggtcattagcacagagctgcgcaggatcgggcagaagctggcccaggaccgctgggcacgggtgcacagcatgagcgtgcgtctgacctgccatgcccgctccatggtcagcgagtacagtgctgtcagcaggaactccttgaaggaaatgggcgagattgagaagctgctaatggagaaatgctcggagctctcggcagtcacagagaggtgccttcaggttgagaatgagcatgtcctgaagtcaatgaaggcctgcgtgagtgagaccctgagcatgctgggccagcactttggtcagctgctggagctggccctgacacgggaggttcaggcactggtgagaaaaattgatgcctcagacaatatctacaccacagagtccaccacagggaacctgttcagcctgacccaggagggggctcccttgtgccgcatcatagccaaggagggtggggtcgtagcactcttcaaggtttgccggcaggacagtttccggtgcttgtacccccaggcgctccgcacgctggcctccatctgctgcgtggaagagggtgtccaccagctggagaaggtggatggcgttctgtgcttggccgacatcctgaccgacaacagccactcagaggccacacgggctgaggctgcggctgtggtggcccaggtcacctccccacacctgcccgtcacccagcacctcagtagcttcctggagagcatggaggagatcgtgacagccctcgtcaaactgtgccaagaggcctcatcaggggaagtcttcctactggcctctgcggcccttgccaacatcacgttctttgacacaatggcctgcgagatgctcctgcagttgaatgccatccgtgttctcctggaagcctgcagtgacaagcagagagtggacacgccttacactcgggaccagattgtgaccatcttggcaaacatgtctgtcctagaacagtgtgcctctgacatcattcaggaaaatggggtccagcttatcatgggcatgctgtctgaaaaaccaaggtctgggactcctgctgaagtggcagcctgtgagcgagtccagcagaaagctgcagtgaccctggctcgtctcagccgagacccagatgtggcacgggaggccgtgcggctcagctgcatgtcccgtctcatcgagctctgcagatccccatcagagaggaacagcagtgacgccgtgcttgtggcctgcctggctgctctgcgtagattggctggggtctgccctgaaggcctccaggactctgactttcagcagttggtccagcctcggctggtggactccttcttactctgcagcaacatggaggagagttttgtgtagtgagtgtgggcgaagaaatacatttggctgttctcacaccccctctgactatgcaccagtgaacacatctgagtacataccagctctcctcatcttcttatttatacttaacttatttttgtgtgaaataaatggaggacaaaatcttagagcaacatcatcaaacagtctttggtccttgagaatcttctttgtgttttattttttgatttctgtagcttttcagttgcagatgttgaaattcgtaatgacaaatatgacaaattgtcatgggtgattccacttcatcttattttttctactctcactatacaatcttgcctcattttttaaaactttggaaccagaggatttcaactgcctagcaagttttttttttaagttggatttgctcttcccaaaaatctaaaatgaatttaataattgggtagaatatattggaaagaagtttctttttctttaataaatggaatcatataaaatgtatcccggattttcttattaaattgtattttaaactaggttcttgcttcccaggtttcattccccaaaaacttttccaaccattaaaagtacacacagaattgtcttgttttcataggtgtataaataggttaagttctgagtgacttagtgagaaaccaaagtgactttcaaaaatacacccaaaggcaccagaaaccctgcttcctttggcttctttgcttttgtgtaacctcctgttcacctcctggtgaatagaatcctcagatgaggcttattgaatgattgattcctcctcaaaagtatacttgaaagcagtggtgtgctgaagccagctcatgcccactcacaagggacaactgtgagaatttcttcctaactctgcactcagtgaccttgcgttggtagccatgagctacttcatgagccctcatgttgaaattggccatagtgggagtatttacaccacagaaattcacagatgctataaagcacagctttcgctttttttttttttagagagagctggtttaccaatttcactgcttgaaagtatcacaaaaatctggggatccttttgaaaatataaatgccatcatattgtgatataatttatacaatataatataattgtgtaaaatcatgattataataatgtttcaataaacatttcttaaattcccaa

SEQ ID NO: 14442 - DNA, 2981 bp, Homo sapiens
  source 1..2981: mol_type = unassigned DNA
tctggagctccagctgcgccccgccaccactggccgctcgcactaccagcctgtctcgcacgctaaggtcacgaccgctgcaagcaggctttgctgcagattgggatcaacatgatggcactgcctggaggtcgccacctggactccgtcaccctgccgggtcagcggctacacctgatgcaggtggactcagtccagcgctggatggaagatctgaagctcatgaccgagtgcgagtgcatgtgtgtcctgcaggccaagcccatcagcctggaagaggatgcacagggtgacctcatcctggcaggtggccctggccctggagaccccctgcagctgctgctcaaacggggttgggtcattagcacagagctgcgcaggatcgggcagaagctggcccaggaccgctgggcacgggtgcacagcatgagcgtgcgtctgacctgccatgcccgctccatggtcagcgagtacagtgctgtcagcaggaactccttgaaggaaatgggcgagattgagaagctgctaatggagaaatgctcggagctctcggcagtcacagagaggtgccttcaggttgagaatgagcatgtcctgaagtcaatgaaggcctgcgtgagtgagaccctgagcatgctgggccagcactttggtcagctgctggagctggccctgacacgggaggttcaggtggagtctcactctgtcaccaggctggagtgcagtggtgcaatctcggctcaatgcaacctccgcctcctgggttcaagtgattcccctgcctcagcctcccaggcactggtgagaaaaattgatgcctcagacaatatctacaccacagagtccaccacagggaacctgttcagcctgacccaggagggggctcccttgtgccgcatcatagccaaggagggtggggtcgtagcactcttcaaggtttgccggcaggacagtttccggtgcttgtacccccaggcgctccgcacgctggcctccatctgctgcgtggaagagggtgtccaccagctggagaaggtggatggcgttctgtgcttggccgacatcctgaccgacaacagccactcagaggccacacgggctgaggctgcggctgtggtggcccaggtcacctccccacacctgcccgtcacccagcacctcagtagcttcctggagagcatggaggagatcgtgacagccctcgtcaaactgtgccaagaggcctcatcaggggaagtcttcctactggcctctgcggcccttgccaacatcacgttctttgacacaatggcctgcgagatgctcctgcagttgaatgccatccgtgttctcctggaagcctgcagtgacaagcagagagtggacacgccttacactcgggaccagattgtgaccatcttggcaaacatgtctgtcctagaacagtgtgcctctgacatcattcaggaaaatggggtccagcttatcatgggcatgctgtctgaaaaaccaaggtctgggactcctgctgaagtggcagcctgtgagcgagtccagcagaaagctgcagtgaccctggctcgtctcagccgagacccagatgtggcacgggaggccgtgcggctcagctgcatgtcccgtctcatcgagctctgcagatccccatcagagaggaacagcagtgacgccgtgcttgtggcctgcctggctgctctgcgtagattggctggggtctgccctgaaggcctccaggactctgactttcagcagttggtccagcctcggctggtggactccttcttactctgcagcaacatggaggagagttttgtgtagtgagtgtgggcgaagaaatacatttggctgttctcacaccccctctgactatgcaccagtgaacacatctgagtacataccagctctcctcatcttcttatttatacttaacttatttttgtgtgaaataaatggaggacaaaatcttagagcaacatcatcaaacagtctttggtccttgagaatcttctttgtgttttattttttgatttctgtagcttttcagttgcagatgttgaaattcgtaatgacaaatatgacaaattgtcatgggtgattccacttcatcttattttttctactctcactatacaatcttgcctcattttttaaaactttggaaccagaggatttcaactgcctagcaagttttttttttaagttggatttgctcttcccaaaaatctaaaatgaatttaataattgggtagaatatattggaaagaagtttctttttctttaataaatggaatcatataaaatgtatcccggattttcttattaaattgtattttaaactaggttcttgcttcccaggtttcattccccaaaaacttttccaaccattaaaagtacacacagaattgtcttgttttcataggtgtataaataggttaagttctgagtgacttagtgagaaaccaaagtgactttcaaaaatacacccaaaggcaccagaaaccctgcttcctttggcttctttgcttttgtgtaacctcctgttcacctcctggtgaatagaatcctcagatgaggcttattgaatgattgattcctcctcaaaagtatacttgaaagcagtggtgtgctgaagccagctcatgcccactcacaagggacaactgtgagaatttcttcctaactctgcactcagtgaccttgcgttggtagccatgagctacttcatgagccctcatgttgaaattggccatagtgggagtatttacaccacagaaattcacagatgctataaagcacagctttcgctttttttttttttagagagagctggtttaccaatttcactgcttgaaagtatcacaaaaatctggggatccttttgaaaatataaatgccatcatattgtgatataatttatacaatataatataattgtgtaaaatcatgattataataatgtttcaataaacatttcttaaattccc

SEQ ID NO: 14443 - DNA, 2750 bp, Homo sapiens
  source 1..2750: mol_type = unassigned DNA
tctggagctccagctgcgccccgccaccactggccgctcgcactaccagcctgtctcgcacgctaaggtcacgaccgctgcaagcaggctttgctgcagattgggatcaacatgatggcactgcctggaggtcgccacctggactccgtcaccctgccgggtcagcggctacacctgatgcaggtggactcagtccagcgctggatggaagatctgaagctcatgaccgagtgcgagtgcatgtgtgtcctgcaggccaagcccatcagcctggaagaggatgcacagggtgacctcatcctggcaggtggccctggccctggagaccccctgcagctgctgctcaaacggggttgggtcattagcacagagctgcgcaggatcgggcagaagctggcccaggaccgctgggcacgggtgcacagcatgagcgtgcgtctgacctgccatgcccgctccatggtcagcgagtacagtgctgtcagcaggaactccttgaaggaaatgggcgagattgagaagctgctaatggagaaatgctcggagctctcggcagtcacagagaggtgccttcaggttgagaatgagcatgtcctgaagtcaatgaaggcctgcgtgagtgagaccctgagcatgctgggccagcactttggtcagctgctggagctggccctgacacgggaggttcaggcactggtgagaaaaattgatgcctcagacaatatctacaccacagagtccaccacagggaacctgttcagcctgacccaggagggggctcccttgtgccgcatcatagccaaggtggatggcgttctgtgcttggccgacatcctgaccgacaacagccactcagaggccacacgggctgaggctgcggctgtggtggcccaggtcacctccccacacctgcccgtcacccagcacctcagtagcttcctggagagcatggaggagatcgtgacagccctcgtcaaactgtgccaagaggcctcatcaggggaagtcttcctactggcctctgcggcccttgccaacatcacgttctttgacacaatggcctgcgagatgctcctgcagttgaatgccatccgtgttctcctggaagcctgcagtgacaagcagagagtggacacgccttacactcgggaccagattgtgaccatcttggcaaacatgtctgtcctagaacagtgtgcctctgacatcattcaggaaaatggggtccagcttatcatgggcatgctgtctgaaaaaccaaggtctgggactcctgctgaagtggcagcctgtgagcgagtccagcagaaagctgcagtgaccctggctcgtctcagccgagacccagatgtggcacgggaggccgtgcggctcagctgcatgtcccgtctcatcgagctctgcagatccccatcagagaggaacagcagtgacgccgtgcttgtggcctgcctggctgctctgcgtagattggctggggtctgccctgaaggcctccaggactctgactttcagcagttggtccagcctcggctggtggactccttcttactctgcagcaacatggaggagagttttgtgtagtgagtgtgggcgaagaaatacatttggctgttctcacaccccctctgactatgcaccagtgaacacatctgagtacataccagctctcctcatcttcttatttatacttaacttatttttgtgtgaaataaatggaggacaaaatcttagagcaacatcatcaaacagtctttggtccttgagaatcttctttgtgttttattttttgatttctgtagcttttcagttgcagatgttgaaattcgtaatgacaaatatgacaaattgtcatgggtgattccacttcatcttattttttctactctcactatacaatcttgcctcattttttaaaactttggaaccagaggatttcaactgcctagcaagttttttttttaagttggatttgctcttcccaaaaatctaaaatgaatttaataattgggtagaatatattggaaagaagtttctttttctttaataaatggaatcatataaaatgtatcccggattttcttattaaattgtattttaaactaggttcttgcttcccaggtttcattccccaaaaacttttccaaccattaaaagtacacacagaattgtcttgttttcataggtgtataaataggttaagttctgagtgacttagtgagaaaccaaagtgactttcaaaaatacacccaaaggcaccagaaaccctgcttcctttggcttctttgcttttgtgtaacctcctgttcacctcctggtgaatagaatcctcagatgaggcttattgaatgattgattcctcctcaaaagtatacttgaaagcagtggtgtgctgaagccagctcatgcccactcacaagggacaactgtgagaatttcttcctaactctgcactcagtgaccttgcgttggtagccatgagctacttcatgagccctcatgttgaaattggccatagtgggagtatttacaccacagaaattcacagatgctataaagcacagctttcgctttttttttttttagagagagctggtttaccaatttcactgcttgaaagtatcacaaaaatctggggatccttttgaaaatataaatgccatcatattgtgatataatttatacaatataatataattgtgtaaaatcatgattataataatgtttcaataaacatttcttaaattccc

SEQ ID NO: 14444 - DNA, 1576 bp, Homo sapiens
  source 1..1576: mol_type = unassigned DNA
ccatcctgccctctattttcagggtcacgaccgctgcaagcaggctttgctgcagattgggatcaacatgatggcactgcctggaggtcgccacctggactccgtcaccctgccgggtcagcggctacacctgatgcaggtggactcagtccagcgctggatggaagatctgaagctcatgaccgagtgcgagtgcatgtgtgtcctgcaggccaagcccatcagcctggaagaggatgcacagggtgacctcatcctggcaggtggccctggccctggagaccccctgcagctgctgctcaaacggggttgggtcattagcacagagctgcgcaggatcgggcagaagctggcccaggaccgctgggcacgggtgcacagcatgagcgtgcgtctgacctgccatgcccgctccatggtcagcgagtacagtgctgtcagcaggaactccttgaaggaaatgggcgagattgagaagctgctaatggagaaatgctcggagctctcggcagtcacagagaggtgccttcaggttgagaatgagcatgtcctgaagtcaatgaaggcctgcgtgagtgagaccctgagcatgctgggccagcactttggtcagctgctggagctggccctgacacgggaggttcaggcactggtgagaaaaattgatgcctcagacaatatctacaccacagagtccaccacagggaacctgttcagcctgacccaggagggggctcccttgtgccgcatcatagccaaggtggatggcgttctgtgcttggccgacatcctgaccgacaacagccactcagaggccacacgggctgaggctgcggctgtggtggcccaggtcacctccccacacctgcccgtcacccagcacctcagtagcttcctggagagcatggaggagatcgtgacagccctcgtcaaactgtgccaagaggcctcatcaggggaagtcttcctactggcctctgcggcccttgccaacatcacgttctttgacacaatggcctgcgagatgctcctgcagttgaatgccatccgtgttctcctggaagcctgcagtgacaagcagagagtggacacgccttacactcgggaccagattgtgaccatcttggcaaacatgtctgtcctagaacagtgtgcctctgacatcattcaggaaaatggggtccagcttatcatgggcatgctgtctgaaaaaccaaggtctgggactcctgctgaagtggcagcctgtgagcgagtccagcagaaagctgcagtgaccctggctcgtctcagccgagacccagatgtggcacgggaggccgtgcggctcagctgcatgtcccgtctcatcgagctctgcagatccccatcagagaggaacagcagtgacgccgtgcttgtggcctgcctggctgctctgcgtagattggctggggtctgccctgaaggcctccaggactctgactttcagcagttggtccagcctcggctggtggactccttcttactctgcagcaacatggaggagagttttgtgtagtgagtgtgggcgaagaaatacatttggctgttctca

SEQ ID NO: 14445 - DNA, 1702 bp, Homo sapiens
  source 1..1702: mol_type = unassigned DNA
ccatcctgccctctattttcagggtcacgaccgctgcaagcaggctttgctgcagattgggatcaacatgatggcactgcctggaggtcgccacctggactccgtcaccctgccgggtcagcggctacacctgatgcaggtggactcagtccagcgctggatggaagatctgaagctcatgaccgagtgcgagtgcatgtgtgtcctgcaggccaagcccatcagcctggaagaggatgcacagggtgacctcatcctggcaggtggccctggccctggagaccccctgcagctgctgctcaaacggggttgggtcattagcacagagctgcgcaggatcgggcagaagctggcccaggaccgctgggcacgggtgcacagcatgagcgtgcgtctgacctgccatgcccgctccatggtcagcgagtacagtgctgtcagcaggaactccttgaaggaaatgggcgagattgagaagctgctaatggagaaatgctcggagctctcggcagtcacagagaggtgccttcaggttgagaatgagcatgtcctgaagtcaatgaaggcctgcgtgagtgagaccctgagcatgctgggccagcactttggtcagctgctggagctggccctgacacgggaggttcaggcactggtgagaaaaattgatgcctcagacaatatctacaccacagagtccaccacagggaacctgttcagcctgacccaggagggggctcccttgtgccgcatcatagccaaggagggtggggtcgtagcactcttcaaggtttgccggcaggacagtttccggtgcttgtacccccaggcgctccgcacgctggcctccatctgctgcgtggaagagggtgtccaccagctggagaaggtggatggcgttctgtgcttggccgacatcctgaccgacaacagccactcagaggccacacgggctgaggctgcggctgtggtggcccaggtcacctccccacacctgcccgtcacccagcacctcagtagcttcctggagagcatggaggagatcgtgacagccctcgtcaaactgtgccaagaggcctcatcaggggaagtcttcctactggcctctgcggcccttgccaacatcacgttctttgacacaatggcctgcgagatgctcctgcagttgaatgccatccgtgttctcctggaagcctgcagtgacaagcagagagtggacacgccttacactcgggaccagattgtgaccatcttggcaaacatgtctgtcctagaacagtgtgcctctgacatcattcaggaaaatggggtccagcttatcatgggcatgctgtctgaaaaaccaaggtctgggactcctgctgaagtggcagcctgtgagcgagtccagcagaaagctgcagtgaccctggctcgtctcagccgagacccagatgtggcacgggaggccgtgcggctcagctgcatgtcccgtctcatcgagctctgcagatccccatcagagaggaacagcagtgacgccgtgcttgtggcctgcctggctgctctgcgtagattggctggggtctgccctgaaggcctccaggactctgactttcagcagttggtccagcctcggctggtggactccttcttactctgcagcaacatggaggagagttttgtgtagtgagtgtgggcgaagaaatacatttggctgttctca

SEQ ID NO: 14446 - DNA, 3010 bp, Homo sapiens
  source 1..3010: mol_type = unassigned DNA
cacgcccctgggcggtgcgcgcgggcggtgggtaggccgggcaggctcacgtgatgcgggccccgcggcccgccatataaacccgcgcgcccgccaggcgctgcggccgtcccgggccgtgactcctcctttcccccgccccgcctccgttcggagagccggcgggcgggcgcctctcggccaggaagcgcctcttggacgcgtgtgaccgatgcccagattgcacgaccacttctggagctgctcctgtgcgcacagcgcgaggcgccgaggccccccgcgagccagcgccgcggggctggcggccaaggttggggagatgatcaacgtttccgtgtccgggccctccctgctggcggcccacggtgccccggacgctgaccccgcgcccaggggccgcagtgctgcgatgagcggccccgagcccggcagcccctaccccaacacctggcatcatcgcctgttgcagaggagcctcgtgctcttctcggttggggtggtcctagccctggtgctcaacctgctgcagatccagaggaatgtcactctcttccccgaggaggtgatcgccaccatcttttcctccgcctggtgggtccctccctgctgcgggacagcagctgctgttgttggcctactgtacccctgtatcgacagtcacctcggagaaccccacaaatttaagagagaatgggccagtgtcatgcgctgcatagcagtttttgttggcattaaccacgccagtgctaaattggattttgccaataatgtccagctgtccttgactttagcagccctatctttgggcctttggtggacatttgatcgttccagaagtggccttgggctggggatcaccatagcttttctagctacgctgatcacgcagtttctcgtgtataatggtgtctatcagtatacatccccagatttcctctatattcgttcttggctcccttgtatatttttctcaggaggcgtcacggtggggaacataggacgacagttagctatgggtgttcctgaaaagccccatagtgattgagtcttcaaaaccaccgattctgagagcaaggaagattttggaagaaaatctgactgtggattatgacaaagattatcttttttcttaagtaatctatttagatcgggctgactgtacaaatgactcctggaaaaaactcttcacctagtctagaatagggaggtggagaatgatgacttaccctgaagtcttcccttgactgcccgcactggcgcctgtctgtgccctggagcattctgcccaggctacgtgggttcaggcaggtggcagcttcccaagtattcgatttcattcatgtgattaaaacaagttgccatatttcaaagccttgaactaagactcaattaccaacccgcagttttgtgtcagtgcccaaaggaggtaggttgatggtgcttaacaaacatgaagtatggtgtaataggaataatatttatccaaaagatttttaaaaatagggctgtgtttaaaaaaaaaaacaaaacaagaaaagcagcagtgattatagagaggtcacactctaagtggggtcgcggcgtggccacgcttcacggtcacgctcgtccgtcctgcagtggcgtgtttacatggtcacacgtgtgtgtatcaccagtgggtcaactgcttgtcattcctcccgtggcagtttgtgtagacaatcttactgagcaaaaggcaatgaaaagtcttggttcccacactgcgatatattggaattttcacctcagtttatgaagtttatttcgaaatccatagtcatctaagaatgaatacctgtctgccatgtatttcaatcttagtgagccaaaattgtttgtttgttactacagaatagagatgactgttttttgccacagccctatggaatttgcaatctgtgattgccttgtaaaaaggagagtgcatatggcactgcattaaacgtgtggtgtttctagtcaatgatattggtgagcacaatgtattcatttaatggcatagaccataccagacctaatttgcaagtattgggtcttaaacttcaagtgcaatgtatatgaaaaccaatctgagccttgtatctcttaaatatttattttttttaacgtgtgagatgttcgagagaaggttctccattcatttcagtgctgcctggaggaaactcggcaatgatttctttcagttgtgaagttcctttcgtgttacaccctccactgaaccctcaaccttcgaaatactccagttttgtgggtttggtcatttttacttataaatttacctttttgtattttgcaatttacatgtgtttggtttgttttaaattctgtgaaagtggcttgattaaaagactccttttaaatggaagccaccagtcagcagaatggaagcttagaggaacttgcctgtgagcgctggtctttgtgtttggttttgtgatgtaacgatctttgctggggttttttgctttgttttgagggaaatgtcttggagtaaattttaagttcctggagttaatttgttttacaggaattttgttttttaaaaaaataggatcattctgaactttggaatgacccccttatatattttctgaaaatgaaaacagttacatgaaaaaaatttccaatgaagatgtcagcattttatgaaaaaccagaagttattagatgaaagcagcgagtgaatctttaaaacagacttgatcacgcacacacaataagtctttctctccgaaaccggaagtaaatctatatctgttagaaataatgtagccaaaagaatgtaaatttgaggatttttttgccaatagtttatagaaaatatatgaaccaaagtgatttgagtttgtaaaaatgtaaaatagtatgaacaaaatttgcactctaccagatttgaacatctagtgaggttcacattcatactaagttttcaacattgtgttctttttgcattcattttttacttttattaaaggttcaaaaccaa

SEQ ID NO: 14447 - DNA, 2623 bp, Homo sapiens
  source 1..2623: mol_type = unassigned DNA
cacgcccctgggcggtgcgcgcgggcggtgggtaggccgggcaggctcacgtgatgcgggccccgcggcccgccatataaacccgcgcgcccgccaggcgctgcggccgtcccgggccgtgactcctcctttcccccgccccgcctccgttcggagagccggcgggcgggcgcctctcggccaggaagcgcctcttggacgcgtgtgaccgatgcccagattgcacgaccacttctggagctgctcctgtgcgcacagcgcgaggcgccgaggccccccgcgagccagcgccaaattggattttgccaataatgtccagctgtccttgactttagcagccctatctttgggcctttggtggacatttgatcgttccagaagtggccttgggctggggatcaccatagcttttctagctacgctgatcacgcagtttctcgtgtataatggtgtctatcagtatacatccccagatttcctctatattcgttcttggctcccttgtatatttttctcaggaggcgtcacggtggggaacataggacgacagttagctatgctgatacccttctgtgaggagttgaatttgaagaccacttggctgtttcacaaaaccagaagtaattacagggtgttcctgaaaagccccatagtgattgagtcttcaaaaccaccgattctgagagcaaggaagattttggaagaaaatctgactgtggattatgacaaagattatcttttttcttaagtaatctatttagatcgggctgactgtacaaatgactcctggaaaaaactcttcacctagtctagaatagggaggtggagaatgatgacttaccctgaagtcttcccttgactgcccgcactggcgcctgtctgtgccctggagcattctgcccaggctacgtgggttcaggcaggtggcagcttcccaagtattcgatttcattcatgtgattaaaacaagttgccatatttcaaagccttgaactaagactcaattaccaacccgcagttttgtgtcagtgcccaaaggaggtaggttgatggtgcttaacaaacatgaagtatggtgtaataggaataatatttatccaaaagatttttaaaaatagggctgtgtttaaaaaaaaaaacaaaacaagaaaagcagcagtgattatagagaggtcacactctaagtggggtcgcggcgtggccacgcttcacggtcacgctcgtccgtcctgcagtggcgtgtttacatggtcacacgtgtgtgtatcaccagtgggtcaactgcttgtcattcctcccgtggcagtttgtgtagacaatcttactgagcaaaaggcaatgaaaagtcttggttcccacactgcgatatattggaattttcacctcagtttatgaagtttatttcgaaatccatagtcatctaagaatgaatacctgtctgccatgtatttcaatcttagtgagccaaaattgtttgtttgttactacagaatagagatgactgttttttgccacagccctatggaatttgcaatctgtgattgccttgtaaaaaggagagtgcatatggcactgcattaaacgtgtggtgtttctagtcaatgatattggtgagcacaatgtattcatttaatggcatagaccataccagacctaatttgcaagtattgggtcttaaacttcaagtgcaatgtatatgaaaaccaatctgagccttgtatctcttaaatatttattttttttaacgtgtgagatgttcgagagaaggttctccattcatttcagtgctgcctggaggaaactcggcaatgatttctttcagttgtgaagttcctttcgtgttacaccctccactgaaccctcaaccttcgaaatactccagttttgtgggtttggtcatttttacttataaatttacctttttgtattttgcaatttacatgtgtttggtttgttttaaattctgtgaaagtggcttgattaaaagactccttttaaatggaagccaccagtcagcagaatggaagcttagaggaacttgcctgtgagcgctggtctttgtgtttggttttgtgatgtaacgatctttgctggggttttttgctttgttttgagggaaatgtcttggagtaaattttaagttcctggagttaatttgttttacaggaattttgttttttaaaaaaataggatcattctgaactttggaatgacccccttatatattttctgaaaatgaaaacagttacatgaaaaaaatttccaatgaagatgtcagcattttatgaaaaaccagaagttattagatgaaagcagcgagtgaatctttaaaacagacttgatcacgcacacacaataagtctttctctccgaaaccggaagtaaatctatatctgttagaaataatgtagccaaaagaatgtaaatttgaggatttttttgccaatagtttatagaaaatatatgaaccaaagtgatttgagtttgtaaaaatgtaaaatagtatgaacaaaatttgcactctaccagatttgaacatctagtgaggttcacattcatactaagttttcaacattgtgttctttttgcattcattttttacttttattaaaggttcaaaacc

SEQ ID NO: 14448 - DNA, 596 bp, Homo sapiens
  source 1..596: mol_type = unassigned DNA
atgcgggccccgcggcccgccatataaacccgcgcgcccgccaggcgctgcggccgtcccgggccgtgactcctcctttcccccgccccgcctccgttcggagagccggcgggcgggcgcctctcggccaggtacgcggccggctgggataggggtcgcgggcgggctttggtcgcgcagcagccggtcctccccggaggaagcgcctcttggacgcgtgtgaccgatgcccagattgcacgaccacttctggagctgctcctgtgcgcacagcgcgaggcgccgaggccccccgcgagccagcgccgcggggctggcggccaaggttggggagatgatcaacgtttccgtgtccgggccctccctgctggcggcccacggtgccccggacgctgaccccgcgcccaggggccgcagtgctgcgatgagcggccccgagcccggcagcccctaccccaacacctggcatcatcgcctgttgcagaggagcctcgtgctcttctcggttggggtggtcctagccctggtgctcaacctgctgcagatccagaggaatgtcactctcttccccgaggaggtgatcgccaccatctttt

SEQ ID NO: 14449 - DNA, 1127 bp, Homo sapiens
  source 1..1127: mol_type = unassigned DNA
gggccgtgactcctcctttcccccgccccgcctccgttcggagagccggcgggcgggcgcctctcggccaggaagcgcctcttggacgcgtgtgaccgatgcccagattgcacgaccacttctggagctgctcctgtgcgcacagcgcgaggcgccgaggccccccgcgagccagcgccgcggggctggcggccaaggttggggagatgatcaacgtttccgtgtccgggccctccctgctggcggcccacggtgccccggacgctgaccccgcgcccaggggccgcagtgctgcgatgagcggccccgagcccggcagcccctaccccaacacctggcatcatcgcctgttgcagaggagcctcgtgctcttctcggttggggtggtcctagccctggtgctcaacctgctgcagatccagaggaatgtcactctcttccccgaggaggtgatcgccaccatcttttcctccgcctggtgggtccctccctgctgcgggacagcagctggtatacatccccagatttcctctatattcgttcttggctcccttgtatatttttctcaggaggcgtcacggtggggaacataggacgacagttagctatgggtgttcctgaaaagccccatagtgattgagtcttcaaaaccaccgattctgagagcaaggaagattttggaagaaaatctgactgtggattatgacaaagattatcttttttcttaagtaatctatttagatcgggctgactgtacaaatgactcctggaaaaaactcttcacctagtctagaatagggaggtggagaatgatgacttaccctgaagtcttcccttgactgcccgcactggcgcctgtctgtgccctggagcattctgcccaggctacgtgggttcaggcaggtggcagcttcccaagtattcgatttcattcatgtgattaaaacaagttgccatatttcaaagccttgaactaagactcaattaccaacccgcagttttgtgtcagtgcccaaaggaggtaggttgatggtgcttaacaaacatgaagtatggtgtaataggaataatatttatccaaaagatttttaaaaatagggctgtgtttaaaaaaaaaaacaaaacaa

SEQ ID NO: 14450 - DNA, 2590 bp, Homo sapiens
  source 1..2590: mol_type = unassigned DNA
gtgggagtggaggaggaagaggcggtagggggtacgggggctggtcccagaagatggcggaggcgggggatttctggtaggtcctactttaggacaagatgtggtaccgttgaagcgtcagtctttgattcacagacagttgagcttttcagctgggaagcctttccatttttttttttttaacggctttctgaacctatgaaaccatggcagaaggagagacagagtcacctgggcccaaaaagtgtggcccatatatttcatctgtcactagccagagtgtgaacttgatgattcgaggagtagtgctattttttattggagtatttcttgcattagtgttaaatttacttcagattcagagaaatgtgacgctctttccacctgatgtgattgcaagcatcttttcttctgcatggtgggtacccccatgctgtggcacggcttcagctgtgattgggttattatacccctgcattgacagacatctaggagaaccacataaatttaaaagagagtggtccagtgtaatgcggtgtgtagcagtctttgttggtataaatcatgccagtgctaaagtggatttcgataacaacatacagttgtctctcacactggctgcactatccattggactgtggtggacttttgatagatctagaagtggttttggccttggagtaggaattgccttcttggcaactgtggtcactcaactgctagtatataatggtgtttaccaatatacatctccagatttcctctatgttcgttcttggttaccatgtatattttttgctggaggcataacaatgggaaacattggtcgacaactggcaatgtacgaatgtaaagttatcgcagaaaaatctcatcaggaatgaagaaggcaaaaaatatcttttgtacagaaaagcaagatgaaaaggatgtgaaatggtagatataccaacaaaacttcagactgtaaaattgccaggatgcagttttccccttgattggcgtgtgtgtatatatggataaatatatatatacacacacacatattactgcaatctgtgattgcttcatctgtaaatcagttgtaaacctttacatatttgacttaaataactgtaagatatatatgtactacattaaaaagtgttgattaatagatgaaatttttaaattaattttttaaaacatgccatacattgtatcacaatgttaatgtgccaagatattgttcctgtcatgcagagtataagaatgctttgaacaatttgtagacttagtgaaataaaataagaggaaagccaaaaacaaacaaacaaaaagcatatggggagctggtattttctctttagcttactgttgtgcctttttatttttctaatcacagcagtatgagttatgagtgccctaatttgtggttagtttctaatttaatgttgtttcatagagtttggagtgttttgatacagggtgaaaatgaacttctggtttcaaacctgcgttactggagacagcccaaagagtaattttctgttttgacaggttttactggaagtatatgtgatgagcagaagaggttatcagcattaaattgttttggttctaaatttggaacagtatatataattaaaagtaaggaacattagaggatttaattagaataaatacatgttttggaaatacagtgacctcttgcagtgtcacaaaagtgcaaagtgatattagctgtcatctgcaatacagaatctcattgcttttgcacatggagcatataggaaactccaaacagatcacaatgaggtttctaaatctgttgggttctgtcttctattgggttctgtgaagcaaaccactgtagctttagctgggttcagtcatatgactcgttggtggaatgcctaggtttttcatcttacatgcagtcttgggggtggatgaatacataatttctcatgtattcgtgtatccattagtgaatagttcaagtctgtttaagagtgtattgagatggcattctctgcatgttaaagatcttaatggcaaccagcacctcttaagtatggtttaaacatattcttagctaattttttccattagtttttgaaattggtggcagttgtctgatccacaagggcaagatcttctgagtactctggggtgtgagtatgtgtgcacacgtgtgtgttggagtgagtgagagaatgtgtctgtgcatgtggccatgctttcctagaatgtcaagtagatatttttacactttgagttttaaagcaattactatcagactgagatcttgtatgccaaactttaatctgcttttatgttttcaggctgaaggtgtgaaaatcctaagaggatttcatattgaatatgtgtacacaatcttaactatcgtggtggaaaacatactactataatttattattatatcttccagataatgttattcatttagaacaaataaggtatattttttagaatcaactttgtaagcactataaaatctttaataagttataaggtctatgatgtgtttactttaaaaattgctgttaaaagcaacacgtattaaatatgtaattatcatctgggt

SEQ ID NO: 14451 - DNA, 9059 bp, Homo sapiens
  source 1..9059: mol_type = unassigned DNA
gagaaggacgcgcggcccccagcgcctcttgggtggccgcctcggagcatgacccccgcgggccagcgccgcgcgctctgatccgaggagaccccgcgctcccgcagccatggccaccgggggccggcggggggcggcggccgcgccgctgctggtggcggtggccgcgctgctactgggcgccgcgggccacctgtaccccggagaggtgtgtcccggcatggatatccggaacaacctcactaggttgcatgagctggagaattgctctgtcatcgaaggacacttgcagatactcttgatgttcaaaacgaggcccgaagatttccgagacctcagtttccccaaactcatcatgatcactgattacttgctgctcttccgggtctatgggctcgagagcctgaaggacctgttccccaacctcacggtcatccggggatcacgactgttctttaactacgcgctggtcatcttcgagatggttcacctcaaggaactcggcctctacaacctgatgaacatcacccggggttctgtccgcatcgagaagaacaatgagctctgttacttggccactatcgactggtcccgtatcctggattccgtggaggataattacatcgtgttgaacaaagatgacaacgaggagtgtggagacatctgtccgggtaccgcgaagggcaagaccaactgccccgccaccgtcatcaacgggcagtttgtcgaacgatgttggactcatagtcactgccagaaagtttgcccgaccatctgtaagtcacacggctgcaccgccgaaggcctctgttgccacagcgagtgcctgggcaactgttctcagcccgacgaccccaccaagtgcgtggcctgccgcaacttctacctggacggcaggtgtgtggagacctgcccgcccccgtactaccacttccaggactggcgctgtgtgaacttcagcttctgccaggacctgcaccacaaatgcaagaactcgcggaggcagggctgccaccagtacgtcattcacaacaacaagtgcatccctgagtgtccctccgggtacacgatgaattccagcaacttgctgtgcaccccatgcctgggtccctgtcccaaggtgtgccacctcctagaaggcgagaagaccatcgactcggtgacgtctgcccaggagctccgaggatgcaccgtcatcaacgggagtctgatcatcaacattcgaggaggcaacaatctggcagctgagctagaagccaacctcggcctcattgaagaaatttcagggtatctaaaaatccgccgatcctacgctctggtgtcactttccttcttccggaagttacgtctgattcgaggagagaccttggaaattgggaactactccttctatgccttggacaaccagaacctaaggcagctctgggactggagcaaacacaacctcaccatcactcaggggaaactcttcttccactataaccccaaactctgcttgtcagaaatccacaagatggaagaagtttcaggaaccaaggggcgccaggagagaaacgacattgccctgaagaccaatggggaccaggcatcctgtgaaaatgagttacttaaattttcttacattcggacatcttttgacaagatcttgctgagatgggagccgtactggccccccgacttccgagacctcttggggttcatgctgttctacaaagaggccccttatcagaatgtgacggagttcgacgggcaggatgcgtgtggttccaacagttggacggtggtagacattgacccacccctgaggtccaacgaccccaaatcacagaaccacccagggtggctgatgcggggtctcaagccctggacccagtatgccatctttgtgaagaccctggtcaccttttcggatgaacgccggacctatggggccaagagtgacatcatttatgtccagacagatgccaccaacccctctgtgcccctggatccaatctcagtgtctaactcatcatcccagattattctgaagtggaaaccaccctccgaccccaatggcaacatcacccactacctggttttctgggagaggcaggcggaagacagtgagctgttcgagctggattattgcctcaaagggctgaagctgccctcgaggacctggtctccaccattcgagtctgaagattctcagaagcacaaccagagtgagtatgaggattcggccggcgaatgctgctcctgtccaaagacagactctcagatcctgaaggagctggaggagtcctcgtttaggaagacgtttgaggattacctgcacaacgtggttttcgtccccagaaaaacctcttcaggcactggtgccgaggaccctaggccatctcggaaacgcaggtcccttggcgatgttgggaatgtgacggtggccgtgcccacggtggcagctttccccaacacttcctcgaccagcgtgcccacgagtccggaggagcacaggccttttgagaaggtggtgaacaaggagtcgctggtcatctccggcttgcgacacttcacgggctatcgcatcgagctgcaggcttgcaaccaggacacccctgaggaacggtgcagtgtggcagcctacgtcagtgcgaggaccatgcctgaagccaaggctgatgacattgttggccctgtgacgcatgaaatctttgagaacaacgtcgtccacttgatgtggcaggagccgaaggagcccaatggtctgatcgtgctgtatgaagtgagttatcggcgatatggtgatgaggagctgcatctctgcgtctcccgcaagcacttcgctctggaacggggctgcaggctgcgtgggctgtcaccggggaactacagcgtgcgaatccgggccacctcccttgcgggcaacggctcttggacggaacccacctatttctacgtgacagactatttagacgtcccgtcaaatattgcaaaaattatcatcggccccctcatctttgtctttctcttcagtgttgtgattggaagtatttatctattcctgagaaagaggcagccagatgggccgctgggaccgctttacgcttcttcaaaccctgagtatctcagtgccagtgatgtgtttccatgctctgtgtacgtgccggacgagtgggaggtgtctcgagagaagatcaccctccttcgagagctggggcagggctccttcggcatggtgtatgagggcaatgccagggacatcatcaagggtgaggcagagacccgcgtggcggtgaagacggtcaacgagtcagccagtctccgagagcggattgagttcctcaatgaggcctcggtcatgaagggcttcacctgccatcacgtggtgcgcctcctgggagtggtgtccaagggccagcccacgctggtggtgatggagctgatggctcacggagacctgaagagctacctccgttctctgcggccagaggctgagaataatcctggccgccctccccctacccttcaagagatgattcagatggcggcagagattgctgacgggatggcctacctgaacgccaagaagtttgtgcatcgggacctggcagcgagaaactgcatggtcgcccatgattttactgtcaaaattggagactttggaatgaccagagacatctatgaaacggattactaccggaaagggggcaagggtctgctccctgtacggtggatggcaccggagtccctgaaggatggggtcttcaccacttcttctgacatgtggtcctttggcgtggtcctttgggaaatcaccagcttggcagaacagccttaccaaggcctgtctaatgaacaggtgttgaaatttgtcatggatggagggtatctggatcaacccgacaactgtccagagagagtcactgacctcatgcgcatgtgctggcaattcaaccccaagatgaggccaaccttcctggagattgtcaacctgctcaaggacgacctgcaccccagctttccagaggtgtcgttcttccacagcgaggagaacaaggctcccgagagtgaggagctggagatggagtttgaggacatggagaatgtgcccctggaccgttcctcgcactgtcagagggaggaggcggggggccgggatggagggtcctcgctgggtttcaagcggagctacgaggaacacatcccttacacacacatgaacggaggcaagaaaaacgggcggattctgaccttgcctcggtccaatccttcctaacagtgcctaccgtggcgggggcgggcaggggttcccattttcgctttcctctggtttgaaagcctctggaaaactcaggattctcacgactctaccatgtccaatggagttcagagatcgttcctatacatttctgttcatcttaaggtggactcgtttggttaccaatttaactagtcctgcagaggatttaactgtgaacctggagggcaaggggtttccacagttgctgctcctttggggcaacgacggtttcaaaccaggattttgtgttttttcgttccccccacccgcccccagcagatggaaagaaagcacctgtttttacaaattctttttttttttttttttttttgctggtgtctgagcttcagtataaaagacaaaacttcctgtttgtggaacaaaagttcgaaagaaaaaacaaaacaaaaacacccagccctgttccaggagaatttcaagttttacaggttgagcttcaagatggtttttttggttttttttttttctctcatccaggctgaaggattttttttttctttacaaaatgagttcctcaaattgaccaatagctgctgctttcatattttggataagggtctgtggtcccggcgtgtgctcacgtgtgtatgcacgtgtgtgtgtccattagacacggctgatgtgtgtgcaaagtatccatgcggagttgatgctttgggaattggctcatgaaggttcttctcaagggtgcgagctcatccccctctctccttccttcttattgactgggagactgtgctctcgacagattcttcttgtgtcagaagtctagcctcaggtttctaccctcccttcacattggtggccaagggaggagcatttcatttggagtgattatgaatcttttcaagaccaaaccaagctaggacattaaaaaaaaaaaaagaaaaagaaagaaaaaacaaaatggaaaaaggaaaaaaaaaaagaactgagatgacagagttttgagaatatatttgtaccatatttaatttttaaagtctctggtattagcctcataagttattgactattccccggggttggcggggagtggggacatgagttggtctgcctgttgtggggccgggaaggggagggagtcaggcacaagtggcctctttgtttggtcttaaaggcatccatttctgggaatgaagccatgttcgctgctaacacttttggatgttgtgaggccacgtggagtgtgtgagagactaggttttatggatggtctggttcaggtaccaggtctgctggaaggttcctgttcggataagctggtagctacctagctctgagcctgccttcaagaacacctgtgttcatcctctgattctctgtgtgtacctcttgtggcgtttcctctcccgggtgtgaacatcctaaccgttattgtgcaaacccaagaacgtcagatcccaaagcacaacaacctggatggactttgggaacatctaagcaatgtaagagagaggtgcactgagagtacgtcttggtcccctccaccctgagagcatctgacggtcctcagtactgaactcccggaagctgctctgagcccggtgacctcatctgggccaggtgtggtgcctgagctgaatgctcaggtgcttacagtgttgcaatccctaagagagtagagtctggaggagaaaccgtgaaaaagaccttacacaccaccaagaacttccgaatgggcgtgaatccaccgtttcttctctttgcaaaaagaaccaccacagctgctcaaagaacacagtgaactcatcactttggttcatcaaaaaatcatcgcccatgcgttattcctgagtgcattttcttacaactttttgactgcttccttttcttcttctcttaagagttgtgggcttaagaatgggatagagtcataatggcaacctccaagccctctcaattcttgattaagaacacaggtagacatgaatcccaattgtctattgctatcttatttatatgattcgggaaaatacagcatgtaaaaatattgctgaggagcctcagtgattgggtacaagaagcaagagtacagaaattatttttgccaaatttattttgtaaatatgagggtctgtacctaaatttaaaaaaaaaacacgtagaactaggtattttgttctcttcttagtaaatttgtagtggttgtatactacactagctgcaattttcacatttttctaattcagaaaggtttttcttatattaggggaaaaagtatttattttaatatataaaatcactctgaaaatcactctcataaaaaatggagcgcatgtaaatttttatcaaagaaaaataaacaggtgaatgggggatagtgattttcttttttcagcacagtctacctcagtgtattgttaagatgtgattcaatcatggacatctttgagatttcagaattctacctggaaccggtctgaatcagggaacgtgtgtatcagctgattcgaatgccagggaccagtaagaattttgagggagggagttgggatggagaaggtatggcctttatgcgagcatagatccttttcttcctggctggtaatattcttctctgaatttaatcttcctttaaaaaaaaatcctccatctattgtcactatgttccccaaacataaactaagttccaggctgtcatgatgtatctgatatatggggtaacccagcaaggtgtaccttcctttggtgagagatggctgccggggcaaagacgggctttgattcagagcaagcattcccacctgttccatggaatccccctgaagtgagcacaaaggtgccctgggctccctgatggtttatgcccactcctttcaggctggtgatgcaccttacacacaaacacctaatgcaatgtctttttaaattctccaagtgggatgggagcatgtgagggaaattccaatccaaaacccattaatgtgctgaacgctttttttttttttttttttttttttgcaacaacaccttggacctctgtgttggggtttgactgacctcaagctgatattattggaccttgtgcagctttgataacccatgtgagagtctaggcaggaccagtggggcccaaatcttgctgctcttgtacttttaggcactgcccttgcagactcacctttctccacctgccctggagaaaggtagggtgtgctgggcctgccccttgcaaatgggattcaccagtttcatttatttgactctactgccacagtgaaaagagcaaacagctattgggttgcaaacctcctttgacattaggaaatgttgactttgtaacaataaaactttggtcctagaaagacacggttgtcctgggagtttgtagtgttaagttgcaacaacaacaacaaaaagcaacaaaaccagcttaggataacactttttgttgcttgttcttaaagatgtctcactatgattaaaacccttttcattaatgtagtgaaagccacacaggagttccttcttccaggaggagaataccaagcacatcactttctctctgcatcagtgatgtcaaatacgcatcagaaaatgttcaggttttaggagctgtcctaggtgctgtttcatcattggaagcagtgagaaagagaagcactgctgcttgtctggatataggctgaggatgattgagagaagctgtgggaactgacacaagggtctgcataggtcatcctgtgaccctggggactatgttaccaactgacagacagatctttcactgtatcctagcagggcaggtagtccaccaagaaatgtgcttattggattgggaggtgtttatttgtagtctgctgtaacacgtgtgaaagagcaggagcgtcatcagcatatgacttgcgctggtcatccggtaaatggatgtgctgtagtcccagtgctaatcatttctctccttcacagtgggtggaagtttagggttaaatgtcctttgaatgtcacctggtgagtccttgacaccttaggctcttcagaaacaatggttttgttgaggatggggaacagggaatgccgattttatatacatggtacacagagaggggtgtcacttcagaaaatcttccagcatgttcttcagaatattaatttatatgcgaggtgaggttgggaatgaaaagaacaggtcagcacttttttttttcctagaacatacaaaagaacatggtggactttcagggagtgcaatggaaggtgaatatttccttaagggtccccgagaaatgggagtgaggggaggggacacaatggctttttgagcttacttttaccttctgatactagtcaaggtccagaaccagccaccagccaaatttctatctgggtgcgggccactgaaaatccttgttaaaaaccagatcacaaatctggggctcttggtcccattggagaaggaaggaagagcctcaaaataagtgtgcacccatgcacatattcaggaacagcttgtttagtctttacactttgcctgaaagttgcttctcctcgtccctttgtgtgcctgggtggcctcggccctgtgcgttggcaacgcaggatcaaatgtgctgcagcttttgcagaaaacaactcagaaacacaaaaccccccaacagctcaattattattttttcaatgttttcctacaagagccaagtagcaccatgtacagaagacgcctttttttttggaatattgaaatcgttctgcatgtaaaatatgggataatgacctgtttatattaaaattctgattaaattatctgagaata

SEQ ID NO: 14452 - DNA, 9023 bp, Homo sapiens
  source 1..9023: mol_type = unassigned DNA
gagaaggacgcgcggcccccagcgcctcttgggtggccgcctcggagcatgacccccgcgggccagcgccgcgcgctctgatccgaggagaccccgcgctcccgcagccatggccaccgggggccggcggggggcggcggccgcgccgctgctggtggcggtggccgcgctgctactgggcgccgcgggccacctgtaccccggagaggtgtgtcccggcatggatatccggaacaacctcactaggttgcatgagctggagaattgctctgtcatcgaaggacacttgcagatactcttgatgttcaaaacgaggcccgaagatttccgagacctcagtttccccaaactcatcatgatcactgattacttgctgctcttccgggtctatgggctcgagagcctgaaggacctgttccccaacctcacggtcatccggggatcacgactgttctttaactacgcgctggtcatcttcgagatggttcacctcaaggaactcggcctctacaacctgatgaacatcacccggggttctgtccgcatcgagaagaacaatgagctctgttacttggccactatcgactggtcccgtatcctggattccgtggaggataattacatcgtgttgaacaaagatgacaacgaggagtgtggagacatctgtccgggtaccgcgaagggcaagaccaactgccccgccaccgtcatcaacgggcagtttgtcgaacgatgttggactcatagtcactgccagaaagtttgcccgaccatctgtaagtcacacggctgcaccgccgaaggcctctgttgccacagcgagtgcctgggcaactgttctcagcccgacgaccccaccaagtgcgtggcctgccgcaacttctacctggacggcaggtgtgtggagacctgcccgcccccgtactaccacttccaggactggcgctgtgtgaacttcagcttctgccaggacctgcaccacaaatgcaagaactcgcggaggcagggctgccaccagtacgtcattcacaacaacaagtgcatccctgagtgtccctccgggtacacgatgaattccagcaacttgctgtgcaccccatgcctgggtccctgtcccaaggtgtgccacctcctagaaggcgagaagaccatcgactcggtgacgtctgcccaggagctccgaggatgcaccgtcatcaacgggagtctgatcatcaacattcgaggaggcaacaatctggcagctgagctagaagccaacctcggcctcattgaagaaatttcagggtatctaaaaatccgccgatcctacgctctggtgtcactttccttcttccggaagttacgtctgattcgaggagagaccttggaaattgggaactactccttctatgccttggacaaccagaacctaaggcagctctgggactggagcaaacacaacctcaccatcactcaggggaaactcttcttccactataaccccaaactctgcttgtcagaaatccacaagatggaagaagtttcaggaaccaaggggcgccaggagagaaacgacattgccctgaagaccaatggggaccaggcatcctgtgaaaatgagttacttaaattttcttacattcggacatcttttgacaagatcttgctgagatgggagccgtactggccccccgacttccgagacctcttggggttcatgctgttctacaaagaggccccttatcagaatgtgacggagttcgacgggcaggatgcgtgtggttccaacagttggacggtggtagacattgacccacccctgaggtccaacgaccccaaatcacagaaccacccagggtggctgatgcggggtctcaagccctggacccagtatgccatctttgtgaagaccctggtcaccttttcggatgaacgccggacctatggggccaagagtgacatcatttatgtccagacagatgccaccaacccctctgtgcccctggatccaatctcagtgtctaactcatcatcccagattattctgaagtggaaaccaccctccgaccccaatggcaacatcacccactacctggttttctgggagaggcaggcggaagacagtgagctgttcgagctggattattgcctcaaagggctgaagctgccctcgaggacctggtctccaccattcgagtctgaagattctcagaagcacaaccagagtgagtatgaggattcggccggcgaatgctgctcctgtccaaagacagactctcagatcctgaaggagctggaggagtcctcgtttaggaagacgtttgaggattacctgcacaacgtggttttcgtccccaggccatctcggaaacgcaggtcccttggcgatgttgggaatgtgacggtggccgtgcccacggtggcagctttccccaacacttcctcgaccagcgtgcccacgagtccggaggagcacaggccttttgagaaggtggtgaacaaggagtcgctggtcatctccggcttgcgacacttcacgggctatcgcatcgagctgcaggcttgcaaccaggacacccctgaggaacggtgcagtgtggcagcctacgtcagtgcgaggaccatgcctgaagccaaggctgatgacattgttggccctgtgacgcatgaaatctttgagaacaacgtcgtccacttgatgtggcaggagccgaaggagcccaatggtctgatcgtgctgtatgaagtgagttatcggcgatatggtgatgaggagctgcatctctgcgtctcccgcaagcacttcgctctggaacggggctgcaggctgcgtgggctgtcaccggggaactacagcgtgcgaatccgggccacctcccttgcgggcaacggctcttggacggaacccacctatttctacgtgacagactatttagacgtcccgtcaaatattgcaaaaattatcatcggccccctcatctttgtctttctcttcagtgttgtgattggaagtatttatctattcctgagaaagaggcagccagatgggccgctgggaccgctttacgcttcttcaaaccctgagtatctcagtgccagtgatgtgtttccatgctctgtgtacgtgccggacgagtgggaggtgtctcgagagaagatcaccctccttcgagagctggggcagggctccttcggcatggtgtatgagggcaatgccagggacatcatcaagggtgaggcagagacccgcgtggcggtgaagacggtcaacgagtcagccagtctccgagagcggattgagttcctcaatgaggcctcggtcatgaagggcttcacctgccatcacgtggtgcgcctcctgggagtggtgtccaagggccagcccacgctggtggtgatggagctgatggctcacggagacctgaagagctacctccgttctctgcggccagaggctgagaataatcctggccgccctccccctacccttcaagagatgattcagatggcggcagagattgctgacgggatggcctacctgaacgccaagaagtttgtgcatcgggacctggcagcgagaaactgcatggtcgcccatgattttactgtcaaaattggagactttggaatgaccagagacatctatgaaacggattactaccggaaagggggcaagggtctgctccctgtacggtggatggcaccggagtccctgaaggatggggtcttcaccacttcttctgacatgtggtcctttggcgtggtcctttgggaaatcaccagcttggcagaacagccttaccaaggcctgtctaatgaacaggtgttgaaatttgtcatggatggagggtatctggatcaacccgacaactgtccagagagagtcactgacctcatgcgcatgtgctggcaattcaaccccaagatgaggccaaccttcctggagattgtcaacctgctcaaggacgacctgcaccccagctttccagaggtgtcgttcttccacagcgaggagaacaaggctcccgagagtgaggagctggagatggagtttgaggacatggagaatgtgcccctggaccgttcctcgcactgtcagagggaggaggcggggggccgggatggagggtcctcgctgggtttcaagcggagctacgaggaacacatcccttacacacacatgaacggaggcaagaaaaacgggcggattctgaccttgcctcggtccaatccttcctaacagtgcctaccgtggcgggggcgggcaggggttcccattttcgctttcctctggtttgaaagcctctggaaaactcaggattctcacgactctaccatgtccaatggagttcagagatcgttcctatacatttctgttcatcttaaggtggactcgtttggttaccaatttaactagtcctgcagaggatttaactgtgaacctggagggcaaggggtttccacagttgctgctcctttggggcaacgacggtttcaaaccaggattttgtgttttttcgttccccccacccgcccccagcagatggaaagaaagcacctgtttttacaaattctttttttttttttttttttttgctggtgtctgagcttcagtataaaagacaaaacttcctgtttgtggaacaaaagttcgaaagaaaaaacaaaacaaaaacacccagccctgttccaggagaatttcaagttttacaggttgagcttcaagatggtttttttggttttttttttttctctcatccaggctgaaggattttttttttctttacaaaatgagttcctcaaattgaccaatagctgctgctttcatattttggataagggtctgtggtcccggcgtgtgctcacgtgtgtatgcacgtgtgtgtgtccattagacacggctgatgtgtgtgcaaagtatccatgcggagttgatgctttgggaattggctcatgaaggttcttctcaagggtgcgagctcatccccctctctccttccttcttattgactgggagactgtgctctcgacagattcttcttgtgtcagaagtctagcctcaggtttctaccctcccttcacattggtggccaagggaggagcatttcatttggagtgattatgaatcttttcaagaccaaaccaagctaggacattaaaaaaaaaaaaagaaaaagaaagaaaaaacaaaatggaaaaaggaaaaaaaaaaagaactgagatgacagagttttgagaatatatttgtaccatatttaatttttaaagtctctggtattagcctcataagttattgactattccccggggttggcggggagtggggacatgagttggtctgcctgttgtggggccgggaaggggagggagtcaggcacaagtggcctctttgtttggtcttaaaggcatccatttctgggaatgaagccatgttcgctgctaacacttttggatgttgtgaggccacgtggagtgtgtgagagactaggttttatggatggtctggttcaggtaccaggtctgctggaaggttcctgttcggataagctggtagctacctagctctgagcctgccttcaagaacacctgtgttcatcctctgattctctgtgtgtacctcttgtggcgtttcctctcccgggtgtgaacatcctaaccgttattgtgcaaacccaagaacgtcagatcccaaagcacaacaacctggatggactttgggaacatctaagcaatgtaagagagaggtgcactgagagtacgtcttggtcccctccaccctgagagcatctgacggtcctcagtactgaactcccggaagctgctctgagcccggtgacctcatctgggccaggtgtggtgcctgagctgaatgctcaggtgcttacagtgttgcaatccctaagagagtagagtctggaggagaaaccgtgaaaaagaccttacacaccaccaagaacttccgaatgggcgtgaatccaccgtttcttctctttgcaaaaagaaccaccacagctgctcaaagaacacagtgaactcatcactttggttcatcaaaaaatcatcgcccatgcgttattcctgagtgcattttcttacaactttttgactgcttccttttcttcttctcttaagagttgtgggcttaagaatgggatagagtcataatggcaacctccaagccctctcaattcttgattaagaacacaggtagacatgaatcccaattgtctattgctatcttatttatatgattcgggaaaatacagcatgtaaaaatattgctgaggagcctcagtgattgggtacaagaagcaagagtacagaaattatttttgccaaatttattttgtaaatatgagggtctgtacctaaatttaaaaaaaaaacacgtagaactaggtattttgttctcttcttagtaaatttgtagtggttgtatactacactagctgcaattttcacatttttctaattcagaaaggtttttcttatattaggggaaaaagtatttattttaatatataaaatcactctgaaaatcactctcataaaaaatggagcgcatgtaaatttttatcaaagaaaaataaacaggtgaatgggggatagtgattttcttttttcagcacagtctacctcagtgtattgttaagatgtgattcaatcatggacatctttgagatttcagaattctacctggaaccggtctgaatcagggaacgtgtgtatcagctgattcgaatgccagggaccagtaagaattttgagggagggagttgggatggagaaggtatggcctttatgcgagcatagatccttttcttcctggctggtaatattcttctctgaatttaatcttcctttaaaaaaaaatcctccatctattgtcactatgttccccaaacataaactaagttccaggctgtcatgatgtatctgatatatggggtaacccagcaaggtgtaccttcctttggtgagagatggctgccggggcaaagacgggctttgattcagagcaagcattcccacctgttccatggaatccccctgaagtgagcacaaaggtgccctgggctccctgatggtttatgcccactcctttcaggctggtgatgcaccttacacacaaacacctaatgcaatgtctttttaaattctccaagtgggatgggagcatgtgagggaaattccaatccaaaacccattaatgtgctgaacgctttttttttttttttttttttttttgcaacaacaccttggacctctgtgttggggtttgactgacctcaagctgatattattggaccttgtgcagctttgataacccatgtgagagtctaggcaggaccagtggggcccaaatcttgctgctcttgtacttttaggcactgcccttgcagactcacctttctccacctgccctggagaaaggtagggtgtgctgggcctgccccttgcaaatgggattcaccagtttcatttatttgactctactgccacagtgaaaagagcaaacagctattgggttgcaaacctcctttgacattaggaaatgttgactttgtaacaataaaactttggtcctagaaagacacggttgtcctgggagtttgtagtgttaagttgcaacaacaacaacaaaaagcaacaaaaccagcttaggataacactttttgttgcttgttcttaaagatgtctcactatgattaaaacccttttcattaatgtagtgaaagccacacaggagttccttcttccaggaggagaataccaagcacatcactttctctctgcatcagtgatgtcaaatacgcatcagaaaatgttcaggttttaggagctgtcctaggtgctgtttcatcattggaagcagtgagaaagagaagcactgctgcttgtctggatataggctgaggatgattgagagaagctgtgggaactgacacaagggtctgcataggtcatcctgtgaccctggggactatgttaccaactgacagacagatctttcactgtatcctagcagggcaggtagtccaccaagaaatgtgcttattggattgggaggtgtttatttgtagtctgctgtaacacgtgtgaaagagcaggagcgtcatcagcatatgacttgcgctggtcatccggtaaatggatgtgctgtagtcccagtgctaatcatttctctccttcacagtgggtggaagtttagggttaaatgtcctttgaatgtcacctggtgagtccttgacaccttaggctcttcagaaacaatggttttgttgaggatggggaacagggaatgccgattttatatacatggtacacagagaggggtgtcacttcagaaaatcttccagcatgttcttcagaatattaatttatatgcgaggtgaggttgggaatgaaaagaacaggtcagcacttttttttttcctagaacatacaaaagaacatggtggactttcagggagtgcaatggaaggtgaatatttccttaagggtccccgagaaatgggagtgaggggaggggacacaatggctttttgagcttacttttaccttctgatactagtcaaggtccagaaccagccaccagccaaatttctatctgggtgcgggccactgaaaatccttgttaaaaaccagatcacaaatctggggctcttggtcccattggagaaggaaggaagagcctcaaaataagtgtgcacccatgcacatattcaggaacagcttgtttagtctttacactttgcctgaaagttgcttctcctcgtccctttgtgtgcctgggtggcctcggccctgtgcgttggcaacgcaggatcaaatgtgctgcagcttttgcagaaaacaactcagaaacacaaaaccccccaacagctcaattattattttttcaatgttttcctacaagagccaagtagcaccatgtacagaagacgcctttttttttggaatattgaaatcgttctgcatgtaaaatatgggataatgacctgtttatattaaaattctgattaaattatctgagaata

SEQ ID NO: 14453 - DNA, 637 bp, Homo sapiens
  source 1..637: mol_type = unassigned DNA
cccttatcagaatgtgacggagttcgacgggcaggatgcgtgtggttccaacagttggacggtggtagacattgacccacccctgaggtccaacgaccccaaatcacagaaccacccagggtggctgatgcggggtctcaagccctggacccagtatgccatctttgtgaagaccctggtcaccttttcggatgaacgccggacctatggggccaagagtgacatcatttatgtccagacagatgccaccaacccctctgtgcccctggatccaatctcagtgtctaactcatcatcccagattattctgaagtggaaaccaccctccgaccccaatggcaacatcacccactacctggttttctgggagaggcaggcggaagacagtgagctgttcgagctggattattgcctcaaagggcgagtccagtcatcagctccgctgtaagctgttggccctgcattcaagtaaccagaaccacccgtgagagctgccaccagtaatgtcactcgaagcttccttttttttttttttaattccgaaagtctaaatctgtaattaccaagggaccatttaaacatggttttatttgtaattgtcacaaagttaatatcattaaaaggaaactcactaagg

SEQ ID NO: 14454 - DNA, 6999 bp, Homo sapiens
  source 1..6999: mol_type = unassigned DNA
gcggggaccgcgacgagcccgggtcgccgttggcagcagcagcagcaacaccagcagcagcagcagccccggcggcggcgcggaccccgagcgcccgggcgcaccccggcttcccggagcgcgacgcggcggcagcagccccggtgcggccgcgcgcgccttaggctcggccccgcggctcggggaccccgactcccggcccagcgagcgcgtcccccggcgccgcccgagagcccgaggaggcagcggccgcaggcagccggggaggggggcggccaccgcccgcgccgggcatcctcaggagccccagagcgcggagggcgcggcgccgccgagcggtgctggcccccgcgggcctccccggaccttccccaccgcctgggcccgagggacgcgtgatcgggcgggcggccgggcgcaagggtgggagggagccgcccccgcccgcgccccctccgcccctcgccccaacccctgggcgccgggcccgggccgcgcggcctgaagcgcccgcgatggcgagcccgccgcggcacgggccgcccgggccggcgagcggagacggccccaacctcaacaacaacaacaacaacaacaaccacagcgtgcgcaagtgcggctacctgcgcaagcagaagcatggccacaagcgcttcttcgtgctgcgcggacccggcgcgggcggcgacgaggcgacggcgggcggggggtcggcgccgcaaccgccgcggctcgagtactacgagagcgagaaaaagtggcggagcaaggcaggcgcgccgaaacgggtgatcgctctcgactgctgcctgaacatcaacaagcgcgccgacgccaagcacaagtacctgatcgccctctacaccaaggacgagtacttcgccgtggccgccgagaacgagcaggagcaggagggctggtaccgcgcgctcaccgacctggtcagcgagggccgcgcggccgccggagacgcgccccccgccgccgcgcccgccgcgtcctgcagcgcctccctgcccggcgccctgggcggctctgccggcgccgccggggccgaggacagctacgggctggtggctcccgccacggccgcctaccgtgaggtgtggcaggtgaacctgaagcccaagggtctgggccagagcaagaacctgacgggggtgtaccgtctgtgcctgtctgcgcgcaccatcggcttcgtgaagctcaactgcgagcagccgtcggtgacgctgcagctcatgaacatccgccgctgcggccactcggacagcttcttcttcatcgaggtgggccgctcggccgtcacaggccccggcgagctgtggatgcaggcggacgactcggtggtggcgcagaacatccacgagaccatcctggaggccatgaaggcgctcaaggagctcttcgagttccggccgcgcagtaagagccaatcgtcggggtcgtcggccacgcaccccatcagcgtccccggcgcgcgccgccaccaccacctggtcaacctgccccccagccagacgggcctggtgcgccgctcgcgcaccgacagcctggccgccaccccgccggcggccaagtgcagctcgtgccgggtgcgcaccgccagcgagggcgacggcggcgcggcggcgggagcggcggccgcgggcgccaggccggtgtcggtggctgggagccccctgagccccgggccggtgcgcgcgcccctgagccgctcgcacaccctgagcggcggctgcggcggccgcgggagcaaggtggcgctgctgccggcagggggcgcgctgcaacacagccgctccatgtccatgcccgtggcgcactcgccgcccgccgccaccagccccggctccctgtcgtccagcagcggccacggctcgggctcctacccgccgccgcccggcccgcacccgcctctgccgcatccgctgcaccacggccccggccagcggccctccagcggcagcgcctccgcctcgggctcccccagcgaccccggcttcatgtccctggacgagtacggctccagcccaggcgacctgcgcgccttctgcagccaccgaagcaacacgcccgagtccatcgcggagacgcccccggcccgagacggcggcggcggcggtgagttctacgggtacatgaccatggacaggcccctgagccactgtggccgctcctaccgccgggtctcgggggacgcggcccaggacctggaccgagggctgcgcaagaggacctactccctgaccacgccagcccggcagcggccggtgccccagccctcctctgcctcgctggatgaatacaccctgatgcgggccaccttctcgggcagcgcgggccgcctctgcccgtcctgccccgcgtcctctcccaaggtggcctaccacccctacccagaggactacggagacatcgagatcggctcccacaggagctccagcagcaacctgggggcagacgacggctacatgcccatgacgcccggcgcggccctcgcgggcagtgggagcggcagctgcaggagcgacgactacatgcccatgagccccgccagcgtgtccgcccccaagcagatcttgcagcccagggccgccgccgccgccgccgccgccgtgccttctgcggggcctgcggggccagcacccacctctgcggcgggcaggacattcccggcgagcgggggcggctacaaggccagctcgcccgccgagagctcccccgaggacagtgggtacatgcgcatgtggtgcggttccaagctgtccatggagcatgcagatggcaagctgctgcccaacggggactacctcaacgtgtcccccagcgacgcggtcaccacgggcaccccgcccgacttcttctccgcagccctgcaccccggcggggagccgctcaggggcgttcccggctgctgctacagctccttgccccgctcctacaaggccccctacacctgtggcggggacagcgaccagtacgtgctcatgagctcccccgtggggcgcatcctggaggaggagcgtctggagcctcaggccacgccagggcccagccaggcggccagcgccttcggggccggccccacgcagccccctcaccctgtagtgccttcgcccgtgcggcctagcggcggccgcccggagggcttcttgggccagcgcggccgggcggtgaggcccacgcgcctgtccctggaggggctgcccagcctgcccagcatgcacgagtacccactgccaccggagcccaagagccccggcgagtacatcaacatcgactttggcgagcccggggcccgcctgtcgccgcccgcgcctcccctgctggcgtcggcggcctcgtcctcctcgctcttgtccgccagcagcccggcctcgtcgctgggctcaggcaccccgggcaccagcagcgacagccggcagcggtctccgctctccgactacatgaacctcgacttcagctcccccaagtctcctaagccgggcgccccgagcggccaccccgtgggctccttggacggcctcctgtcccccgaggcctcctccccgtatccgccgttgcccccgcgtccgtccgcgtccccgtcgtcgtctctgcagccgccgccaccgccgccggccccgggggagctgtaccgcctgccccccgcctcggccgttgccaccgcccagggcccgggcgccgcctcatcgttgtcctcggacaccggggacaatggtgactacaccgagatggcttttggtgtggccgccaccccgccgcaacctatcgcggcccccccgaagccagaagctgcccgcgtggccagcccgacgtcgggcgtgaagaggctgagcctcatggagcaggtgtcgggagtcgaggccttcctgcaggccagccagcccccggacccccaccgcggcgccaaggtcatccgcgcagacccgcaggggggccgccgccgccacagttccgagaccttctcctccaccacgacggtcacccccgtgtccccgtccttcgcccacaaccccaagcgccacaactcggcctccgtggaaaatgtctctctcaggaaaagcagcgagggcggcgtgggtgtcggccctggagggggcgacgagccgcccacctccccacgacagttgcagccggcgccccctttggcaccgcagggccggccgtggaccccgggtcagcccgggggcttggtcggttgtcctgggagcggtggatcgcccatgcgcagagagacctctgccggcttccagaatggtctcaactacatcgccatcgacgtgagggaggagcccgggctgccaccccagccgcagccgccgccgccgccgcttcctcagccgggagacaagagctcctggggccggacccgaagcctcgggggtctcatcagcgctgtgggcgtcggcagcaccggcggcgggtgcggggggccgggtcccggtgccctgccccctgccaacacctacgccagcattgacttcttgtcccaccacttgaaggaggccaccatcgtgaaagagtgaagatctgtctggctttatcaccaggatgtcacatgtcagagagtatcattaaaagaagacgctcagcactgtttcagcccgaagctgcttgcagttttcttttggatctgagcaatgactgtgtttggaaacatctgtggactctgttagatgaggcaccaacaaggcaaggtcacctgcctctttcccttgttcccggatggggcattcatcattgtgctgtttgcgttttgttttgttttgttttaacaaaattagctgaagaagttattctcaagaaaattggatgttttcattggccttcttaaattgtggccagtgtcttttaatttcttcttcttttccttttggcaaagcagatataaccctcagcatgctaggagagtgcacccgtacctatggaagtggtaaaatctggtatttactggcttacactcaaaacgaccacagtcctacctcagttcaaggtaaagccggatttccgtggcgggggtcccacaggacctcctgtagtagcccctgcgctgtgtgtctggagcgcggtcctcggccttattgaaatggtccaagtagacagctgcttgttggattccagtgcaggtacctgcgatgtttacgtccacaccgagcccagtgtgggactgacatttctcaatggaagtgaaatttgggattggactttgaagacggattactaaataataattattatatgtaactgaagcaacctacttttgaaaatcaactgtattgggtagtgggaggtgggagggaagggctttgggaaggggatgaatatctctttttacctttaacagacttgtttaatcttctcgatgtagatgtttatgtaggtacttcacattgcaaacgccttttattctatttacaagctcagatgtctctgctctcctgaatcttgggcatgcctttctgtaaccaaaaatccctgtaggcgtgctagcaattccagggtggtccgggtttggcagatttgatttttaaaaaacgtattatctttaataaaatgttattatgtcaaccagtgaggctgccctgaacaaaaaaaacaaaaagaaaaaaaaaaaaggaaagaaagaaactgataaaaagaggcattccagcccctatgttattgatggaaaaagaaaaagaagaaaagcaatctcgcagtacatgttacttgtcgaaaaaattccggacaagactacccttgttttatgttttcagtattctgaaaataccagtgtgtggcagttctcgcagatgttacctaaaactgctgaacttgaccggcagaatgttctgccgttttctgctccctcgacacttgattggagggctgtcgacctctcctcccgtgggggcttccccagtgcctatcttctctgatagtcatggagaggttacactaattcattggagatgtaagttgttggttttgttttgttttgtttttagaaaaatatatataaatatataatagatatctatcgctatagaataatgcattaataaaatgaggcttttttagaggaagaccaaaaaattcaatgtcttaaaaatatatttaatggcaatgcaaaagtcttcctgcttccgtgctgaactttagaacagaggattgtattgcaagacaaagttgaatgtaaagtgatctccctgaacatttttaaggttttacttttctgaaattatacatcacagcagtgcataggccatataatgttagctggaaggtcaatttcagtgtatgatatactttattaagatgtataaaaatcctgaagtttttatttagttttgggaataggcatcaatgggtggtatttgctttgtaactccccccaggtacgatagggactgaatatggaccctgctgaaagcagtgtattgacgcatatttaactcgccctctatccgtagagtagtcatgacactatacagatggttcgtgttcatactgcagcttaaaacaagcaaaatacacagatgataatatgctaaattttcctctatcctgtacatttcacaaaaaggcatatgcaatatttacatttttaatttagtttacagaatggaaccaaaatgtataaatgttatgtttgctaaaacttcacaatgtatattgggtctttgtacattttgcctgacttaccttaaatttaaaatattttttgctatataaactttaacagttattaaacagtgttttctttttgggtacgtattgtttctggatatcaagatgttaaatatatttcttgctattgtgatatgacaagagacttaacttatcttgctctgtcttccactgtacacgctgtatataggggtcaatgtgatgctgctggagacgagaataaactggactagaatagtgcattgtatttagtctgtattgatcatggatgccctccttaatagccatatgcaataaaataaagtacattatttatgaaatgaa

SEQ ID NO: 14455 - DNA, 5101 bp, Homo sapiens
  source 1..5101: mol_type = unassigned DNA
cccccgctgccctccttgggagcggtccccagcctgctgctccgccctcagggttggctggcctctcggcctgccttttgctcagaaccctgtgtcattttctccctctggaggcccgagactctccctgtcactgtctgcatctctgtccccatctctcaatctcatgctgagtctctctgtctccaactgcctgtcactgtctttgtgtctctgtgactctcatttctttttttctgtctcctgctgtctctgtgtgggattccttgtctctctgcccctgccctccctctcctatctgaaccctggtctctgtgtcccttagggcttatcacaccgttctccccagagtcaccgggaggagagccgggactggacacaagccagggctgggacaatggcagtgcctagtctgtggccctggggagcatgcctgcctgtgatcttcctctccttgggatttggcctggatacagtagaggtgtgccccagcctggatattcgctcagaggtggcagagcttcgtcagctggagaactgcagcgtggtggagggccacctgcagatcctgctcatgttcacagccaccggggaggacttccgcggcctcagcttccctcgcctcacccaggtcaccgactacctgctgctcttccgtgtctacggactggagagcctgcgcgacctcttccccaacctagcagtcatccgcgggacgcgcctcttcctgggctatgcactggtcatctttgagatgccacatctgcgtgacgtggcactgcctgcacttggggccgtgctgcgtggggctgtgcgtgtggagaagaaccaggagctctgccacctctccaccattgactggggactgctgcagccagcacctggcgccaaccacatcgtgggcaacaagctgggcgaggagtgtgctgacgtgtgccctggtgtgctgggtgctgctggtgagccctgtgccaagaccaccttcagcgggcacactgactacagatgctggacctccagccactgccagagagtgtgcccctgcccccatgggatggcttgcacagcgaggggcgagtgctgccacaccgaatgcctggggggctgcagccagccagaagaccctcgtgcctgtgtagcttgccgccacctctacttccagggtgcctgcctgtgggcctgcccgccaggcacctaccagtatgagtcctggcgctgtgtcacagctgagcgctgtgccagcctgcactctgtgcccggccgtgcctccaccttcggcatacaccagggcagttgcctggcccagtgcccttctggcttcacccgtaatagcagcagcatattctgccacaagtgcgaggggctgtgccctaaagagtgcaaggtaggcaccaagaccatcgactccatccaggcggcacaggatcttgtgggctgcacgcatgtggagggaagcctcatcctcaaccttcgccagggctacaacctggagccacagctgcagcacagcctggggctggtagaaaccattactggcttcctcaaaatcaagcactcctttgccctcgtgtccctgggctttttcaagaacctcaaactaatccggggagacgccatggtggatgggaactacactctctacgtgctggacaaccagaacctacaacagctagggtcctgggtggccgcggggctcaccattcccgtgggcaagatctacttcgccttcaacccgcgcctctgcttggaacacatctaccgactggaggaggtgacaggcacgcgaggtcggcagaacaaggctgagatcaacccccgcaccaacggagaccgcgccgcctgccagactcgcaccctgcgcttcgtgtccaacgtgacggaggcagaccgcatcctgctacgctgggagcgctatgagccactggaggcccgcgacctgctcagcttcatcgtgtactacaaggagtccccattccagaacgccacagagcacgtgggtccagatgcttgtggaacccagagctggaacctgctggatgtggagctgcccctaagccgcacccaggagccaggggtgaccctagcctccctcaagccttggacacagtacgcagtgtttgtgcgggccatcacgctaaccactgaggaggacagccctcatcaaggagcccagagtcccatcgtctacctccgaacgctgcctgcagctcccacggtgccccaagacgtcatctccacgtccaactcctcctcccacctcctggtgcgctggaagccaccgacccagcgcaatgggaacctcacctactacctggtgctgtggcagcggctggcagaggacggcgacctctacctcaatgactactgccaccgcggcttgcggctgcccaccagcaacaacgatccgcgcttcgacggcgaagacggggatcctgaggccgagatggagtccgactgctgcccttgccagcacccacctcctggtcaggttctgcccccgctggaggcgcaagaggcctcgttccagaagaagtttgaaaactttctacacaacgcgatcaccatccccatatccccttggaaggtgacgtccatcaacaagagcccccaaagggactcagggcggcaccgccgggcagctgggcccctccggctggggggcaacagctcggatttcgagatccaggaggacaaggtgccccgtgagcgagcggtgctgagcggcctgcgccacttcacggaataccggatcgacatccatgcctgcaaccacgcggcgcacaccgtgggctgcagcgccgccaccttcgtctttgcgcgcaccatgccccacagagaggctgatggtattccaggaaaggtggcctgggaggcctccagcaagaacagtgtccttctgcgctggctcgagccaccagaccccaacggactcatcctcaagtacgaaatcaagtaccgccgcttgggagaggaggccacagtgctgtgtgtgtcccgtcttcgatatgcgaagtttgggggagtccacctggccctgctgccccctggaaactactctgccagggttagggcaacctcactggctggcaatggctcttggacagacagtgttgccttctacatccttggcccagaggaggaggatgctggggggctgcatgtcctcctcactgccacccctgtggggctcacgctgctcatcgttcttgctgcccttggtttcttctacggcaagaagagaaacagaaccctgtatgcttctgtgaatccagagtacttcagcgcctctgatatgtatgtccctgatgaatgggaggtgcctcgggagcagatctcgataatccgggaactgggccagggctcttttgggatggtatatgaggggctggcacgaggacttgaggctggagaggagtccacacccgtggccctgaagacggtgaatgagctggccagcccacgggaatgcattgagttcctcaaggaagcttctgtcatgaaagccttcaagtgtcaccatgtggtgcgtctcctgggtgtggtatctcagggccagccaactctggtcatcatggagttaatgacccgtggggacctcaagagccatcttcgatctttgcggcctgaggcagagaacaaccctgggctcccacagccagcattgggggaaatgatccaaatggctggtgagattgcagacggcatggcctaccttgctgccaacaagtttgtgcaccgagatctagcagcccgcaactgcatggtgtcccaggacttcaccgtcaagatcggggacttcgggatgactcgggacgtgtatgagacagactattaccgcaagggtgggaaggggctgctgcccgtgcgctggatggcccccgagtccctcaaagatgggatcttcaccacccactcggatgtctggtcctttggcgtggtactctgggagattgtgaccctggcagaacaaccctaccagggcctgtccaatgagcaggtgctgaagttcgtcatggatggcggggtcctggaggagctggagggctgtccccttcagctgcaggagctgatgagccgctgctggcagccgaacccacgcctgcgcccatctttcacacacattctggacagcatacaggaggagctgcggccctccttccgcctcctctccttctactacagcccggaatgccggggggcccggggctccctgcctaccaccgatgcagagcctgactcctcacccactccaagagactgcagccctcaaaatgggggtccagggcactgaggggcacctcattccctggctggcctcccatggggagacaggaagggacccgacctctgtggctgagacgcctgaatgttcacccccaccccaactcagggcaagggatggccgagggtggggcagagaacaggagcagggaaggctgtgggggtgggcagaggggtctcaccataggagtttctcagactctgagtccctcgggggagagcaagcagggtcaaagccagaggagtagagatcaggtcagggagagatgtcctgccctcagaggtagggaccccactcagactaggaagagggggcccgcccaccctagaggccctgcccctcagtttggggtctcctctggacaggtagggccagcgacatgtttgaaatcagatgagcaatcagaagcaggcctggggcgctctccatgcatgtatgggaggggggtggggctccacatgactgccttgcttgccactggtttcacctcctcccctcagctccactgaccaggtggcatggggagaacccaggggcctggggagtggttcccagcctgcccgccctcacctcctcctctccttttgccctgcccagggctccccaagcttggtgctccttcctccttttctccaggggcatcccttggagtacagtcaccctttcttcagtccctcccctcaatgattagccctggatgcttaaggctttcagagcctcatcttcctccctcccctcaccctcacccagccccgcccccacccctgcctctcatgggaagactggagaaggcacaataaatgctgaggcctgtttgta

SEQ ID NO: 14456 - DNA, 5877 bp, Homo sapiens
  source 1..5877: mol_type = unassigned DNA
ccggctcgaagcgcaagcaggaagcgtttgcggtgatcccggcgactgcgctggctaatgcggtaccggctagcgtggcttctgcaccccgcactgcccagcaccttccgctcagtcctcggcgcccgcctgccgcctccggagcgcctgtgtggtttccaaaaaaagacttacagcaaaatgaataatccagccatcaagagaataggaaatcacattaccaagtctcctgaagacaagcgagaatatcgagggctagagctggccaatggtatcaaagtacttcttatcagtgatcccaccacggataagtcatcagcagcacttgatgtgcacataggttcattgtcggatcctccaaatattgctggcttaagtcatttttgtgaacatatgctttttttgggaacaaagaaataccctaaagaaaatgaatacagccagtttctcagtgagcatgcaggaagttcaaatgcctttactagtggagagcataccaattactattttgatgtttctcatgaacacctagaaggtgccctagacaggtttgcacagttttttctgtgccccttgttcgatgaaagttgcaaagacagagaggtgaatgcagttgattcagaacatgagaagaatgtgatgaatgatgcctggagactctttcaattggaaaaagctacagggaatcctaaacaccccttcagtaaatttgggacaggtaacaaatatactctggagactagaccaaaccaagaaggcattgatgtaagacaagagctactgaaattccattctgcttactattcatccaacttaatggctgtttgtgttttaggtcgagaatctttagatgacttgactaatctggtggtaaagttattttctgaagtagagaacaaaaatgttccattgccagaatttcctgaacaccctttccaagaagaacatcttaaacaactttacaaaatagtacccattaaagatattaggaatctctatgtgacatttcccatacctgaccttcagaaatactacaaatcaaatcctggtcattatcttggtcatctcattgggcatgaaggtcctggaagtctgttatcagaacttaagtcaaagggctgggttaatactcttgttggtgggcagaaggaaggagcccgaggttttatgttttttatcattaatgtggacttgaccgaggaaggattattacatgttgaagatataattttgcacatgtttcaatacattcagaagttacgtgcagaaggacctcaagaatgggttttccaagagtgcaaggacttgaatgctgttgcttttaggtttaaagacaaagagaggccacggggctatacatctaagattgcaggaatattgcattattatcccctagaagaggtgctcacagcggaatatttactggaagaatttagacctgacttaatagagatggttctcgataaactcagaccagaaaatgtccgggttgccatagtttctaaatcttttgaaggaaaaactgatcgcacagaagagtggtatggaacccagtacaaacaagaagctataccggatgaagtcatcaagaaatggcaaaatgctgacctgaatgggaaatttaaacttcctacaaagaatgaatttattcctacgaattttgagattttaccgttagaaaaagaggcgacaccataccctgctcttattaaggatacagctatgagcaaactttggttcaaacaagatgataagttttttttgccgaaggcttgtctcaactttgaatttttcagcccatttgcttatgtggaccccttgcactgtaacatggcctatttgtaccttgagctcctcaaagactcactcaacgagtatgcatatgcagcagagctagcaggcttgagctatgatctccaaaataccatctatgggatgtatctttcagtgaaaggttacaatgacaagcagccaattttactaaagaagattattgagaaaatggctacctttgagattgatgaaaaaagatttgaaattatcaaagaagcatatatgcgatctcttaacaatttccgggctgaacagcctcaccagcatgccatgtactacctccgcttgctgatgactgaagtggcctggactaaagatgagttaaaagaagctctggatgatgtaacccttcctcgccttaaggccttcatacctcagctcctgtcacggctgcacattgaagcccttctccatggaaacataacaaagcaggctgcattaggaattatgcagatggttgaagacaccctcattgaacatgctcataccaaacctctccttccaagtcagctggttcggtatagagaagttcagctccctgacagaggatggtttgtttatcagcagagaaatgaagttcacaataactgtggcatcgagatatactaccaaacagacatgcaaagcacctcagagaatatgtttctggagctcttctgtcagattatctcggaaccttgcttcaacaccctgcgcaccaaggagcagttgggctatatcgtcttcagcgggccacgtcgagctaatggcatacagggcttgagattcatcatccagtcagaaaagccacctcactacctagaaagcagagtggaagctttcttaattaccatggaaaagtccatagaggacatgacagaagaggccttccaaaaacacattcaggcattagcaattcgtcgactagacaaaccaaagaagctatctgctgagtgtgctaaatactggggagaaatcatctcccagcaatataattttgacagagataacactgaggttgcatatttaaagacacttaccaaggaagatatcatcaaattctacaaggaaatgttggcagtagatgctccaaggagacataaggtatccgtccatgttcttgccagggaaatggattcttgtcctgttgttggagagttcccatgtcaaaatgacataaatttgtcacaagcaccagccttgccacaacctgaagtgattcagaacatgaccgaattcaagcgtggtctgccactgtttccccttgtgaaaccacatattaacttcatggctgcaaaactctgaagattccccatgcatgggaaagtgcaagtggatgcattcctgagtcttccagagcctaagaaaatcatcttggccactttaatagtttctgattcactattagagaaacaaacaaaaaattgtcaaatgtcattatgtagaaatattataaatccaaagtaaattacaaaatcttatagatgtagaatattttttaaatacatgcctcttaaatattttaaaatttttcttttgattactgagagaaatttccccaatataacaatgcttaaaatgaatgatattcctatagaatcttccttccctattctgtaaaatagtcacttgtccgaagaaagttaaaagttagctcttttctaaaagcctcctagcttgacatagaaggcttcacaacatttagaaaggtaataactttttaaaaattgatcctcaaatttgctttctacttgatggtttcatgtaaatcagtggaaaacattacatttggcagatgataaagcaatgtcatcttttattagtgaaatgctggttatataaggcatggttttaatctttttataaaatttgaacatgttttttatgccaactcgtaaaatgctagaaaaccctacttatttacaatgctagaaatacagacttaccttacatcaattttgtcctaaaccgaatttctcaggattactgtggtttctttcattctgattgaattatattgacctacttcttcatagttggtttgcagtgttccatgagttttacttttcctcatcaacatattgctttaacacaacatatttatttaacacgtacaaatagggtcaacttcagatcctactgagtgtgtgacatgcttttccaacatcagctttttgtaaccacctgtataactttttattacagtgaaattgcagtcagtatgtgaaccaaaatatcttgcccctttatgaatttaaaaggcagccaatacaaagccacctttttggaaatataaaaagtaaagccttgcattcttatatagcaggtcttcataaaactctaaaatcccttgttgctaccagtctaatcttgccttaaatgttaagttattttttgaatatataaatataaacatataaacacagatgatgactggagtagacttttaaaaaaatatttttttcatgagatactattttaggtgaaattgttactgtagatttaacagctgttttgaaatatttactgttattaaaacttgcttcaagagaaattgtgaatatatttccatatacaagcactagtaacagtaagtggccctgtcatccactaactcaggcaaagtaaagaatggcatttttgaaggacattttacctccccatatgatttgattggctaggactttcttctgtaaagtcataccttttcacatcttaagtttttacatttgccattttccaaatctcaattttgggcaagaacgatatagtcacaactatggggctgctttcaaaagcggggctccatttctactgtcagatcaatgtggtgctgtaaccatctttttatccctaccttcaagaacctccttatatgaagcctgtctttatccatcagaaggtgtgtgaaatcatcacttccttctggttttatgtatttgtagactatgcagcttttcattaaactgcaagtatatacaagacagatctgaaattaggcctgagtgttccgatccaccactgtactagtaaataaaaatccacctaccttttatgtggaaaattatgtgctattgagtaacttttagctcttttttaaaaaatgggtgaaatttaagtgtcttttttatgagaatgacacatgaagagatctgagagcaatctcatgtagtcttccatgaacctgcaattgtttggtatgcgtcagcattttccaatttccaggttggatctagagctgctgttgatcactcaggcatactaatggattcatttagatgggtccaagctgcagtccatgagcaataacagactaccccagatactgcagtttacgcagtgcttagtaaatgagatttgtggaactaagttattagttacctgaggcttcttaagaaagtcttcttttttgaccagttgatgtgaaagagggagcatgtgacacagccagtatggtggagtgctagggttatcctgtttacaataaatcgcctgaatttcacctctggagtctgcatttgtattatttttccagttttagtgaaatagtacagtggccagtcctcagcctacctctcaacatcccagtttgaccagatttcttgctttcattgttcataatgcagaaagcagtgaattatattaacattttaaaagtgtttctgggtaacaatgatttttgtcaaatagaagactcaatttcacaaccttaagaatagatcacttttgtaaaacaagaatctcagtatttgatgttggactccttgctgtgagtattgtcactgactccaaacccagaaagatttgttcctgcccttacagggatgaaaataaaaaggatagaaaaaatatttctctcctctacaatgagtccttacatcttcttgccacatctccagctgcagtttaggcagatatcttgttcaatctctgtcttcttgatccctgtcaaaataatttttctactcatatagtggccagttggctcaggcaggcatttcaagaggaatctgcttgttcctcacttttccagcataggacagtggtccagcccgcacagtcagc

SEQ ID NO: 14457 - DNA, 4480 bp, Homo sapiens
  source 1..4480: mol_type = unassigned DNA
agttgtaactgtagtaggtcagtgatacatggtgcaaaacagcctgggataatattgccagctgccagaccagactagggtggctcaaggggttgccatagtttctaaatcttttgaaggaaaaactgatcgcacagaagagtggtatggaacccagtacaaacaagaagctataccggatgaagtcatcaagaaatggcaaaatgctgacctgaatgggaaatttaaacttcctacaaagaatgaatttattcctacgaattttgagattttaccgttagaaaaagaggcgacaccataccctgctcttattaaggatacagctatgagcaaactttggttcaaacaagatgataagttttttttgccgaaggcttgtctcaactttgaatttttcagcccatttgcttatgtggaccccttgcactgtaacatggcctatttgtaccttgagctcctcaaagactcactcaacgagtatgcatatgcagcagagctagcaggcttgagctatgatctccaaaataccatctatgggatgtatctttcagtgaaaggttacaatgacaagcagccaattttactaaagaagattattgagaaaatggctacctttgagattgatgaaaaaagatttgaaattatcaaagaagcatatatgcgatctcttaacaatttccgggctgaacagcctcaccagcatgccatgtactacctccgcttgctgatgactgaagtggcctggactaaagatgagttaaaagaagctctggatgatgtaacccttcctcgccttaaggccttcatacctcagctcctgtcacggctgcacattgaagcccttctccatggaaacataacaaagcaggctgcattaggaattatgcagatggttgaagacaccctcattgaacatgctcataccaaacctctccttccaagtcagctggttcggtatagagaagttcagctccctgacagaggatggtttgtttatcagcagagaaatgaagttcacaataactgtggcatcgagatatactaccaaacagacatgcaaagcacctcagagaatatgtttctggagctcttctgtcagattatctcggaaccttgcttcaacaccctgcgcaccaaggagcagttgggctatatcgtcttcagcgggccacgtcgagctaatggcatacagggcttgagattcatcatccagtcagaaaagccacctcactacctagaaagcagagtggaagctttcttaattaccatggaaaagtccatagaggacatgacagaagaggccttccaaaaacacattcaggcattagcaattcgtcgactagacaaaccaaagaagctatctgctgagtgtgctaaatactggggagaaatcatctcccagcaatataattttgacagagataacactgaggttgcatatttaaagacacttaccaaggaagatatcatcaaattctacaaggaaatgttggcagtagatgctccaaggagacataaggtatccgtccatgttcttgccagggaaatggattcttgtcctgttgttggagagttcccatgtcaaaatgacataaatttgtcacaagcaccagccttgccacaacctgaagtgattcagaacatgaccgaattcaagcgtggtctgccactgtttccccttgtgaaaccacatattaacttcatggctgcaaaactctgaagattccccatgcatgggaaagtgcaagtggatgcattcctgagtcttccagagcctaagaaaatcatcttggccactttaatagtttctgattcactattagagaaacaaacaaaaaattgtcaaatgtcattatgtagaaatattataaatccaaagtaaattacaaaatcttatagatgtagaatattttttaaatacatgcctcttaaatattttaaaatttttcttttgattactgagagaaatttccccaatataacaatgcttaaaatgaatgatattcctatagaatcttccttccctattctgtaaaatagtcacttgtccgaagaaagttaaaagttagctcttttctaaaagcctcctagcttgacatagaaggcttcacaacatttagaaaggtaataactttttaaaaattgatcctcaaatttgctttctacttgatggtttcatgtaaatcagtggaaaacattacatttggcagatgataaagcaatgtcatcttttattagtgaaatgctggttatataaggcatggttttaatctttttataaaatttgaacatgttttttatgccaactcgtaaaatgctagaaaaccctacttatttacaatgctagaaatacagacttaccttacatcaattttgtcctaaaccgaatttctcaggattactgtggtttctttcattctgattgaattatattgacctacttcttcatagttggtttgcagtgttccatgagttttacttttcctcatcaacatattgctttaacacaacatatttatttaacacgtacaaatagggtcaacttcagatcctactgagtgtgtgacatgcttttccaacatcagctttttgtaaccacctgtataactttttattacagtgaaattgcagtcagtatgtgaaccaaaatatcttgcccctttatgaatttaaaaggcagccaatacaaagccacctttttggaaatataaaaagtaaagccttgcattcttatatagcaggtcttcataaaactctaaaatcccttgttgctaccagtctaatcttgccttaaatgttaagttattttttgaatatataaatataaacatataaacacagatgatgactggagtagacttttaaaaaaatatttttttcatgagatactattttaggtgaaattgttactgtagatttaacagctgttttgaaatatttactgttattaaaacttgcttcaagagaaattgtgaatatatttccatatacaagcactagtaacagtaagtggccctgtcatccactaactcaggcaaagtaaagaatggcatttttgaaggacattttacctccccatatgatttgattggctaggactttcttctgtaaagtcataccttttcacatcttaagtttttacatttgccattttccaaatctcaattttgggcaagaacgatatagtcacaactatggggctgctttcaaaagcggggctccatttctactgtcagatcaatgtggtgctgtaaccatctttttatccctaccttcaagaacctccttatatgaagcctgtctttatccatcagaaggtgtgtgaaatcatcacttccttctggttttatgtatttgtagactatgcagcttttcattaaactgcaagtatatacaagacagatctgaaattaggcctgagtgttccgatccaccactgtactagtaaataaaaatccacctaccttttatgtggaaaattatgtgctattgagtaacttttagctcttttttaaaaaatgggtgaaatttaagtgtcttttttatgagaatgacacatgaagagatctgagagcaatctcatgtagtcttccatgaacctgcaattgtttggtatgcgtcagcattttccaatttccaggttggatctagagctgctgttgatcactcaggcatactaatggattcatttagatgggtccaagctgcagtccatgagcaataacagactaccccagatactgcagtttacgcagtgcttagtaaatgagatttgtggaactaagttattagttacctgaggcttcttaagaaagtcttcttttttgaccagttgatgtgaaagagggagcatgtgacacagccagtatggtggagtgctagggttatcctgtttacaataaatcgcctgaatttcacctctggagtctgcatttgtattatttttccagttttagtgaaatagtacagtggccagtcctcagcctacctctcaacatcccagtttgaccagatttcttgctttcattgttcataatgcagaaagcagtgaattatattaacattttaaaagtgtttctgggtaacaatgatttttgtcaaatagaagactcaatttcacaaccttaagaatagatcacttttgtaaaacaagaatctcagtatttgatgttggactccttgctgtgagtattgtcactgactccaaacccagaaagatttgttcctgcccttacagggatgaaaataaaaaggatagaaaaaatatttctctcctctacaatgagtccttacatcttcttgccacatctccagctgcagtttaggcagatatcttgttcaatctctgtcttcttgatccctgtcaaaataatttttctactcatatagtggccagttggctcaggcaggcatttcaagaggaatctgcttgttcctcacttttccagcataggacagtggtccagcccgcacagtcagc

SEQ ID NO: 14458 - DNA, 772 bp, Homo sapiens
  source 1..772: mol_type = unassigned DNA
gaattcatcatcagaggaggaagagttcccagtcattgtcttcacttctccagaagtttccaaaaaaagacttacagcaaaatgaataatccagccatcaagagaataggaaatcacattaccaagtctcctgaagacaagcgagaatatcgagggctagagctggccaatggtatcaaagtacttcttatcagtgatcccaccacggataagtcatcagcagcacttgatgtgcacataggttcattgtcggatcctccaaatattgctggcttaagtcatttttgtgaacatatgctttttttgggaacaaagaaataccctaaagaaaatgaatacagccagtttctcagtgagcatgcaggaagttcaaatgcctttactagtggagagcataccaattactattttgatgtttctcatgaacacctagaaggtgccctagacaggtttgcacagttttttctgtgccccttgttcgatgaaagttgcaaagacagagaggtgaatgcagttgattcagaacatgagaagaatgtgatgaatgatgcctggagactctttcaattggaaaaagctacagggaatcctaaacaccccttcagtaaatttgggacaggtaacaaatatactctggagactagaccaaaccaagaaggcattgatgtaagacaagagctactgaaattccattctgcttactattcatccaacttaatggctgtttgtgttttaggtcgagaatctttagatgacttgactaatctggtgg

SEQ ID NO: 14459 - DNA, 740 bp, Homo sapiens
  source 1..740: mol_type = unassigned DNA
ccaccatggacccccgtctgcccgcctgggcgctggtgctgctgggccctgccctggtgttcgcgttgggccccgcgcccaccccagagatgcgtgagaagttgtgcggccaccacttcgtacgcgcgctagtgcgcgtgtgcgggggcccccgctggtccaccgaagccaggaggcctgcgaccggaggcgaccgtgagttgctacagtggctggagagacgacatctgctccatgggctggtggccgacagtaatctcacgctgggacctggcctgcagcccctgccccagacctctcaccatcaccgccaccaccgtgcagctgccaccaaccctgcacgctactgctgcctcagtggctgtacccaacaagacctgctgaccctctgtccctactgattcctccttgggtgcagcctcagagtggcctgaggcccagagggtctggtctggtgagctcctgaggccacacagcaccataaagtctcgcatctacaggcctttgattacctcctgggatgggtgctcactatctaccccagaccaatgccacctgcagcctgtggagtcaactgcagaataaatcacaccctagccctggcttggaggatccccgctttcacagatgctggacactgacagccaaatgtcctcactccaggggagccccagacgctccgctccctgcatgtgtaacaccccttcttgctgtctcttagtaaataaacgacccaaagc

SEQ ID NO: 14460 - DNA, 898 bp, Homo sapiens
  source 1..898: mol_type = unassigned DNA
cccccagctgggacggcccaggcgcctataaagggggtccccgcttggccccggcgccacccaccaccatggacccccgtctgcccgcctgggcgctggtgctgctgggccctgccctggtgttcgcgttgggccccgcgcccaccccagagatgcgtgagaagttgtgcggccaccacttcgtacgcgcgctagtgcgcgtgtgcgggggcccccgctggtccaccgaagccaggaggcctgcgaccggaggcgaccagagggagtctcactctgtttcccaggctggtctcaaactcctgagctcaagtaatcctcccaccttgaccttccaaagtgttgggattagcgatgtgagttgctacagtggctggagagacgacatctgctccatgggctggtggccgacagtaatctcacgctgggacctggcctgcagcccctgccccagacctctcaccatcaccgccaccaccgtgcagctgccaccaaccctgcacgctactgctgcctcagtggctgtacccaacaagacctgctgaccctctgtccctactgattcctccttgggtgcagcctcagagtggcctgaggcccagagggtctggtctggtgagctcctgaggccacacagcaccataaagtctcgcatctacaggcctttgattacctcctgggatgggtgctcactatctaccccagaccaatgccacctgcagcctgtggagtcaactgcagaataaatcacaccctagccctggcttggaggatccccgctttcacagatgctggacactgacagccaaatgtcctcactccaggggagccccagacgctccgctccctgcatgtgtaacaccccttcttgctgtctcttagtaaataaacgacccaaagc

SEQ ID NO: 14461 - DNA, 1952 bp, Homo sapiens
  source 1..1952: mol_type = unassigned DNA
agtctggagcccagaagggacacaccagcacagtctggtaggctacagcagcaagtctctaaagaaaggctgagaacacccagaacaggagagttcaggtccaggatggccagcctgttccggtcctatctgccagcaatctggctgctgctgagccaactccttagagaaagcctagcagcagagctgaggggatgtggtccccgatttggaaaacacttgctgtcatattgccccatgcctgagaagacattcaccaccaccccaggagggtggctgctggaatctggacgtcccaaagaaatggtgtcaacctccaacaacaaagatggacaagccttaggtacgacatcagaattcattcctaatttgtcaccagagctgaagaaaccactgtctgaagggcagccatcattgaagaaaataatactttcccgcaaaaagagaagtggacgtcacagatttgatccattctgttgtgaagtaatttgtgacgatggaacttcagttaaattatgtacatagtagagtaatcatggactggacatctcatccattctcatatgtattctcaatgacaaattcactgatgcccaattaaatgattgctgtttattagaacatgagaatcattattagtattcacatgtttcacttgctctgtactaatatagtctctccaaatggaggaagttagatagatggaataagttctagtagttgatagtacaatggggaaattatacttaacaataattcactgtatattccaaaatagctagaagagaattgtaatgattccaacacaaaaaagatgaatgttagtttggatgcatatcccaattaccctgatttgatcattacacattatatacacgtatcaaaatatcacatgtactacaaaaatgtgtataactgtaatatgtgaactacaaacttactggaaataaatttttaaagttttacacacataaacacatacgttcacacacactcactcaagtctcttcatttttcctcttttcacactagaagaaatgtaagagataaaggatctaaccatctctaacatcagctcatagtacggaggaaaagcagtgaaggaatgaactggtgggagaggtattaggcatgttcaccctagggtaaacccagagacctccctagaactttgcccaatgcatatcctccacctgcctctcagcacgctgcctttagaccttcaatcattctataaactcctcttttgtccctggcattactccacatcccctcatcaaagtggtgaattggcacaaatactggcattcctctggctacacatacctcctccctatgtgtctctaaatcctaaatcaaagagtacattttatactctgtcagtgaggttctactagttgtgtttgtttgtttgcaggctaactgaagctgctactacctcattatcaggtcctataaacttaattcaagtggcatgatttgagtagccccctgtgcctgcccataaagtgctctgaatctagtgtgggacatggagaagcaaaggataataagtgcaatgatacttgtaggtcatcatagagactgtaatgatccacaggaatcagggtcgtgtttaatgccaacatgtgaaagaataaatatacagggaacagtgtaggtaagaggagagagcaaaatttccctaaggaaactgatggctgatctgcatcttgaaagacatctaagcagaagagagtgcaaaaagggacaagtagaagcccaggaaaatgcacaaaggcctggaagcatagcatgtgtggaaacagccagagtcagcagggcaggaggtggtgtggagaaaaggaattgtcaagatctggttggaatggagacaggagagaggatctcaaacgattccacacaatgcagctatggggtttaggctgcatcctggagtaaggaagaactgc

SEQ ID NO: 14462 - DNA, 715 bp, Homo sapiens
  source 1..715: mol_type = unassigned DNA
ttaccatatcagattcacattcagtcctcagcaaaatgaagggctccattttcactctgtttttattctctgtcctatttgccatctcagaagtgcggagcaaggagtctgtgagactctgtgggctagaatacatacggacagtcatctatatctgtgctagctccaggtggagaaggcatcaggaggggatccctcaagctcagcaagctgagacaggaaactccttccagctcccacataaacgtgagttttctgaggaaaatccagcgcaaaaccttccgaaggtggatgcctcaggggaagaccgtctttggggtggacagatgcccactgaagagctttggaagtcaaagaagcattcagtgatgtcaagacaagatttacaaactttgtgttgcactgatggctgttccatgactgatttgagtgctctttgctaagacaagagcaaatacccaatgggtggcagagctttatcacatgtttaattacagtgttttactgcctggtagaacactaatattgtgttattaaaatgatggcttttgggtaggcaaaacttcttttctaaaaggtatagctgagcggttgaaaccacagtgatctctattttctccctttgccaaggttaatgaactgttcttttcaaattctactaatgctttgaaatttcaaatgctgcgcaaaattgcaataaaaatgctataaacca

SEQ ID NO: 14463 - DNA, 758 bp, Homo sapiens
  source 1..758: mol_type = unassigned DNA
agacagggagcagggtccggccgaccgccattgcacaacgcggaggactagcctggggtcacagggatgccgcggctcctccgcttgtccctgctgtggcttggactcctgctggttcggttttctcgtgaactgagcgacatcagcagtgccaggaagctgtgcggcaggtacttggtgaaagaaatagaaaaactctgcggccatgccaactggagccagttccgtttcgaggaggaaacccctttctcacggttgattgcacaggcctcggagaaggtcgaagcctacagcccataccagttcgaaagcccgcaaaccgcttccccggcccggggaagaggcacaaacccagtgtctacttcttgggaagaagcagtaaacagttgggaaatgcagtcactacctgagtataaggataaaaagggatattcaccccttggtaagacaagagaattttcttcatcacataatatcaatgtatatattcatgagaatgcaaaatttcagaagaaacgtagaaacaaaattaaaaccttaagcaatttgttttgggggcatcatccccaaagaaaacgcagaggatattcagaaaagtgttgtcttacaggatgtacaaaagaagaacttagcattgcatgtcttccatatattgattttaaaaggctaaaggaaaaaagatcatcacttgtaactaagatatactaaccatcttagaattttttctaacctaataaaagcttaatacatttatttaa

SEQ ID NO: 14464 - DNA, 8274 bp, Homo sapiens
  source 1..8274: mol_type = unassigned DNA
atttagaggcggcgccagggcggccgcggagaaacgtgacacaccagccctctcggaggggtttcggaccgaagggaagaagctgcgccgtgtcgtccgtctccctgcgcgccgcgggcacttctcctgggctctccccgaactctcccgcgacctctgcgcgccctcaggccgccttccccgccctgggctcgggacaacttctggggtggggtgcaaagaaagtttgcggctcctgccgccggcctctccgcctcttggcctaggaggctcgccgcccgcgcccgctcgttcggccttgcccgggaccgcgtcctgccccgagaccgccaccatgaacaagctttacatcggcaacctcaacgagagcgtgacccccgcggacttggagaaagtgtttgcggagcacaagatctcctacagcggccagttcttggtcaaatccggctacgccttcgtggactgcccggacgagcactgggcgatgaaggccatcgaaactttctccgggaaagtagaattacaaggaaaacgcttagagattgaacattcggtgcccaaaaaacaaaggagccggaaaattcaaatccgaaatattccaccccagctccgatgggaagtactggacagcctgctggctcagtatggtacagtagagaactgtgagcaagtgaacaccgagagtgagacggcagtggtgaatgtcacctattccaaccgggagcagaccaggcaagccatcatgaagctgaatggccaccagttggagaaccatgccctgaaggtctcctacatccccgatgagcagatagcacagggacctgagaatgggcgccgagggggctttggctctcggggtcagccccgccagggctcacctgtggcagcgggggccccagccaagcagcagcaagtggacatcccccttcggctcctggtgcccacccagtatgtgggtgccattattggcaaggagggggccaccatccgcaacatcacaaaacagacccagtccaagatagacgtgcataggaaggagaacgcaggtgcagctgaaaaagccatcagtgtgcactccacccctgagggctgctcctccgcttgtaagatgatcttggagattatgcataaagaggctaaggacaccaaaacggctgacgaggttcccctgaagatcctggcccataataactttgtagggcgtctcattggcaaggaaggacggaacctgaagaaggtagagcaagataccgagacaaaaatcaccatctcctcgttgcaagaccttaccctttacaaccctgagaggaccatcactgtgaagggggccatcgagaattgttgcagggccgagcaggaaataatgaagaaagttcgggaggcctatgagaatgatgtggctgccatgagcctgcagtctcacctgatccctggcctgaacctggctgctgtaggtcttttcccagcttcatccagcgcagtcccgccgcctcccagcagcgttactggggctgctccctatagctcctttatgcaggctcccgagcaggagatggtgcaggtgtttatccccgcccaggcagtgggcgccatcatcggcaagaaggggcagcacatcaaacagctctcccggtttgccagcgcctccatcaagattgcaccacccgaaacacctgactccaaagttcgtatggttatcatcactggaccgccagaggcccaattcaaggctcagggaagaatctatggcaaactcaaggaggagaacttctttggtcccaaggaggaagtgaagctggagacccacatacgtgtgccagcatcagcagctggccgggtcattggcaaaggtggaaaaacggtgaacgagttgcagaatttgacggcagctgaggtggtagtaccaagagaccagacccctgatgagaacgaccaggtcatcgtgaaaatcatcggacatttctatgccagtcagatggctcaacggaagatccgagacatcctggcccaggttaagcagcagcatcagaagggacagagtaaccaggcccaggcacggaggaagtgaccagcccctccctgtcccttcgagtccaggacaacaacgggcagaaatcgagagtgtgctctccccggcaggcctgagaatgagtgggaatccgggacacctgggccgggctgtagatcaggtttgcccacttgattgagaaagatgttccagtgaggaaccctgatctctcagccccaaacacccacccaattggcccaacactgtctgcccctcggggtgtcagaaattctagcgcaaggcacttttaaacgtggattgtttaaagaagctctccaggccccaccaagagggtggatcacacctcagtgggaagaaaaataaaatttccttcaggttttaaaaacatgcagagaggtgttttaatcagccttaaaggatggttcatttcttgaccttaatgtttttccaatcttcttccccctacttgggtaattgattaaaatacctccatttacggcctctttctatatttacactaatttttttatctttattgctaccagaaaaaaatgcgaacgaatgcattgctttgcttacagtattgactcaagggaaaagaactgtcagtatctgtagattaattccaatcactccctaaccaataggtacaatacggaatgaagaagaggggaaaatggggagaaagatggttaaaatacataataatccacgtttaaaaggagcgcacttgtggctgatctatgccagatcaccatcttcaaattggcacaactgaaatttccccactctgttggggcttccccaccacattcatgtccctctcccgtgtaggtttcacattatgtccaggtgcacataggtggtattgaatgctcagcagggtaggggctgaccactgtccctgattcccatcgttctcaggcggattttatatttttttaaagtctattttaatgattggatatgagcactgggaaggggacgctaactccccttgataaagtctcggttccatggaggacttgagtggccccaaaggctgccacggtgccctcaccccagcccatgtgctcccataagggctggttcctagaggcaggggttgtggggcactcccagccacggcactgttaccttggtggtgggacttggaacccaaccctgagctcccgataaagctaaagtccatcatctggcaaattcagtaaattggagagtacttgcttctgtttgtatctgagaggaatttttaactgacggcttctgtctccatgaatcattatcagcatgatgaaaggtgtgtctaaaaaacaattcagaataccagcagcattgtacagcaaggggtaaataagcttaatttattaatttaccaggcttaattaagatcccatggagtgtttagcccttgtgggagacagaagccatcagttaaatgaggttaggcctctcctcctaatatactgattgacaatgcatattagccaggtaatgcactttagctaccctggacaatgctatcaagtgtgctgggaagggaggaaggcctctctacatatggaaaagcccatgcgtggagttcccctcctttcaacattgcaacaacagtaacaacaagacaaccgcaacatgtgggcgtagtcaggcaatgctgtgtgcgaagtaaactacctcaaggtatgaagttacctcagcaattattttcctttttgttccccccaaccccattaaaaaaatttttttttgatttttgtttttttgcagcttgctgatattttatataaaaaagaaaagcaaagcaaaagagaagctgatagtcttgaatattttatttttttaatgaaaagaaaaaacaagaaagttatgtttcataatttcttacaacatgagccagtaaccctttaggaactctctatggagaacaggcctggtgggaaaggctttgggggctgcccccttaggaggaggctagtgctaagagggaaggcccaggtttgagagagcccagaggggcagagcccagagccttgtttggccctgatctctgacttctagagccccagctgctggcggctgctggaatatcctacctgataggattaaaaggcctagtggagctgggggctctcagtggttaaacaatgcccaacaaccaaccagctggcccttggtctcctctctttcctcctttggttaaagagcatctcagccagcttttcccaccagtggtgctgttgagatattttaaaatattgcctccgttttatcgaggagagaaataataactaaaaaatataccctttaaaaaaacctatatttctctgtctaaaaatatgggagctgagattccgttcgtggaaaaaagacaaggccaccctctcgccctcagagaggtccacctggtttgtcattgcaatgcttttcattttttttttttgttattgtttcatttcagttccgtcttgctattcttcctaatctatatccatagatctaaggggcaaacagatactagttaactgcccccacctctgtctccctgtcttctttagatcggtctgattgattttaaaagtggacccaaacttagggaattcttgatttagggtggctggtggcaaggaggggcaggggatatggggacgtgactgggacaggttcctgccttatcattttctccctaggacattcccttgtagcccccagaattgtctggcccaaattgaatagaagcagaaaaacatttagggataacatcaggccagtagaattaagcctctccacctgtcccaaccataaaaagggtctcccagctttccatctctggctctatatgctttatcccaaaacaaagcagataacgttcagacgtcggccatttagtaatttaaagcgaatttccagcagcaagcatgctttgatatctggttcagactatcatcaggaagaaaaaaaaatcccacagtacctgaaatgtgattgttgcagtgttcagtttccttgggggcctgctcccttcacaccttgagcccaagtccttttccgttggctgattcagctcccagaagagacgaggaagtgtgtggcaagggactggaaaacttcacttgcttggattaggcaaggctccactcattgttgatatttgcccagcaggaaaatcatgtaagttataccaccagaaagcaaaaggagcatggtttggtggttaaggtttagtgggatgaaggacctgtcttggtgggccgggccctcttgtgccccgtaggctaggtcttagggcaactccttgccctcctgctcagcacctccatttccccatccttggtgagataacaagctatcgcgaaaagcacttgggagatttggatgatttgagaagagtgacttaaaaaaaatgcttctgtgctctaagatatatatgtgtgtgtgtgtgctacatatatatttttaagaaaggaccatctctttaggatatatttttaaattctttgaaacacataaccaaaatggtttgattcactgactgactttgaagctgcatctgccagttacaccccaaatggctttaatcccctctcgggtctggttgccttttgcagtttgggttgtggactcagctcctgtgaggggtctggttaggagagagccatttttaaggacagggagttttatagcccttttctactttcctcccctcctcccagtccttatcaatcttttttcctttttcctgaccccctccttctggaggcagttgggagctatccttgtttatgcctcactattggcagaaaagaccccatttaaaacccagagaacactggagggggatgctctagttggttctgtgtccattttcctctgtgccaaagacagacagacagaggctgagagaggctgttcctgaatcaaagcaatagccagctttcgacacatacctggctgtctgaggaggaaggcctcctggaaactgggagctaagggcgaggcccttcccttcagaggctcctgggggattagggtgtggtgtttgccaagccaaggggtagggagccgagaaattggtctgtcggctcctggttgcactttggggaaggagaggaagtttggggctccaggtagctccctgttgtgggactgctctgtcccctgcccctactgcagagatagcactgccgagttcccttcaggcctggcagacgggcagtgaggaggggcctcagttagctctcaagggtgccttcccctcctcccaacccagacataccctctgccaaactgggaaccagcagtgctagtaactacctcacagagccccagagggcctgcttgagccttcttgctccacaggagaagctggtgcctctaggcaaccccttcctcccacctctcatcaggggtgggggttctcctttctttcccctgaagtgtttatggggagatcctagtggctttgccattcaaaccactcgactgtttgcctgtttcttgaaaaccagtagaagggaaacagcacagcctgtcacagtaattgcaggaagattgaagaaaaatcctcatcaatgccaggggacataaaagccatttcccttccaaatactcgacaatttagatgcagaacatttctctgtattcagacttagagtaacaccagctgaaaactgcagtttctttcctttggatacataaggcttctctatcggggtacgggacagggaggaggcctcatgtctgaagggggatttaggggcgagagccccagccctgaccctcggtcctgtgcaccgctttggggcacagtctgatggcgcctttgctggcgccttagtatggttgactccggatggacaaaagaaaaaaaattttttttcttgaatgaaatagcaggaagctcctcgggagcatgtgttttgattaaccgcaggtgatggatgctacgagtataaatggattaactacctcaatccttacagtaagattggaactaagggcagggactcatgcataagggtatgaatcccagccaggacaagtgagttgaggcttgtgccacaaaaggtttgtccttggggaacaggcaggcctgccaggatcccccccatatcgattgggctgggagggctggccatgaggtccccactttctgctttccttgcccatgtgtcacccctttggcctccagcttgtccctctctcactttctatagctttgttggaccagatggtgaggaaaggaatggcctcttcccttctagagggggctggctggagtgagacctggggcttggcctggaacccaccacacagccccaaagtcaggaagcctggggaaaccagagctgagacctcttcaacagggtttctttgagatcctacacctccattgggccctttttcagtcttcaatgggggcccagttggctctagaaggagaagaggtgaagcaggatcctttgccctgggggagtctgagggcgcggtccttggactcattcaggccgtctttgtagttgggggagttccactgggcgatcccagcccctccccacccaccctctaatggacctcctcatagaagccccatttcacttttgttttatctacctcttagcaaaacaatagataaattaggtagtggcagctccacttgcttaggttagggggggaaaaagatttctttttccaaaggaaaaaaatattaccttgagaatactttccaaaaaataaaattaaaaaaaaaaaaaccaaaaaaaaaaatttttttttaaaagggagacattttccagtgaccactggattgttttaatttcccaagcttttttttcccccataaataagtttcactctttggcgattttcttcacttgtttaagataacgtgctagctattccaacaggtaacagctttcacagtctgcccctggcctgtctcaccccatcccccaccctattcctgccagtgagtccttcctgtgcttctctcccttctcccctcccagccagctgacttcagtcacccctgtcccccctcccctgccaataagctcccccaggaataaaggctttgttttggggatgcttaaatcttgactggcacttcccggctgtgggggctggggagccacttgtaacatttctgtgcagattttatgttagccactgctatgtaaaagcacgttcaaaatgaatttcagcagattatgtgttaccataatgaataaacgtcctctatcaccatt

SEQ ID NO: 14465 - DNA, 1317 bp, Homo sapiens
  source 1..1317: mol_type = unassigned DNA
atgaacaagctttacatcggcaacctcaacgagagcgtgacccccgcggacttggagaaagtgtttgcggagcacaagatctcctacagcggccagttcttggtcaaatccggctacgccttcgtggactgcccggacgagcactgggcgatgaaggccatcgaaactttctccgggaaagtagaattacaaggaaaacgcttagagattgaacattcggtgcccaaaaaacaaaggagccggaaaattcaaatccgaaatattccaccccagctccgatgggaagtactggacagcctgctggctcagtatggtacagtagagaactgtgagcaagtgaacaccgagagtgagacggcagtggtgaatgtcacctattccaaccgggagcagaccaggcaggctgacgaggttcccctgaagatcctggcccataataactttgtagggcgtctcattggcaaggaaggacggaacctgaagaaggtagagcaagataccgagacaaaaatcaccatctcctcgttgcaagaccttaccctttacaaccctgagaggaccatcactgtgaagggggccatcgagaattgttgcagggccgagcaggaaataatgaagaaagttcgggaggcctatgagaatgatgtggctgccatgagcctgcagtctcacctgatccctggcctgaacctggctgctgtaggtcttttcccagcttcatccagcgcagtcccgccgcctcccagcagcgttactggggctgctccctatagctcctttatgcaggctcccgagcaggagatggtgcaggtgtttatccccgcccaggcagtgggcgccatcatcggcaagaaggggcagcacatcaaacagctctcccggtttgccagcgcctccatcaagattgcaccacccgaaacacctgactccaaagttcgtatggttatcatcactggaccgccagaggcccaattcaaggctcagggaagaatctatggcaaactcaaggaggagaacttctttggtcccaaggaggaagtgaagctggagacccacatacgtgtgccagcatcagcagctggccgggtcattggcaaaggtggaaaaacggtgaacgagttgcagaatttgacggcagctgaggtggtagtaccaagagaccagacccctgatgagaacgaccaggtcatcgtgaaaatcatcggacatttctatgccagtcagatggctcaacggaagatccgagacatcctggcccaggttaagcagcagcatcagaagggacagagtaaccaggcccaggcacggaggaagtga

SEQ ID NO: 14466 - DNA, 3291 bp, Homo sapiens
  source 1..3291: mol_type = unassigned DNA
cggaggaggcgaggagcgccgggtaccgggccgggggagccgcgggctctcggggaagagacggatgatgaacaagctttacatcgggaacctgagccccgccgtcaccgccgacgacctccggcagctctttggggacaggaagctgcccctggcgggacaggtcctgctgaagtccggctacgccttcgtggactaccccgaccagaactgggccatccgcgccatcgagaccctctcgggtaaagtggaattgcatgggaaaatcatggaagttgattactcagtctctaaaaagctaaggagcaggaaaattcagattcgaaacatccctcctcacctgcagtgggaggtgttggatggacttttggctcaatatgggacagtggagaatgtggaacaagtcaacacagacacagaaaccgccgttgtcaacgtcacatatgcaacaagagaagaagcaaaaatagccatggagaagctaagcgggcatcagtttgagaactactccttcaagatttcctacatcccggatgaagaggtgagctccccttcgccccctcagcgagcccagcgtggggaccactcttcccgggagcaaggccacgcccctgggggcacttctcaggccagacagattgatttcccgctgcggatcctggtccccacccagtttgttggtgccatcatcggaaaggagggcttgaccataaagaacatcactaagcagacccagtcccgggtagatatccatagaaaagagaactctggagctgcagagaagcctgtcaccatccatgccaccccagaggggacttctgaagcatgccgcatgattcttgaaatcatgcagaaagaggcagatgagaccaaactagccgaagagattcctctgaaaatcttggcacacaatggcttggttggaagactgattggaaaagaaggcagaaatttgaagaaaattgaacatgaaacagggaccaagataacaatctcatctttgcaggatttgagcatatacaacccggaaagaaccatcactgtgaagggcacagttgaggcctgtgccagtgctgagatagagattatgaagaagctgcgtgaggcctttgaaaatgatatgctggctgttaacacccactccggatacttctccagcctgtacccccatcaccagtttggcccgttcccgcatcatcactcttatccagagcaggagattgtgaatctcttcatcccaacccaggctgtgggcgccatcatcgggaagaagggggcacacatcaaacagctggcgagattcgccggagcctctatcaagattgcccctgcggaaggcccagacgtcagcgaaaggatggtcatcatcaccgggccaccggaagcccagttcaaggcccagggacggatctttgggaaactgaaagaggaaaacttctttaaccccaaagaagaagtgaagctggaagcgcatatcagagtgccctcttccacagctggccgggtgattggcaaaggtggcaagaccgtgaacgaactgcagaacttaaccagtgcagaagtcatcgtgcctcgtgaccaaacgccagatgaaaatgaggaagtgatcgtcagaattatcgggcacttctttgctagccagactgcacagcgcaagatcagggaaattgtacaacaggtgaagcagcaggagcagaaataccctcagggagtcgcctcacagcgcagcaagtgaggctcccacaggcaccagcaaaacaacggatgaatgtagcccttccaacacctgacagaatgagaccaaacgcagccagccagatcgggagcaaaccaaagaccatctgaggaatgagaagtctgcggaggcggccagggactctgccgaggccctgagaaccccaggggccgaggaggggcggggaaggtcagccaggtttgccagaaccaccgagccccgcctcccgccccccagggcttctgcaggcttcagccatccacttcaccatccactcggatctctcctgaactcccacgacgctatcccttttagttgaactaacataggtgaacgtgttcaaagccaagcaaaatgcacaccctttttctgtggcaaatcgtctctgtacatgtgtgtacatattagaaagggaagatgttaagatatgtggcctgtgggttacacagggtgcctgcagcggtaatatattttagaaataatatatcaaataactcaactaactccaatttttaatcaattattaatttttttttctttttaaagagaaagcaggcttttctagactttaaagaataaagtctttgggaggtctcacggtgtagagaggagctttgaggccacccgcacaaaattcacccagagggaaatctcgtcggaaggacactcacggcagttctggatcacctgtgtatgtcaacagaagggataccgtctccttgaagaggaaactctgtcactcctcatgcctgtctagctcatacacccatttctctttgcttcacaggttttaaactggttttttgcatactgctatataattctctgtctctctctgtttatctctcccctccctcccctccccttcttctccatctccattcttttgaatttcctcatccctccatctcaatcccgtatctacgcacccccccccccccaggcaaagcagtgctctgagtatcacatcacacaaaaggaacaaaagcgaaacacacaaaccagcctcaacttacacttggttactcaaaagaacaagagtcaatggtacttgtcctagcgttttggaagaggaaaacaggaacccaccaaaccaaccaatcaaccaaacaaagaaaaaattccacaatgaaagaatgtattttgtctttttgcattttggtgtataagccatcaatattcagcaaaatgattcctttctttaaaaaaaaaaaatgtggaggaaagtagaaatttaccaaggttgttggcccagggcgttaaattcacagatttttttaacgagaaaaacacacagaagaagctacctcaggtgtttttacctcagcaccttgctcttgtgtttcccttagagattttgtaaagctgatagttggagcatttttttatttttttaataaaaatgagttggaaaaaaaataagatatcaactgccagcctggagaaggtgacagtccaagtgtgcaacagctgttctgaattgtcttccgctagccaagaacctatatggccttcttttggacaaaccttgaaaatgtttatttaaaaaaaaaaaa

SEQ ID NO: 14467 - DNA, 3688 bp, Homo sapiens
  source 1..3688: mol_type = unassigned DNA
ggggggcggaggaggaggagagacgagggcagcggaggaggcgaggagcgccgggtaccgggccgggggagccgcgggctctcggggaagagacggatgatgaacaagctttacatcgggaacctgagccccgccgtcaccgccgacgacctccggcagctctttggggacaggaagctgcccctggcgggacaggtcctgctgaagtccggctacgccttcgtggactaccccgaccagaactgggccatccgcgccatcgagaccctctcgggtaaagtggaattgcatgggaaaatcatggaagttgattactcagtctctaaaaagctaaggagcaggaaaattcagattcgaaacatccctcctcacctgcagtgggaggtgttggatggacttttggctcaatatgggacagtggagaatgtggaacaagtcaacacagacacagaaaccgccgttgtcaacgtcacatatgcaacaagagaagaagcaaaaatagccatggagaagctaagcgggcatcagtttgagaactactccttcaagatttcctacatcccggatgaagaggtgagctccccttcgccccctcagcgagcccagcgtggggaccactcttcccgggagcaaggccacgcccctgggggcacttctcaggccagacagattgatttcccgctgcggatcctggtccccacccagtttgttggtgccatcatcggaaaggagggcttgaccataaagaacatcactaagcagacccagtcccgggtagatatccatagaaaagagaactctggagctgcagagaagcctgtcaccatccatgccaccccagaggggacttctgaagcatgccgcatgattcttgaaatcatgcagaaagaggcagatgagaccaaactagccgaagagattcctctgaaaatcttggcacacaatggcttggttggaagactgattggaaaagaaggcagaaatttgaagaaaattgaacatgaaacagggaccaagataacaatctcatctttgcaggatttgagcatatacaacccggaaagaaccatcactgtgaagggcacagttgaggcctgtgccagtgctgagatagagattatgaagaagctgcgtgaggcctttgaaaatgatatgctggctgttaaccaacaagccaatctgatcccagggttgaacctcagcgcacttggcatcttttcaacaggactgtccgtgctatctccaccagcagggccccgcggagctccccccgctgccccctaccaccccttcactacccactccggatacttctccagcctgtacccccatcaccagtttggcccgttcccgcatcatcactcttatccagagcaggagattgtgaatctcttcatcccaacccaggctgtgggcgccatcatcgggaagaagggggcacacatcaaacagctggcgagattcgccggagcctctatcaagattgcccctgcggaaggcccagacgtcagcgaaaggatggtcatcatcaccgggccaccggaagcccagttcaaggcccagggacggatctttgggaaactgaaagaggaaaacttctttaaccccaaagaagaagtgaagctggaagcgcatatcagagtgccctcttccacagctggccgggtgattggcaaaggtggcaagaccgtgaacgaactgcagaacttaaccagtgcagaagtcatcgtgcctcgtgaccaaacgccagatgaaaatgaggaagtgatcgtcagaattatcgggcacttctttgctagccagactgcacagcgcaagatcagggaaattgtacaacaggtgaagcagcaggagcagaaataccctcagggagtcgcctcacagcgcagcaagtgaggctcccacaggcaccagcaaaacaacggatgaatgtagcccttccaacacctgacagaatgagaccaaacgcagccagccagatcgggagcaaaccaaagaccatctgaggaatgagaagtctgcggaggcggccagggactctgccgaggccctgagaaccccaggggccgaggaggggcggggaaggtcagccaggtttgccagaaccaccgagccccgcctcccgccccccagggcttctgcaggcttcagccatccacttcaccatccactcggatctctcctgaactcccacgacgctatcccttttagttgaactaacataggtgaacgtgttcaaagccaagcaaaatgcacaccctttttctgtggcaaatcgtctctgtacatgtgtgtacatattagaaagggaagatgttaagatatgtggcctgtgggttacacagggtgcctgcagcggtaatatattttagaaataatatatcaaataactcaactaactccaatttttaatcaattattaatttttttttctttttaaagagaaagcaggcttttctagactttaaagaataaagtctttgggaggtctcacggtgtagagaggagctttgaggccacccgcacaaaattcacccagagggaaatctcgtcggaaggacactcacggcagttctggatcacctgtgtatgtcaacagaagggataccgtctccttgaagaggaaactctgtcactcctcatgcctgtctagctcatacacccatttctctttgcttcacaggttttaaactggttttttgcatactgctatataattctctgtctctctctgtttatctctcccctccctcccctccccttcttctccatctccattcttttgaatttcctcatccctccatctcaatcccgtatctacgcacccccccccccccaggcaaagcagtgctctgagtatcacatcacacaaaaggaacaaaagcgaaacacacaaaccagcctcaacttacacttggttactcaaaagaacaagagtcaatggtacttgtcctagcgttttggaagaggaaaacaggaacccaccaaaccaaccaatcaaccaaacaaagaaaaaattccacaatgaaagaatgtattttgtctttttgcattttggtgtataagccatcaatattcagcaaaatgattcctttctttaaaaaaaaaaaatgtggaggaaagtagaaatttaccaaggttgttggcccagggcgttaaattcacagatttttttaacgagaaaaacacacagaagaagctacctcaggtgtttttacctcagcaccttgctcttgtgtttcccttagagattttgtaaagctgatagttggagcatttttttatttttttaataaaaatgagttggaaaaaaaataagatatcaactgccagcctggagaaggtgacagtccaagtgtgcaacagctgttctgaattgtcttccgctagccaagaacctatatggccttcttttggacaaaccttgaaaatgtttatttaaaaaaaaaaaagatgacaaagaaaaacagagagagagaatattggagatgtcctgaattttaatagggtacgcgccattagggctttttgcgctaaaggatgaacatgtactggtttatgtggacaagccattataccaccagactgcaatgccagtttcctctactgcaaacagtgttctgtgacaaaaaaaaaaaaaaaaaaaagaaaaaaaaagaaaaaacagaaatatatccagctaacaaga

SEQ ID NO: 14468 - DNA, 3358 bp, Homo sapiens
  source 1..3358: mol_type = unassigned DNA
atgttctcatgtcctggacactaccacgttgatggctttctaaatccagggagcaggaaaattcagattcgaaacatccctcctcacctgcagtgggaggtgttggatggacttttggctcaatatgggacagtggagaatgtggaacaagtttttgccttttccctagtcaacacagacacagaaaccgccgttgtcaacgtcacatatgcaacaagagaagaagcaaaaatagccatggagaagctaagcgggcatcagtttgagaactactccttcaagatttcctacatcccggatgaagaggtgagctccccttcgccccctcagcgagcccagcgtggggaccactcttcccgggagcaaggccacgcccctgggggcacttctcaggccagacagattgatttcccgctgcggatcctggtccccacccagtttgttggtgccatcatcggaaaggagggcttgaccataaagaacatcactaagcagacccagtcccgggtagatatccatagaaaagagaactctggagctgcagagaagcctgtcaccatccatgccaccccagaggggacttctgaagcatgccgcatgattcttgaaatcatgcagaaagaggcagatgagaccaaactagccgaagagattcctctgaaaatcttggcacacaatggcttggttggaagactgattggaaaagaaggcagaaatttgaagaaaattgaacatgaaacagggaccaagataacaatctcatctttgcaggatttgagcatatacaacccggaaagaaccatcactgtgaagggcacagttgaggcctgtgccagtgctgagatagagattatgaagaagctgcgtgaggcctttgaaaatgatatgctggctgttaaccaacaagccaatctgatcccagggttgaacctcagcgcacttggcatcttttcaacaggactgtccgtgctatctccaccagcagggccccgcggagctccccccgctgccccctaccaccccttcactacccactccggatacttctccagcctgtacccccatcaccagtttggcccgttcccgcatcatcactcttatccagagcaggagattgtgaatctcttcatcccaacccaggctgtgggcgccatcatcgggaagaagggggcacacatcaaacagctggcgagattcgccggagcctctatcaagattgcccctgcggaaggcccagacgtcagcgaaaggatggtcatcatcaccgggccaccggaagcccagttcaaggcccagggacggatctttgggaaactgaaagaggaaaacttctttaaccccaaagaagaagtgaagctggaagcgcatatcagagtgccctcttccacagctggccgggtgattggcaaaggtggcaagaccgtgaacgaactgcagaacttaaccagtgcagaagtcatcgtgcctcgtgaccaaacgccagatgaaaatgaggaagtgatcgtcagaattatcgggcacttctttgctagccagactgcacagcgcaagatcagggaaattgtacaacaggtgaagcagcaggagcagaaataccctcagggagtcgcctcacagcgcagcaagtgaggctcccacaggcaccagcaaaacaacggatgaatgtagcccttccaacacctgacagaatgagaccaaacgcagccagccagatcgggagcaaaccaaagaccatctgaggaatgagaagtctgcggaggcggccagggactctgccgaggccctgagaaccccaggggccgaggaggggcggggaaggtcagccaggtttgccagaaccaccgagccccgcctcccgccccccagggcttctgcaggcttcagccatccacttcaccatccactcggatctctcctgaactcccacgacgctatcccttttagttgaactaacataggtgaacgtgttcaaagccaagcaaaatgcacaccctttttctgtggcaaatcgtctctgtacatgtgtgtacatattagaaagggaagatgttaagatatgtggcctgtgggttacacagggtgcctgcagcggtaatatattttagaaataatatatcaaataactcaactaactccaatttttaatcaattattaatttttttttctttttaaagagaaagcaggcttttctagactttaaagaataaagtctttgggaggtctcacggtgtagagaggagctttgaggccacccgcacaaaattcacccagagggaaatctcgtcggaaggacactcacggcagttctggatcacctgtgtatgtcaacagaagggataccgtctccttgaagaggaaactctgtcactcctcatgcctgtctagctcatacacccatttctctttgcttcacaggttttaaactggttttttgcatactgctatataattctctgtctctctctgtttatctctcccctccctcccctccccttcttctccatctccattcttttgaatttcctcatccctccatctcaatcccgtatctacgcacccccccccccccaggcaaagcagtgctctgagtatcacatcacacaaaaggaacaaaagcgaaacacacaaaccagcctcaacttacacttggttactcaaaagaacaagagtcaatggtacttgtcctagcgttttggaagaggaaaacaggaacccaccaaaccaaccaatcaaccaaacaaagaaaaaattccacaatgaaagaatgtattttgtctttttgcattttggtgtataagccatcaatattcagcaaaatgattcctttctttaaaaaaaaaaaatgtggaggaaagtagaaatttaccaaggttgttggcccagggcgttaaattcacagatttttttaacgagaaaaacacacagaagaagctacctcaggtgtttttacctcagcaccttgctcttgtgtttcccttagagattttgtaaagctgatagttggagcatttttttatttttttaataaaaatgagttggaaaaaaaataagatatcaactgccagcctggagaaggtgacagtccaagtgtgcaacagctgttctgaattgtcttccgctagccaagaacctatatggccttcttttggacaaaccttgaaaatgtttatttaaaaaaaaaaaagatgacaaagaaaaacagagagagagaatattggagatgtcctgaattttaatagggtacgcgccattagggctttttgcgctaaaggatgaacatgtactggtttatgtggacaagccattataccaccagactgcaatgccagtttcctctactgcaaacagtgttctgtg

SEQ ID NO: 14469 - DNA, 4250 bp, Homo sapiens
  source 1..4250: mol_type = unassigned DNA
ggccgaagccaaaggggttgggaaggaagagacaaaaagtagttttttcccctcctcctcctcctttctcttgctaatcccgcctcctcctaagacttaggaagactggtggatgcgtttgggttgtagctaggctttttcttttctttctcttttaaaacacatctagacaaggaaaaaacaagcctcggatctgatttttcactcctcgttcttgtgcttggttcttactgtgtttgtgtattttaaaggcgagaagacgaggggaacaaaaccagctggatccatccatcaccgtgggtggttttaatttttcgttttttctcgttatttttttttaaacaaccactcttcacaatgaacaaactgtatatcggaaacctcagcgagaacgccgccccctcggacctagaaagtatcttcaaggacgccaagatcccggtgtcgggacccttcctggtgaagactggctacgcgttcgtggactgcccggacgagagctgggccctcaaggccatcgaggcgctttcaggtaaaatagaactgcacgggaaacccatagaagttgagcactcggtcccaaaaaggcaaaggattcggaaacttcagatacgaaatatcccgcctcatttacagtgggaggtgctggatagtttactagtccagtatggagtggtggagagctgtgagcaagtgaacactgactcggaaactgcagttgtaaatgtaacctattccagtaaggaccaagctagacaagcactagacaaactgaatggatttcagttagagaatttcaccttgaaagtagcctatatccctgatgaaatggccgcccagcaaaaccccttgcagcagccccgaggtcgccgggggcttgggcagaggggctcctcaaggcaggggtctccaggatccgtatccaagcagaaaccatgtgatttgcctctgcgcctgctggttcccacccaatttgttggagccatcataggaaaagaaggtgccaccattcggaacatcaccaaacagacccagtctaaaatcgatgtccaccgtaaagaaaatgcgggggctgctgagaagtcgattactatcctctctactcctgaaggcacctctgcggcttgtaagtctattctggagattatgcataaggaagctcaagatataaaattcacagaagagatccccttgaagattttagctcataataactttgttggacgtcttattggtaaagaaggaagaaatcttaaaaaaattgagcaagacacagacactaaaatcacgatatctccattgcaggaattgacgctgtataatccagaacgcactattacagttaaaggcaatgttgagacatgtgccaaagctgaggaggagatcatgaagaaaatcagggagtcttatgaaaatgatattgcttctatgaatcttcaagcacatttaattcctggattaaatctgaacgccttgggtctgttcccacccacttcagggatgccacctcccacctcagggcccccttcagccatgactcctccctacccgcagtttgagcaatcagaaacggagactgttcatctgtttatcccagctctatcagtcggtgccatcatcggcaagcagggccagcacatcaagcagctttctcgctttgctggagcttcaattaagattgctccagcggaagcaccagatgctaaagtgaggatggtgattatcactggaccaccagaggctcagttcaaggctcagggaagaatttatggaaaaattaaagaagaaaactttgttagtcctaaagaagaggtgaaacttgaagctcatatcagagtgccatcctttgctgctggcagagttattggaaaaggaggcaaaacggtgaatgaacttcagaatttgtcaagtgcagaagttgttgtccctcgtgaccagacacctgatgagaatgaccaagtggttgtcaaaataactggtcacttctatgcttgccaggttgcccagagaaaaattcaggaaattctgactcaggtaaagcagcaccaacaacagaaggctctgcaaagtggaccacctcagtcaagacggaagtaaaggctcaggaaacagcccaccacagaggcagatgccaaaccaaagacagattgcttaaccaacagatgggcgctgaccccctatccagaatcacatgcacaagtttttacctagccagttgtttctgaggaccaggcaacttttgaactcctgtctctgtgagaatgtatactttatgctctctgaaatgtatgacacccagctttaaaacaaacaaacaaacaaacaaaaaaagggtgggggagggagggaaagagaagagctctgcacttccctttgttgtagtctcacagtataacagatattctaattcttcttaatattcccccataatgccagaaattggcttaatgatgctttcactaaattcatcaaatagattgctcctaaatccaattgttaaaattggatcagaataattatcacaggaacttaaatgttaagccattagcatagaaaaactgttctcagttttatttttacctaacactaacatgagtaacctaagggaagtgctgaatggtgttggcaggggtattaaacgtgcatttttactcaactacctcaggtattcagtaatacaatgaaaagcaaaattgttccttttttttgaaaattttatatactttataatgatagaagtccaaccgttttttaaaaaataaatttaaaatttaacagcaatcagctaacaggcaaattaagatttttacttctggctggtgacagtaaagctggaaaattaatttcagggttttttgaggcttttgacacagttattagttaaatcaaatgttcaaaaatacggagcagtgcctagtatctggagagcagcactaccatttattctttcatttatagttgggaaagtttttgacggtactaacaaagtggtcgcaggagattttggaacggctggtttaaatggcttcaggagacttcagttttttgtttagctacatgattgaatgcataataaatgctttgtgcttctgactatcaatacctaaagaaagtgcatcagtgaagagatgcaagactttcaactgactggcaaaaagcaagctttagcttgtcttataggatgcttagtttgccactacacttcagaccaatgggacagtcatagatggtgtgacagtgtttaaacgcaacaaaaggctacatttccatggggccagcactgtcatgagcctcactaagctattttgaagatttttaagcactgataaattaaaaaaaaaaaattagactccaccttaagtagtaaagtataacaggatttctgtatactgtgcaatcagttctttgaaaaaaaagtcaaaagatagagaatacaagaaaagtttttgggatataatttgaatgactgtgaaaacatatgacctttgataacgaactcatttgctcactccttgacagcaaagcccagtacgtacaattgtgttgggtgtgggtggtctccaaggccacgctgctctctgaattgattttttgagttttgtttgtaagatgatcacagtcatgttacactgatctaaaggacatatatataaccctttaaaaaaaaaatcactgcctcattcttatttcaagatgaatttctatacagactagatgtttttctgaagatcaattagacattttgaaaatgatttaaagtgttttccttaatgttctctgaaaacaagtttcttttgtagttttaaccaaaaaagtgccctttttgtcactggattctcctagcattcatgatttttttttcatacaatgaattaaaattgctaaaatcatggactggctttctggttggatttcaggtaagatgtgtttaaggccagagcttttctcagtatttgatttttttccccaatatttgattttttaaaaatatacacataggtgctgcatttatatctgctggtttaaattctgtcatatttcacttctagccttttagtatggcaaatcatattttacttttacttaagcatttgtaatttggagtatctggtactagctaagaaataattctataattgagttttgtactcaccatatatggatcattcctcatgtataatgtgccccaaatgcagcttcattttccagataccttgacgcagaataaattttttcatcatttaggtgca

SEQ ID NO: 14470 - DNA, 9091 bp, Homo sapiens
  source 1..9091: mol_type = unassigned DNA
cgagcccagtcgagccgcgctcacctcgggctcccgctccgtctccacctccgcctttgccctggcggcgcgaccccgtcccgggcgcggcccccagcagtcgcgcgccgttagcctcgcgcccgccgcgcagtccgggcccggcgcgatgggggccgccgccggccggagcccccacctggggcccgcgcccgcccgccgcccgcagcgctctctgctcctgctgcagctgctgctgctcgtcgctgccccggggtccacgcaggcccaggccgccccgttccccgagctgtgcagttatacatgggaagctgttgataccaaaaataatgtactttataaaatcaacatctgtggaagtgtggatattgtccagtgcgggccatcaagtgctgtttgtatgcacgacttgaagacacgcacttatcattcagtgggtgactctgttttgagaagtgcaaccagatctctcctggaattcaacacaacagtgagctgtgaccagcaaggcacaaatcacagagtccagagcagcattgccttcctgtgtgggaaaaccctgggaactcctgaatttgtaactgcaacagaatgtgtgcactactttgagtggaggaccactgcagcctgcaagaaagacatatttaaagcaaataaggaggtgccatgctatgtgtttgatgaagagttgaggaagcatgatctcaatcctctgatcaagcttagtggtgcctacttggtggatgactccgatccggacacttctctattcatcaatgtttgtagagacatagacacactacgagacccaggttcacagctgcgggcctgtccccccggcactgccgcctgcctggtaagaggacaccaggcgtttgatgttggccagccccgggacggactgaagctggtgcgcaaggacaggcttgtcctgagttacgtgagggaagaggcaggaaagctagacttttgtgatggtcacagccctgcggtgactattacatttgtttgcccgtcggagcggagagagggcaccattcccaaactcacagctaaatccaactgccgctatgaaattgagtggattactgagtatgcctgccacagagattacctggaaagtaaaacttgttctctgagcggcgagcagcaggatgtctccatagacctcacaccacttgcccagagcggaggttcatcctatatttcagatggaaaagaatatttgttttatttgaatgtctgtggagaaactgaaatacagttctgtaataaaaaacaagctgcagtttgccaagtgaaaaagagcgatacctctcaagtcaaagcagcaggaagataccacaatcagaccctccgatattcggatggagacctcaccttgatatattttggaggtgatgaatgcagctcagggtttcagcggatgagcgtcataaactttgagtgcaataaaaccgcaggtaacgatgggaaaggaactcctgtattcacaggggaggttgactgcacctacttcttcacatgggacacggaatacgcctgtgttaaggagaaggaagacctcctctgcggtgccaccgacgggaagaagcgctatgacctgtccgcgctggtccgccatgcagaaccagagcagaattgggaagctgtggatggcagtcagacggaaacagagaagaagcattttttcattaatatttgtcacagagtgctgcaggaaggcaaggcacgagggtgtcccgaggacgcggcagtgtgtgcagtggataaaaatggaagtaaaaatctgggaaaatttatttcctctcccatgaaagagaaaggaaacattcaactctcttattcagatggtgatgattgtggtcatggcaagaaaattaaaactaatatcacacttgtatgcaagccaggtgatctggaaagtgcaccagtgttgagaacttctggggaaggcggttgcttttatgagtttgagtggcacacagctgcggcctgtgtgctgtctaagacagaaggggagaactgcacggtctttgactcccaggcagggttttcttttgacttatcacctctcacaaagaaaaatggtgcctataaagttgagacaaagaagtatgacttttatataaatgtgtgtggcccggtgtctgtgagcccctgtcagccagactcaggagcctgccaggtggcaaaaagtgatgagaagacttggaacttgggtctgagtaatgcgaagctttcatattatgatgggatgatccaactgaactacagaggcggcacaccctataacaatgaaagacacacaccgagagctacgctcatcacctttctctgtgatcgagacgcgggagtgggcttccctgaatatcaggaagaggataactccacctacaacttccggtggtacaccagctatgcctgcccggaggagcccctggaatgcgtagtgaccgacccctccacgctggagcagtacgacctctccagtctggcaaaatctgaaggtggccttggaggaaactggtatgccatggacaactcaggggaacatgtcacgtggaggaaatactacattaacgtgtgtcggcctctgaatccagtgccgggctgcaaccgatatgcatcggcttgccagatgaagtatgaaaaagatcagggctccttcactgaagtggtttccatcagtaacttgggaatggcaaagaccggcccggtggttgaggacagcggcagcctccttctggaatacgtgaatgggtcggcctgcaccaccagcgatggcagacagaccacatataccacgaggatccatctcgtctgctccaggggcaggctgaacagccaccccatcttttctctcaactgggagtgtgtggtcagtttcctgtggaacacagaggctgcctgtcccattcagacaacgacggatacagaccaggcttgctctataagggatcccaacagtggatttgtgtttaatcttaatccgctaaacagttcgcaaggatataacgtctctggcattgggaagatttttatgtttaatgtctgcggcacaatgcctgtctgtgggaccatcctgggaaaacctgcttctggctgtgaggcagaaacccaaactgaagagctcaagaattggaagccagcaaggccagtcggaattgagaaaagcctccagctgtccacagagggcttcatcactctgacctacaaagggcctctctctgccaaaggtaccgctgatgcttttatcgtccgctttgtttgcaatgatgatgtttactcagggcccctcaaattcctgcatcaagatatcgactctgggcaagggatccgaaacacttactttgagtttgaaaccgcgttggcctgtgttccttctccagtggactgccaagtcaccgacctggctggaaatgagtacgacctgactggcctaagcacagtcaggaaaccttggacggctgttgacacctctgtcgatgggagaaagaggactttctatttgagcgtttgcaatcctctcccttacattcctggatgccagggcagcgcagtggggtcttgcttagtgtcagaaggcaatagctggaatctgggtgtggtgcagatgagtccccaagccgcggcgaatggatctttgagcatcatgtatgtcaacggtgacaagtgtgggaaccagcgcttctccaccaggatcacgtttgagtgtgctcagatatcgggctcaccagcatttcagcttcaggatggttgtgagtacgtgtttatctggagaactgtggaagcctgtcccgttgtcagagtggaaggggacaactgtgaggtgaaagacccaaggcatggcaacttgtatgacctgaagcccctgggcctcaacgacaccatcgtgagcgctggcgaatacacttattacttccgggtctgtgggaagctttcctcagacgtctgccccacaagtgacaagtccaaggtggtctcctcatgtcaggaaaagcgggaaccgcagggatttcacaaagtggcaggtctcctgactcagaagctaacttatgaaaatggcttgttaaaaatgaacttcacggggggggacacttgccataaggtttatcagcgctccacagccatcttcttctactgtgaccgcggcacccagcggccagtatttctaaaggagacttcagattgttcctacttgtttgagtggcgaacgcagtatgcctgcccacctttcgatctgactgaatgttcattcaaagatggggctggcaactccttcgacctctcgtccctgtcaaggtacagtgacaactgggaagccatcactgggacgggggacccggagcactacctcatcaatgtctgcaagtctctggccccgcaggctggcactgagccgtgccctccagaagcagccgcgtgtctgctgggtggctccaagcccgtgaacctcggcagggtaagggacggacctcagtggagagatggcataattgtcctgaaatacgttgatggcgacttatgtccagatgggattcggaaaaagtcaaccaccatccgattcacctgcagcgagagccaagtgaactccaggcccatgttcatcagcgccgtggaggactgtgagtacacctttgcctggcccacagccacagcctgtcccatgaagagcaacgagcatgatgactgccaggtcaccaacccaagcacaggacacctgtttgatctgagctccttaagtggcagggcgggattcacagctgcttacagcgagaaggggttggtttacatgagcatctgtggggagaatgaaaactgccctcctggcgtgggggcctgctttggacagaccaggattagcgtgggcaaggccaacaagaggctgagatacgtggaccaggtcctgcagctggtgtacaaggatgggtccccttgtccctccaaatccggcctgagctataagagtgtgatcagtttcgtgtgcaggcctgaggccaggccaaccaataggcccatgctcatctccctggacaagcagacatgcactctcttcttctcctggcacacgccgctggcctgcgagcaagcgaccgaatgttccgtgaggaatggaagctctattgttgacttgtctccccttattcatcgcactggtggttatgaggcttatgatgagagtgaggatgatgcctccgataccaaccctgatttctacatcaatatttgtcagccactaaatcccatgcacggagtgccctgtcctgccggagccgctgtgtgcaaagttcctattgatggtccccccatagatatcggccgggtagcaggaccaccaatactcaatccaatagcaaatgagatttacttgaattttgaaagcagtactccttgcttagcggacaagcatttcaactacacctcgctcatcgcgtttcactgtaagagaggtgtgagcatgggaacgcctaagctgttaaggaccagcgagtgcgactttgtgttcgaatgggagactcctgtcgtctgtcctgatgaagtgaggatggatggctgtaccctgacagatgagcagctcctctacagcttcaacttgtccagcctttccacgagcacctttaaggtgactcgcgactcgcgcacctacagcgttggggtgtgcacctttgcagtcgggccagaacaaggaggctgtaaggacggaggagtctgtctgctctcaggcaccaagggggcatcctttggacggctgcaatcaatgaaactggattacaggcaccaggatgaagcggtcgttttaagttacgtgaatggtgatcgttgccctccagaaaccgatgacggcgtcccctgtgtcttccccttcatattcaatgggaagagctacgaggagtgcatcatagagagcagggcgaagctgtggtgtagcacaactgcggactacgacagagaccacgagtggggcttctgcagacactcaaacagctaccggacatccagcatcatatttaagtgtgatgaagatgaggacattgggaggccacaagtcttcagtgaagtgcgtgggtgtgatgtgacatttgagtggaaaacaaaagttgtctgccctccaaagaagttggagtgcaaattcgtccagaaacacaaaacctacgacctgcggctgctctcctctctcaccgggtcctggtccctcgtccacaacggagtctcgtactatataaatctgtgccagaaaatatataaagggcccctgggctgctctgaaagggccagcatttgcagaaggaccacaactggtgacgtccaggtcctgggactcgttcacacgcagaagctgggtgtcataggtgacaaagttgttgtcacgtactccaaaggttatccgtgtggtggaaataagaccgcatcctccgtgatagaattgacctgtacaaagacggtgggcagacctgcattcaagaggtttgatatcgacagctgcacttactacttcagctgggactcccgggctgcctgcgccgtgaagcctcaggaggtgcagatggtgaatgggaccatcaccaaccctataaatggcaagagcttcagcctcggagatatttattttaagctgttcagagcctctggggacatgaggaccaatggggacaactacctgtatgagatccaactttcctccatcacaagctccagaaacccggcgtgctctggagccaacatatgccaggtgaagcccaacgatcagcacttcagtcggaaagttggaacctctgacaagaccaagtactaccttcaagacggcgatctcgatgtcgtgtttgcctcttcctctaagtgcggaaaggataagaccaagtctgtttcttccaccatcttcttccactgtgaccctctggtggaggacgggatccccgagttcagtcacgagactgccgactgccagtacctcttctcttggtacacctcagccgtgtgtcctctgggggtgggctttgacagcgagaatcccggggacgacgggcagatgcacaaggggctgtcagaacggagccaggcagtcggcgcggtgctcagcctgctgctggtggcgctcacctgctgcctgctggccctgttgctctacaagaaggagaggagggaaacagtgataagtaagctgaccacttgctgtaggagaagttccaacgtgtcctacaaatactcaaaggtgaataaggaagaagagacagatgagaatgaaacagagtggctgatggaagagatccagctgcctcctccacggcagggaaaggaagggcaggagaacggccatattaccaccaagtcagtgaaagccctcagctccctgcatggggatgaccaggacagtgaggatgaggttctgaccatcccagaggtgaaagttcactcgggcaggggagctggggcagagagctcccacccagtgagaaacgcacagagcaatgcccttcaggagcgtgaggacgatagggtggggctggtcaggggtgagaaggcgaggaaagggaagtccagctctgcacagcagaagacagtgagctccaccaagctggtgtccttccatgacgacagcgacgaggacctcttacacatctgactccgcagtgcctgcaggggagcacggagccgcgggacagccaagcacctccaaccaaataagacttccactcgatgatgcttctataattttgcctttaacagaaactttcaaaagggaagagtttttgtgatgggggagagggtgaaggaggtcaggccccactccttcctgattgtttacagtcattggaataaggcatggctcagatcggccacagggcggtaccttgtgcccagggttttgccccaagtcctcatttaaaagcataaggccggacgcatctcaaaacagagggctgcattcgaagaaacccttgctgctttagtcccgatagggtatttgaccccgatatattttagcattttaattctctccccctatttattgactttgacaattactcaggtttgagaaaaaggaaaaaaaaacagccaccgtttcttcctgccagcaggggtgtgatgtaccagtttgtccatcttgagatggtgaggctgtcagtgtatggggcagcttccggcgggatgttgaactggtcattaatgtgtcccctgagttggagctcattctgtctcttttctcttttgctttctgtttcttaagggcacacacacgtgcgtgcgagcacacacacacatacgtgcacagggtccccgagtgcctaggttttggagagtttgcctgttctatgcctttagtcaggaatggctgcacctttttgcatgatatcttcaagcctgggcgtacagagcacatttgtcagtatttttgccggctggtgaattcaaacaacctgcccaaagattgatttgtgtgtttgtgtgtgtgtgtgtgtgtgtgtgtgtgtgtgtgagtggagttgaggtgtcagagaaaatgaattttttccagatttggggtataggtctcatctcttcaggttctcatgataccacctttactgtgcttatttttttaagaaaaaagtgttgatcaaccattcgacctataagaagccttaatttgcacagtgtgtgacttacagaaactgcatgaaaaatcatgggccagagcctcggccctagcattgcacttggcctcatgctggagggaggctgggcgggtacagcgcggaggaggagggaggccaggcgggcatggcgtggaggaggagggaggccgggcggtcacagcatggaggaggagggaggcgctgctggtgttcttattctggcggcagcgcctttcctgccatgtttagtgaatgacttttctcgcattgtagaattgtatatagactctggtgttctattgctgagaagcaaaccgccctgcagcatccctcagcctgtaccggtttggctggcttgtttgatttcaacatgagtgtattttttaaaattgatttttctcttcatttttttttcaatcaactttactgtaatataaagtattcaacaatttcaataaaagataaattattaa

SEQ ID NO: 14471 - DNA, 1653 bp, Homo sapiens
  source 1..1653: mol_type = unassigned DNA
ttgggtgcactagcaaaacaaacttattttgaacactcagctcctagcgtgcggcgctgccaatcattaacctcctggtgcaagtggcgcggcctgtgccctttataaggtgcgcgctgtgtccagcgagcatcggccaccgccatcccatccagcgagcatctgccgccgcgccgccgccaccctcccagagagcactggccaccgctccaccatcacttgcccagagtttgggccaccgcccgccgccaccagcccagagagcatcggcccctgtctgctgctcgcgcctggagatgtcagaggtccccgttgctcgcgtctggctggtactgctcctgctgactgtccaggtcggcgtgacagccggcgctccgtggcagtgcgcgccctgctccgccgagaagctcgcgctctgcccgccggtgtccgcctcgtgctcggaggtcacccggtccgccggctgcggctgttgcccgatgtgcgccctgcctctgggcgccgcgtgcggcgtggcgactgcacgctgcgcccggggactcagttgccgcgcgctgccgggggagcagcaacctctgcacgccctcacccgcggccaaggcgcctgcgtgcaggagtctgacgcctccgctccccatgctgcagaggcagggagccctgaaagcccagagagcacggagataactgaggaggagctcctggataatttccatctgatggccccttctgaagaggatcattccatcctttgggacgccatcagtacctatgatggctcgaaggctctccatgtcaccaacatcaaaaaatggaaggagccctgccgaatagaactctacagagtcgtagagagtttagccaaggcacaggagacatcaggagaagaaatttccaaattttacctgccaaactgcaacaagaatggattttatcacagcagacagtgtgagacatccatggatggagaggcgggactctgctggtgcgtctacccttggaatgggaagaggatccctgggtctccagagatcaggggagaccccaactgccagatatattttaatgtacaaaactgaaaccagatgaaataatgttctgtcacgtgaaatatttaagtatatagtatatttatactctagaacatgcacatttatatatatatgtatatgtatatatatatagtaactactttttatactccatacataacttgatatagaaagctgtttatttattcactgtaagtttattttttctacacagtaaaaacttgtactatgttaataacttgtcctatgtcaatttgtatatcatgaaacacttctcatcatattgtatgtaagtaattgcatttctgctcttccaaagctcctgcgtctgtttttaaagagcatggaaaaatactgcctagaaaatgcaaaatgaaataagagagagtagtttttcagctagtttgaaggaggacggttaacttgtatattccaccattcacatttgatgtacatgtgtagggaaagttaaaagtgttgattacataatcaaagctacctgtggtgatgttgccacctgttaaaatgtacactggatatgttgttaaacacgtgtctataatggaaacatttacaataaatattctgcatggaaatactgtta

SEQ ID NO: 14472 - DNA, 2200 bp, Homo sapiens
  source 1..2200: mol_type = unassigned DNA
cccctgcccctcgccgcccgccgcctgcctgggccgggccgaggatgcggcgcagcgcctcggcggccaggcttgctcccctccggcacgcctgctaacttcccccgctacgtccccgttcgcccgccgggccgccccgtctccccgcgccctccgggtcgggtcctccaggagcgccaggcgctgccgccgtgtgccctccgccgctcgcccgcgcgcccgcgctccccgcctgcgcccagcgccccgcgcccgcgcccagtcctcgggcggtcatgctgcccctctgcctcgtggccgccctgctgctggccgccgggcccgggccgagcctgggcgacgaagccatccactgcccgccctgctccgaggagaagctggcgcgctgccgcccccccgtgggctgcgaggagctggtgcgagagccgggctgcggctgttgcgccacttgcgccctgggcttggggatgccctgcggggtgtacaccccccgttgcggctcgggcctgcgctgctacccgccccgaggggtggagaagcccctgcacacactgatgcacgggcaaggcgtgtgcatggagctggcggagatcgaggccatccaggaaagcctgcagccctctgacaaggacgagggtgaccaccccaacaacagcttcagcccctgtagcgcccatgaccgcaggtgcctgcagaagcacttcgccaaaattcgagaccggagcaccagtgggggcaagatgaaggtcaatggggcgccccgggaggatgcccggcctgtgccccagggctcctgccagagcgagctgcaccgggcgctggagcggctggccgcttcacagagccgcacccacgaggacctctacatcatccccatccccaactgcgaccgcaacggcaacttccaccccaagcagtgtcacccagctctggatgggcagcgtggcaagtgctggtgtgtggaccggaagacgggggtgaagcttccggggggcctggagccaaagggggagctggactgccaccagctggctgacagctttcgagagtgaggcctgccagcaggccagggactcagcgtcccctgctactcctgtgctctggaggctgcagagctgacccagagtggagtctgagtctgagtcctgtctctgcctgcggcccagaagtttccctcaaatgcgcgtgtgcacgtgtgcgtgtgcgtgcgtgtgtgtgtgtttgtgagcatgggtgtgcccttggggtaagccagagcctggggtgttctctttggtgttacacagcccaagaggactgagactggcacttagcccaagaggtctgagccctggtgtgtttccagatcgatcctggattcactcactcactcattccttcactcatccagccacctaaaaacatttactgaccatgtactacgtgccagctctagttttcagccttgggaggttttattctgacttcctctgattttggcatgtggagacactcctataaggagagttcaagcctgtgggagtagaaaaatctcattcccagagtcagaggagaagagacatgtaccttgaccatcgtccttcctctcaagctagccagagggtgggagcctaaggaagcgtggggtagcagatggagtaatggtcacgaggtccagacccactcccaaagctcagacttgccaggctccctttctcttcttccccaggtccttcctttaggtctggttgttgcaccatctgcttggttggctggcagctgagagccctgctgtgggagagcgaagggggtcaaaggaagacttgaagcacagagggctagggaggtggggtacatttctctgagcagtcagggtgggaagaaagaatgcaagagtggactgaatgtgcctaatggagaagacccacgtgctaggggatgaggggcttcctgggtcctgttccctaccccatttgtggtcacagccatgaagtcaccgggatgaacctatccttccagtggctcgctccctgtagctctgcctccctctccatatctccttcccctacacctccctccccacacctccctactcccctgggcatcttctggcttgactggatggaaggagacttaggaacctaccagttggccatgatgtcttttcttctttttcttttttttaacaaaacagaacaaaaccaaaaaatgtccagatgat

SEQ ID NO: 14473 - DNA, 1187 bp, Homo sapiens
  source 1..1187: mol_type = unassigned DNA
agccgctcagccccctgcccctcgccgcccgccgcctgcctgggccgggccgaggatgcggcgcagcgcctcggcggccaggcttgctcccctccggcacgcctgctaacttcccccgctacgtccccgttcgcccgccgggccgccccgtctccccgcgccctccgggtcgggtcctccaggagcgccaggcgctgccgccgcgtgtgcatggagctggcggagatcgaggccatccaggaaagcctgcagccctctgacaaggacgagggtgaccaccccaacaacagcttcagcccctgtagcgcccatgaccgcaggtgcctgcagaagcacttcgccaaaattcgagaccggagcaccagtgggggcaagatgaaggtcaatggggcgccccgggaggatgcccggcctgtgccccagggctcctgccagagcgagctgcaccgggcgctggagcggctggccgcttcacagagccgcacccacgaggacctctacatcatccccatccccaactgcgaccgcaacggcaacttccaccccaagcagtgtcacccagctctggatgggcagcgtggcaagtgctggtgtgtggaccggaagacgggggtgaagcttccggggggcctggagccaaagggggagctggactgccaccagctggctgacagctttcgagagtgaggcctgccagcaggccagggactcagcgtcccctgctactcctgtgctctggaggctgcagagctgacccagagtggagtctgagtctgagtcctgtctctgcctgcggcccagaagtttccctcaaatgcgcgtgtgcacgtgtgcgtgtgcgtgcgtgtgtgtgtgtttgtgagcatgggtgtgcccttggggtaagccagagcctggggtgttctctttggtgttacacagcccaagaggactgagactggcacttagcccaagaggtctgagccctggtgtgtttccagatcgatcctggattcactcactcactcattccttcactcatccagccacctaaaaacatttactgaccatgtactacgtgccagctctagttttcagccttgggaggttttattctgacttcctctgattttggcatgtggagacactcctataaggagagttcaagcctgtgggagtagaaaaatctcattcccagagtcagagga

SEQ ID NO: 14474 - DNA, 1427 bp, Homo sapiens
  source 1..1427: mol_type = unassigned DNA
actcgcgcccttgccgctgccaccgcaccccgccatggagcggccgtcgctgcgcgccctgctcctcggcgccgctgggctgctgctcctgctcctgcccctctcctcttcctcctcttcggacacctgcggcccctgcgagccggcctcctgcccgcccctgcccccgctgggctgcctgctgggcgagacccgcgacgcgtgcggctgctgccctatgtgcgcccgcggcgagggcgagccgtgcgggggtggcggcgccggcagggggtactgcgcgccgggcatggagtgcgtgaagagccgcaagaggcggaagggtaaagccggggcagcagccggcggtccgggtgtaagcggcgtgtgcgtgtgcaagagccgctacccggtgtgcggcagcgacggcaccacctacccgagcggctgccagctgcgcgccgccagccagagggccgagagccgcggggagaaggccatcacccaggtcagcaagggcacctgcgagcaaggtccttccatagtgacgccccccaaggacatctggaatgtcactggtgcccaggtgtacttgagctgtgaggtcatcggaatcccgacacctgtcctcatctggaacaaggtaaaaaggggtcactatggagttcaaaggacagaactcctgcctggtgaccgggacaacctggccattcagacccggggtggcccagaaaagcatgaagtaactggctgggtgctggtatctcctctaagtaaggaagatgctggagaatatgagtgccatgcatccaattcccaaggacaggcttcagcatcagcaaaaattacagtggttgatgccttacatgaaataccagtgaaaaaaggtgaaggtgccgagctataaacctccagaatattattagtctgcatggttaaaagtagtcatggataactacattacctgttcttgcctaataagtttcttttaatccaatccactaacactttagttatattcactggttttacacagagaaatacaaaataaagatcacacatcaagactatctacaaaaatttattatatatttacagaagaaaagcatgcatatcattaaacaaataaaatactttttatcacaacacagtacatatttgtcatttttaaaaagccacacaatagaaacaagacaccaagatatttaattatcttgttgactcctgtaaaatagctaaacactcatcattcgcggtgcaatactcatagacataagttcctgaaacaatagtttgcatgcgtaaggcattcgcaccaaagaaatctgaaaagaaaaaacaaatggtaattagcagaattgtattgaagtgaccccacttctctaccccagaaaaagacaaagatctggtactgtagataatgaataaatgagtggagctgagaacacaca

SEQ ID NO: 14475 - DNA, 1251 bp, Homo sapiens
  source 1..1251: mol_type = unassigned DNA
actcgcgcccttgccgctgccaccgcaccccgccatggagcggccgtcgctgcgcgccctgctcctcggcgccgctgggctgctgctcctgctcctgcccctctcctcttcctcctcttcggacacctgcggcccctgcgagccggcctcctgcccgcccctgcccccgctgggctgcctgctgggcgagacccgcgacgcgtgcggctgctgccctatgtgcgcccgcggcgagggcgagccgtgcgggggtggcggcgccggcagggggtactgcgcgccgggcatggagtgcgtgaagagccgcaagaggcggaagggtaaagccggggcagcagccggcggtccgggtgtaagcggcgtgtgcgtgtgcaagagccgctacccggtgtgcggcagcgacggcaccacctacccgagcggctgccagctgcgcgccgccagccagagggccgagagccgcggggagaaggccatcacccaggtcagcaagggcacctgcgagcaaggtccttccatagtgacgccccccaaggacatctggaatgtcactggtgcccaggtgtacttgagctgtgaggtcatcggaatcccgacacctgtcctcatctggaacaaggtaaaaaggggtcactatggagttcaaaggacagaactcctgcctggtgaccgggacaacctggccattcagacccggggtggcccagaaaagcatgaagtaactggctgggtgctggtatctcctctaagtaaggaagatgctggagaatatgagtgccatgcatccaattcccaaggacaggcttcagcatcagcaaaaattacagtggttgatgccttacatgaaataccagtgaaaaaaggtacacaataaatctcacagccatttaaaaatgactagtacatttgctttaaaaagaacagaactaagtatgaaagtatcagacgtagctattgatgaaattctgtagttagcaacccataagggcattaagtatgccattaaaatgtacagcatgagactccaaaagattatctggatgggtgactgaacatcgttattatgacttagatgcttttaccttatctaacatgtaagagtcaaaatcaaacttgcctggaatggcttctatttcccatagctttctacctatctacttggcattttccctttgtgttgtgactattaaattcctatttaaaagaaaatgattgtgggcaattctcgcccttcacttttgcttttaaaag

SEQ ID NO: 14476 - DNA, 2086 bp, Homo sapiens
  source 1..2086: mol_type = unassigned DNA
ggaaatccagagggcaggggtggccggcacagcagacgtaccctccctcgctgcctgcctgcagcctgccctgcatgcaggatggccctgaggaaaggaggcctggccctggcgctgctgctgctgtcctgggtggcactgggcccccgcagcctggagggagcagaccccggaacgccgggggaagccgagggcccagcgtgcccggccgcctgtgtctgcagctacgatgacgacgcggatgagctcagcgtcttctgcagctccaggaacctcacgcgcctgcctgatggagtcccgggcggcacccaagccctgtggctggacggcaacaacctctcgtccgtccccccggcagccttccagaacctctccagcctgggcttcctcaacctgcagggcggccagctgggcagcctggagccacaggcgctgctgggcctagagaacctgtgccacctgcacctggagcggaaccagctgcgcagcctggcactcggcacgtttgcacacacgcccgcgctggcctcgctcggcctcagcaacaaccgtctgagcaggctggaggacgggctcttcgagggcctcggcagcctctgggacctcaacctcggctggaatagcctggcggtgctccccgatgcggcgttccgcggcctgggcagcctgcgcgagctggtgctggcgggcaacaggctggcctacctgcagcccgcgctcttcagcggcctggccgagctccgggagctggacctgagcaggaacgcgctgcgggccatcaaggcaaacgtgttcgtgcagctgccccggctccagaaactctacctggaccgcaacctcatcgctgccgtggccccgggcgccttcctgggcctgaaggcgctgcgatggctggacctgtcccacaaccgcgtggctggcctcctggaggacacgttccccggtctgctgggcctgcgtgtgctgcggctgtcccacaacgccatcgccagcctgcggccccgcaccttcaaggacctgcacttcctggaggagctgcagctgggccacaaccgcatccggcagctggctgagcgcagctttgagggcctggggcagcttgaggtgctcacgctagaccacaaccagctccaggaggtcaaggcgggcgctttcctcggcctcaccaacgtggcggtcatgaacctctctgggaactgtctccggaaccttccggagcaggtgttccggggcctgggcaagctgcacagcctgcacctggagggcagctgcctgggacgcatccgcccgcacaccttcaccggcctctcggggctccgccgactcttcctcaaggacaacggcctcgtgggcattgaggagcagagcctgtgggggctggcggagctgctggagctcgacctgacctccaaccagctcacgcacctgccccaccgcctcttccagggcctgggcaagctggagtacctgctgctctcccgcaaccgcctggcagagctgccggcggacgccctgggccccctgcagcgggccttctggctggacgtctcgcacaaccgcctggaggcattgcccaacagcctcttggcaccactggggcggctgcgctacctcagcctcaggaacaactcactgcggaccttcacgccgcagcccccgggcctggagcgcctgtggctggagggtaacccctgggactgtggctgccctctcaaggcgctgcgggacttcgccctgcagaaccccagtgctgtgccccgcttcgtccaggccatctgtgagggggacgattgccagccgcccgcgtacacctacaacaacatcacctgtgccagcccgcccgaggtcgtggggctcgacctgcgggacctcagcgaggcccactttgctccctgctgaccaggtccccggactcaagccccggactcaggcccccacctggctcaccttgtgctggggacaggtcctcagtgtcctcaggggcctgcccagtgcacttgctggaagacgcaagggcctgatggggtggaaggcatggcggcccccccagctgtcatcaattaaaggcaaaggcaatcgaatctaa

SEQ ID NO: 14477 - DNA, 2198 bp, Homo sapiens
  source 1..2198: mol_type = unassigned DNA
ggaaatccagagggcaggggtggccggcacagcagacgtaccctccctcgctgcctgcctgcagcctgccctgcatgcaggatggccctgaggaaagcgggtgacctcgagcctcagttcacacctgagcgccgcttccggctgtgctggtatcaggctcactcgggcagagccctcctcgggccgcctccccaagcctctccccccgcaggaggcctggccctggcgctgctgctgctgtcctgggtggcactgggcccccgcagcctggagggagcagaccccggaacgccgggggaagccgagggcccagcgtgcccggccgcctgtgtctgcagctacgatgacgacgcggatgagctcagcgtcttctgcagctccaggaacctcacgcgcctgcctgatggagtcccgggcggcacccaagccctgtggctggacggcaacaacctctcgtccgtccccccggcagccttccagaacctctccagcctgggcttcctcaacctgcagggcggccagctgggcagcctggagccacaggcgctgctgggcctagagaacctgtgccacctgcacctggagcggaaccagctgcgcagcctggcactcggcacgtttgcacacacgcccgcgctggcctcgctcggcctcagcaacaaccgtctgagcaggctggaggacgggctcttcgagggcctcggcagcctctgggacctcaacctcggctggaatagcctggcggtgctccccgatgcggcgttccgcggcctgggcagcctgcgcgagctggtgctggcgggcaacaggctggcctacctgcagcccgcgctcttcagcggcctggccgagctccgggagctggacctgagcaggaacgcgctgcgggccatcaaggcaaacgtgttcgtgcagctgccccggctccagaaactctacctggaccgcaacctcatcgctgccgtggccccgggcgccttcctgggcctgaaggcgctgcgatggctggacctgtcccacaaccgcgtggctggcctcctggaggacacgttccccggtctgctgggcctgcgtgtgctgcggctgtcccacaacgccatcgccagcctgcggccccgcaccttcaaggacctgcacttcctggaggagctgcagctgggccacaaccgcatccggcagctggctgagcgcagctttgagggcctggggcagcttgaggtgctcacgctagaccacaaccagctccaggaggtcaaggcgggcgctttcctcggcctcaccaacgtggcggtcatgaacctctctgggaactgtctccggaaccttccggagcaggtgttccggggcctgggcaagctgcacagcctgcacctggagggcagctgcctgggacgcatccgcccgcacaccttcaccggcctctcggggctccgccgactcttcctcaaggacaacggcctcgtgggcattgaggagcagagcctgtgggggctggcggagctgctggagctcgacctgacctccaaccagctcacgcacctgccccaccgcctcttccagggcctgggcaagctggagtacctgctgctctcccgcaaccgcctggcagagctgccggcggacgccctgggccccctgcagcgggccttctggctggacgtctcgcacaaccgcctggaggcattgcccaacagcctcttggcaccactggggcggctgcgctacctcagcctcaggaacaactcactgcggaccttcacgccgcagcccccgggcctggagcgcctgtggctggagggtaacccctgggactgtggctgccctctcaaggcgctgcgggacttcgccctgcagaaccccagtgctgtgccccgcttcgtccaggccatctgtgagggggacgattgccagccgcccgcgtacacctacaacaacatcacctgtgccagcccgcccgaggtcgtggggctcgacctgcgggacctcagcgaggcccactttgctccctgctgaccaggtccccggactcaagccccggactcaggcccccacctggctcaccttgtgctggggacaggtcctcagtgtcctcaggggcctgcccagtgcacttgctggaagacgcaagggcctgatggggtggaaggcatggcggcccccccagctgtcatcaattaaaggcaaaggcaatcgaatct

SEQ ID NO: 14478 - DNA, 2826 bp, Homo sapiens
  source 1..2826: mol_type = unassigned DNA
gggcgcagagctgggccgagccgtcgccggcgccacgcgagtcccgcagccgccgcgcccgggcaatgggccgggggcactgagggccgccggggccgagcgcggaggggggaccgagccagtgccgtgccctcgggccgcgccaacatgccccgcggcttcctggtgaagcgcagcaagaagtccacgcccgtttcctaccgggtccgcggcggcgaggacggcgaccgcgcactgctgctctcgcccagctgcgggggcgcccgcgccgagcccccggcgccgagcccggtccccgggccgctgccgccgccgccgcccgcggagcgcgcccatgcagcgctcgccgccgcgcttgcctgcgcgcctgggccgcagccacccccgcagggcccgcgggccgcgcacttcggcaaccccgaggctgcgcaccccgcgccgctctacagtcccacgcggcccgtgagccgcgagcacgagaagcacaagtacttcgaacgcagcttcaacctgggctcgccggtctcggccgagtccttccccacgcccgccgcgctgctcggagggggcggcggcggcggcgcgagcggagctggcggaggcggcacctgcggcggcgacccgctgctcttcgcgcccgccgagctcaagatgggcacggcgttctcggctggcgccgaggcggcccgcggcccgggccccggccccccactgccccctgccgccgccctgcggcccccgggaaagcggcccccgccccctaccgccgcggagccgcccgccaaggcagtcaaggccccgggcgccaagaagcccaaggccatccgcaagctgcacttcgaggacgaggtgaccacgtcgcccgtgctggggctcaagatcaaggagggcccggtggaggcgccgcggggccgcgcggggggcgcggcgcggccgctgggcgagttcatctgccagctgtgcaaggaggagtacgccgacccgttcgcgctggcgcagcacaaatgctcgcgcatcgtgcgtgtggagtaccgctgtcccgagtgcgccaaggtcttcagctgcccggccaacctggcctcgcaccgccgctggcacaaaccgcggcccgcgcccgccgccgcccgcgcgccggagccagaagcagcagccagggctgaggcgcgggaggcacccggcggcggcagcgaccgggacacgccgagccccggcggcgtgtccgagtcgggctccgaggacgggctctacgagtgccatcactgcgccaagaagttccgccgccaggcctacctacgcaagcacctgctggcgcaccaccaggcgctgcaggccaagggcgcgccgctagcgcccccggccgaggacctactggccttgtaccccgggcccgacgagaaggcgccccaggaggcggccggcgacggcgagggggccggcgtgctgggcctgagtgcgtccgccgagtgccacctgtgcccagtgtgcggagagtcgttcgccagcaagggcgctcaggagcgccacctgcgcctgctgcacgccgcccaggtgttcccctgcaagtactgcccggccaccttctacagctcgcccggccttacgcggcacatcaacaagtgccacccatccgaaaacagacaggtgatcctcctgcaggtgcccgtgcgcccggcctgctagagcgcgccctccaccccggcccccgaactgtgccttcgcttggagacccacaaagagagtgcgccctgcactccccgaacccgagtccgcgctgggggagcctcgcccccgcccccaccgggtgaaagtgtcgtctccgcttctctcggtgtggcgtgacggtaaccccatactctccttttgactccttttggaacccccacttttacgttgtgtccctccgcctcccccatggcgcaacaggagtcagtctctttctgtacaagggagaaaagctgtacgcgtttgtctcgtggttggaagcctccccttggcggggagaagctttttttcttgctagtattcgctgtgttcatggtctagaaatgcggtctggtctcgcctcgcctaccaatctctgctctctatgtatgtagcgtacgggttgttttgggtgaatcttgaggaataaatgcctttatatttcacaggctgtaaattgaacttcccacacgattagctttattatggcttgtgaactgctggagtctggctttacctttttgtatgtgaacaaatcaaattgcttaaaaaagagttttctttagtatagccacaaatgccttgaactgttgtctgggattgttttgtggggggagggaagggagtgttccgaagatgctgtagtaactgcctcagtgtttcacgtaagactttttggtttgatcatctttgttgaggtaggactatcagttccctctaaatgtatatgttgatttatgagtaattgttatttattctttatttatttatattaattatgaagattatgatattatttgattgcagatttttttggcgcgctgccccctccccaccctgccactcttgacattccactgtgcgttttagaagagagcctttttctaaagggatctgcttaaagttttaacttttatacctatctgagtgaattacagacaacctatcatttattctgcttcgagggtccccagggcccttgtacaaccgacagctcttacttttaaatgcaatctcttttctacatacattattttcttaattgttagctatttatagaaagcttcaatagaactgtttcaactgtataactatttactattcaaataaaatattttcaaagtc

SEQ ID NO: 14479 - DNA, 3013 bp, Homo sapiens
  source 1..3013: mol_type = unassigned DNA
cgggagaaagccccgcccccggcgcccgctcccactcctgattggccgggccagcccggggaggcccggcgggaccccggcccgcgtctcagctataaagatagccccggcatgacagccgcggcgaagctcttctagttcatctgctggccggctctcagtccccgtggcgccccctttcctcttgtcccagagcgctctcgactccaccatgccaaggggattcctggtgaagcgaactaaacggacaggcggcttgtaccgagttcgccttgcggagcgtgtcttccctctgctggggccccagggggcgccgcccttcttggaggaggctcccagcgcctccttgcccggcgcggagcgggcgacaccccccacccgagaggaaccaggaaaggggttgacggcggaggcggcccgggaacagtcggggtcgccatgtcgggcggctggggtgagcccggggacgggcgggcgggaaggcgcggagtggcgggcgggtggcagggaaggtcccgggcccagccccagccccagccccagtccagcgaagccggcaggcgcagagctgcgtcgggcgttcctggagcgctgcctcagctcgcccgtctccgccgagtctttccccgggggcgccgccgccgtggccgctttctcctgctccgtggcgccagcagccgcaccgaccccgggggagcagtttctgctgccgcttcgggcgccgttcccagagcccgcgcttcagccggaccctgcgcccctctcggccgcccttcagagtctgaagcgggcggccggcggcgagcgccgcggcaaggcacccacggactgcgcgtctggacccgcggccgcgggaatcaagaagccaaaggccatgaggaagttgagctttgccgatgaggtgaccacatcccctgtcctgggcctgaagatcaaggaggaggagcccggagcgccgtcccggggcttggggggcagccgcacgccactgggggagttcatctgccagctgtgcaaggagcagtacgcagaccccttcgcgctggcccagcaccgctgctcccgcatcgtgcgcgtagagtaccgctgccctgagtgcgacaaggtgttcagctgtcctgcgaacctggcctcccatcgccgctggcataagccgcgtcctgcggctgcaaacgccgccacagtctcctccgccgacgggaagccgccttcttcgtcgtcttcgtcctcccgggactccggggccattgcatcttttctggcggagggaaaggagaacagccgaatagagcggactgcggatcagcacccgcaggccagggacagctccggggcggatcagcacccggacagcgccccgaggcagggcctccaggtgctgacgcatccagagccaccgctgcctcagggcccctacacggagggggtgttggggcgccgggtacctgtgccgggcagtaccagtggtggcaggggatccgagattttcgtgtgcccatattgccacaaaaagtttcgtcgccaagcctatctgcgcaagcacctgagcactcacgaggcgggctcggcccgtgcgctagcgccgggctttggctccgaacgcggtgccccacttgccttcgcttgcccattgtgcggagcgcacttccctacagcagatatcagggagaagcaccggctgtggcatgctgtccgcgaggagctgctcctgcccgctctggcgggggctcctcccgaaacgtcgggccctagcgggccatctgacgggagtgcccagcaaattttctcgtgcaagcactgcccgtccactttttttagctctccagggctgacccggcacatcaataagtgccacccctcagaaagccggcaagtgctgctgctgcagatgccactgcggcctggctgctgagggacgagagaccaggatgatttcgaggttggccttagaggaaacagatcatgggaatttctgtggggctttcttcaacttgcaagtttactttcattccttcctatgttttaatcccctaaaattctccctgtagtcaatgttccaccagaggagcggacagtgaaatgtaatatccctctctagagcaggtatgtatatggtataaaccttgagatcaaagactgtcagctttaaatccttctcactttccccactaaaataggatttttccccttaaaactctggagaccctaacgaatcctatatgatttgtaattcctatggaaagtcgcggtgaatgcgtgcatgtctcaatgtccacaaaggattctggctaccctttggtagccaatgttttttttgtcttgtcatcacaggcgcctatacagcttctgtctcaatagggtcagatattttgcactgtatattctgtgaattaaaagttatgtgattggtgtcaaacttaaggagattcaagacctggcagaaaatgtaagaggatttttgctgcttttggggtgcatggggatctcccctgtaaactttcctttgcccaattatatgtacatgtccattcttaagttggtgtttggaggtggggaggatgctactttactggagttgagacaccccctaaaattctcaccctcagctattttgtgggcagtattcaggaagagctacttcaaacctttctttaaatggctttttggaaatacagaagtcgtttcctcaagtttgactgttttaatggggtttcacccaaattgtttaatgcttctgctgtaaatgtcatactgtgtattcattatgaaaatatgtacagcttaaggaagatgttaacacctgtaatccactaaggaactgaatggcaatttgctcaatattcagtattttcttttcagcggcaacttgtttttgatttttttaaaaaaccatttcagtgtacattgtgtactaattccctactagccagtttgggacattggctgagcactgcctgacagaaagcccgtatttgtaagatgcttaccaccaaataaatgtacatagactgtg

SEQ ID NO: 14480 - DNA, 1641 bp, Homo sapiens
  source 1..1641: mol_type = unassigned DNA
ataagtatcccagacctcggcttgcagtagtgttagactgaagataaagtaagtgctgtttgggctaacaggatctcctcttgcagtctgcagcccaggacgctgattccagcagcgccttaccgcgcagcccgaagattcactatggtgaaaatcgccttcaatacccctaccgccgtgcaaaaggaggaggcgcggcaagacgtggaggccctcctgagccgcacggtcagaactcagatactgaccggcaaggagctccgagttgccacccaggaaaaagagggctcctctgggagatgtatgcttactctcttaggcctttcattcatcttggcaggacttattgttggtggagcctgcatttacaagtacttcatgcccaagagcaccatttaccgtggagagatgtgcttttttgattctgaggatcctgcaaattcccttcgtggaggagagcctaacttcctgcctgtgactgaggaggctgacattcgtgaggatgacaacattgcaatcattgatgtgcctgtccccagtttctctgatagtgaccctgcagcaattattcatgactttgaaaagggaatgactgcttacctggacttgttgctggggaactgctatctgatgcccctcaatacttctattgttatgcctccaaaaaatctggtagagctctttggcaaactggcgagtggcagatatctgcctcaaacttatgtggttcgagaagacctagttgctgtggaggaaattcgtgatgttagtaaccttggcatctttatttaccaactttgcaataacagaaagtccttccgccttcgtcgcagagacctcttgctgggtttcaacaaacgtgccattgataaatgctggaagattagacacttccccaacgaatttattgttgagaccaagatctgtcaagagtaagaggcaacagatagagtgtccttggtaataagaagtcagagatttacaatatgactttaacattaaggtttatgggatactcaagatatttactcatgcatttactctattgcttatgctttaaaaaaaggaaaaaaaaaaactactaaccactgcaagctcttgtcaaattttagtttaattggcattgcttgttttttgaaactgaaattacatgagtttcattttttctttgaatttatagggtttagatttctgaaagcagcatgaatatatcacctaacatcctgacaataaattccatccgttgttttttttgtttgtttgttttttcttttcctttaagtaagctctttattcatcttatggtggagcaattttaaaatttgaaatattttaaattgtttttgaactttttgtgtaaaatatatcagatctcaacattgttggtttcttttgtttttcattttgtacaactttcttgaatttagaaattacatctttgcagttctgttaggtgctctgtaattaacctgacttatatgtgaacaattttcatgagacagtcatttttaactaatgcagtgattctttctcactactatctgtattgtggaatgcacaaaattgtgtaggtgctgaatgctgtaaggagtttaggttgtatgaattctacaaccctataataaattttactctatacaa

SEQ ID NO: 14481 - DNA, 1698 bp, Homo sapiens
  source 1..1698: mol_type = unassigned DNA
gtgcaggtgaggcacgtttagcctgagccggccacggactccacttcccctgctcttcccccagtggcaaatccgcgccacctcgcaaacccccaactcaggcacttgggccccttttgggccccctctcgctcctccctttaggcacctccctgggcccgcccacggtctccccccagtttgggactgcgtcataagtatcccagacctcggcttgcagtagtgttagactgaagataaagtaagtgctgtttgggctaacaggatctcctcttgcagtctgcagcccaggacgctgattccagcagcgccttaccgcgcagcccgaagattcactatggtgaaaatcgccttcaatacccctaccgccgtgcaaaaggaggaggcgcggcaagacgtggaggccctcctgagccgcacggtcagaactcagatactgaccggcaagagcaccatttaccgtggagagatgtgcttttttgattctgaggatcctgcaaattcccttcgtggaggagagcctaacttcctgcctgtgactgaggaggctgacattcgtgaggatgacaacattgcaatcattgatgtgcctgtccccagtttctctgatagtgaccctgcagcaattattcatgactttgaaaagggaatgactgcttacctggacttgttgctggggaactgctatctgatgcccctcaatacttctattgttatgcctccaaaaaatctggtagagctctttggcaaactggcgagtggcagatatctgcctcaaacttatgtggttcgagaagacctagttgctgtggaggaaattcgtgatgttagtaaccttggcatctttatttaccaactttgcaataacagaaagtccttccgccttcgtcgcagagacctcttgctgggtttcaacaaacgtgccattgataaatgctggaagattagacacttccccaacgaatttattgttgagaccaagatctgtcaagagtaagaggcaacagatagagtgtccttggtaataagaagtcagagatttacaatatgactttaacattaaggtttatgggatactcaagatatttactcatgcatttactctattgcttatgctttaaaaaaaggaaaaaaaaaaactactaaccactgcaagctcttgtcaaattttagtttaattggcattgcttgttttttgaaactgaaattacatgagtttcattttttctttgaatttatagggtttagatttctgaaagcagcatgaatatatcacctaacatcctgacaataaattccatccgttgttttttttgtttgtttgttttttcttttcctttaagtaagctctttattcatcttatggtggagcaattttaaaatttgaaatattttaaattgtttttgaactttttgtgtaaaatatatcagatctcaacattgttggtttcttttgtttttcattttgtacaactttcttgaatttagaaattacatctttgcagttctgttaggtgctctgtaattaacctgacttatatgtgaacaattttcatgagacagtcatttttaactaatgcagtgattctttctcactactatctgtattgtggaatgcacaaaattgtgtaggtgctgaatgctgtaaggagtttaggttgtatgaattctacaaccctataataaattttactctat

SEQ ID NO: 14482 - DNA, 1876 bp, Homo sapiens
  source 1..1876: mol_type = unassigned DNA
agtctccgccctcgcgcgggagctgggaggctgcgagatccctaccgcagtagccgcctctgccgccgcggagcttcccgaacctcttcagccgcccggagccgctcccggagcccggccgtagaggctgcaatcgcagccgggagcccgcagcccgcgccccgagcccgccgccgcccttcgagggcgccccaggccgcgccatggtgaaggtgacgttcaactccgctctggcccagaaggaggccaagaaggacgagcccaagagcggcgaggaggcgctcatcatcccccccgacgccgtcgcggtggactgcaaggacccagatgatgtggtaccagttggccaaagaagagcctggtgttggtgcatgtgctttggactagcatttatgcttgcaggtgttattctaggaggagcatacttgtacaaatattttgcacttcaaccagatgacgtgtactactgtggaataaagtacatcaaagatgatgtcatcttaaatgagccctctgcagatgccccagctgctctctaccagacaattgaagaaaatattaaaatctttgaagaagaagaagttgaatttatcagtgtgcctgtcccagagtttgcagatagtgatcctgccaacattgttcatgactttaacaagaaacttacagcctatttagatcttaacctggataagtgctatgtgatccctctgaacacttccattgttatgccacccagaaacctactggagttacttattaacatcaaggctggaacctatttgcctcagtcctatctgattcatgagcacatggttattactgatcgcattgaaaacattgatcacctgggtttctttatttatcgactgtgtcatgacaaggaaacttacaaactgcaacgcagagaaactattaaaggtattcagaaacgtgaagccagcaattgtttcgcaattcggcattttgaaaacaaatttgccgtggaaactttaatttgttcttgaacagtcaagaaaaacattattgaggaaaattaatatcacagcataaccccaccctttacattttgtgcagtgattattttttaaagtcttctttcatgtaagtagcaaacagggctttactatcttttcatctcattaattcaattaaaaccattaccttaaaatttttttctttcgaagtgtggtgtcttttatatttgaattagtaactgtatgaagtcatagataatagtacatgtcaccttaggtagtaggaagaattacaatttctttaaatcatttatctggatttttatgttttattagcattttcaagaagacggattatctagagaataatcatatatatgcatacgtaaaaatggaccacagtgacttatttgtagttgttagttgccctgctacctagtttgttagtgcatttgagcacacattttaattttcctctaattaaaatgtgcagtattttcagtgtcaaatatatttaactatttagagaatgatttccacctttatgttttaatatcctaggcatctgctgtaataatattttagaaaatgtttggaatttaagaaataacttgtgttactaatttgtataacccatatctgtgcaatggaatataaatatcacaaagttgtttaactagactgcgtgttgtttttcccgtataataaaaccaaagaatagtttggttcttcaaatcttaagagaatccacataaaagaagaaactattttttaaaaattcacttctatatatacaatgagtaaaatcacagattttttctttaaataaaaataagtcattttaataactaaaccagattctttgtggatactattaaagtaacatttaagcctcaaccttg

SEQ ID NO: 14483 - DNA, 1888 bp, Homo sapiens
  source 1..1888: mol_type = unassigned DNA
ctgcaccggcagaggctgcggggcggacgcgcgggccggcgcagccatggtgaagattagcttccagcccgccgtggctggcatcaagggcgacaaggctgacaaggcgtcggcgtcggcccctgcgccggcctcggccaccgagatcctgctgacgccggctagggaggagcagcccccacaacatcgatccaagagggggggctcagtgggcggcgtgtgctacctgtcgatgggcatggtcgtgctgctcatgggcctcgtgttcgcctctgtctacatctacagatacttcttccttgcgcagctggcccgagataacttcttccgctgtggtgtgctgtatgaggactccctgtcctcccaggtccggactcagatggagctggaagaggatgtgaaaatctacctcgacgagaactacgagcgcatcaacgtgcctgtgccccagtttggcggcggtgaccctgcagacatcatccatgacttccagcggagggggacctacctgccgcagacgtacatcatccaggaggagatggtggtcacggagcatgtcagtgacaaggaggccctggggtccttcatctaccacctgtgcaacgggaaagacacctaccggctccggcgccgggcaacgcggaggcggatcaacaagcgtggggccaagaactgcaatgccatccgccacttcgagaacaccttcgtggtggagacgctcatctgcggggtggtgtgaggccctcctcccccagaaccccctgccgtgttcctcttttcttctttccggctgctctctggccctcctccttccccctgcttagcttgtactttggacgcgtttctatagaggtgacatgtctctccattcctctccaaccctgcccacctccctgtaccagagctgtgatctctcggtggggggcccatctctgctgacctgggtgtggcggagggagaggcgatgctgcaaagtgttttctgtgtcccactgtcttgaagctgggcctgccaaagcctgggcccacagctgcaccggcagcccaaggggaaggaccggttgggggagccgggcatgtgaggccctgggcaaggggatggggctgtgggggcggggcggcatgggcttcagaagtatctgcacaattagaaaagtcctcagaagctttttcttggagggtacactttcttcactgtccctattcctagacctggggcttgagctgaggatgggacgatgtgcccagggagggacccaccagagcacaagagaaggtggctacctgggggtgtcccagggactctgtcagtgccttcagcccaccagcaggagcttggagtttggggagtggggatgagtccgtcaagcacaactgttctctgagtggaaccaaagaagcaaggagctaggacccccagtcctgccccccaggagcacaagcagggtcccctcagtcaaggcagtgggatgggcggctgaggaacggggcaggcaaggtcactgctcagtcacgtccacgggggacgagccgtgggttctgctgagtaggtggagctcattgctttctccaagcttggaactgttttgaaagataacacagagggaaagggagagccacctggtacttgtccaccctgcctcctctgttctgaaattccatccccctcagcttaggggaatgcacctttttccctttccttctcacttttgcatgtttttactgatcattcgatatgctaaccgttctcagccctgagccttggagaggagggctgtaacgccttcagtcagtctctggggatgaaactcttaaatgctttgtatattttctcaattagatctcttttcagaagtgtctatagaacaataaaaatcttttacttctga

SEQ ID NO: 14484 - DNA, 2078 bp, Homo sapiens
  source 1..2078: mol_type = unassigned DNA
ggggttagagagagggacgcgagcgggatccaaacttccggtgcctgcagagctcggagcggcggaggcagagaccgaggctgcaccggcagaggctgcggggcggacgcgcgggccggcgcagccatggtgaagattagcttccagcccgccgtggctggcatcaagggcgacaaggctgacaaggcgtcggcgtcggcccctgcgccggcctcggccaccgagatcctgctgacgccggctagggaggagcagcccccacaacatcgatccaagagggggggctcagtgggcggcgtgtgctacctgtcgatgggcatggtcgtgctgctcatgggcctcgtgttcgcctctgtctacatctacagatacttcttccttgcgcagctggcccgagataacttcttccgctgtggtgtgctgtatgaggactccctgtcctcccaggtccggactcagatggagctggaagaggatgtgaaaatctacctcgacgagaactacgagcgcatcaacgtgcctgtgccccagtttggcggcggtgaccctgcagacatcatccatgacttccagcggggtctgactgcgtaccatgatatctccctggacaagtgctatgtcatcgaactcaacaccaccattgtgctgccccctcgcaacttctgggagctcctcatgaacgtgaagagggggacctacctgccgcagacgtacatcatccaggaggagatggtggtcacggagcatgtcagtgacaaggaggccctggggtccttcatctaccacctgtgcaacgggaaagacacctaccggctccggcgccgggcaacgcggaggcggatcaacaagcgtggggccaagaactgcaatgccatccgccacttcgagaacaccttcgtggtggagacgctcatctgcggggtggtgtgaggccctcctcccccagaaccccctgccgtgttcctcttttcttctttccggctgctctctggccctcctccttccccctgcttagcttgtactttggacgcgtttctatagaggtgacatgtctctccattcctctccaaccctgcccacctccctgtaccagagctgtgatctctcggtggggggcccatctctgctgacctgggtgtggcggagggagaggcgatgctgcaaagtgttttctgtgtcccactgtcttgaagctgggcctgccaaagcctgggcccacagctgcaccggcagcccaaggggaaggaccggttgggggagccgggcatgtgaggccctgggcaaggggatggggctgtgggggcggggcggcatgggcttcagaagtatctgcacaattagaaaagtcctcagaagctttttcttggagggtacactttcttcactgtccctattcctagacctggggcttgagctgaggatgggacgatgtgcccagggagggacccaccagagcacaagagaaggtggctacctgggggtgtcccagggactctgtcagtgccttcagcccaccagcaggagcttggagtttggggagtggggatgagtccgtcaagcacaactgttctctgagtggaaccaaagaagcaaggagctaggacccccagtcctgccccccaggagcacaagcagggtcccctcagtcaaggcagtgggatgggcggctgaggaacggggcaggcaaggtcactgctcagtcacgtccacgggggacgagccgtgggttctgctgagtaggtggagctcattgctttctccaagcttggaactgttttgaaagataacacagagggaaagggagagccacctggtacttgtccaccctgcctcctctgttctgaaattccatccccctcagcttaggggaatgcacctttttccctttccttctcacttttgcatgtttttactgatcattcgatatgctaaccgttctcagccctgagccttggagaggagggctgtaacgccttcagtcagtctctggggatgaaactcttaaatgctttgtatattttctcaattagatctcttttcagaagtgtctatagaacaataaaaatcttttacttctg

SEQ ID NO: 14485 - DNA, 1889 bp, Homo sapiens
  source 1..1889: mol_type = unassigned DNA
agagctcggagcggcggaggcagagaccgaggctgcaccggcagaggctgcggggcggacgcgcgggccggcgcagccatggtgaagattagcttccagcccgccgtggctggcatcaagggcgacaaggctgacaaggcgtcggcgtcggcccctgcgccggcctcggccaccgagatcctgctgacgccggctaggctggcccgagataacttcttccgctgtggtgtgctgtatgaggactccctgtcctcccaggtccggactcagatggagctggaagaggatgtgaaaatctacctcgacgagaactacgagcgcatcaacgtgcctgtgccccagtttggcggcggtgaccctgcagacatcatccatgacttccagcggggtctgactgcgtaccatgatatctccctggacaagtgctatgtcatcgaactcaacaccaccattgtgctgccccctcgcaacttctgggagctcctcatgaacgtgaagagggggacctacctgccgcagacgtacatcatccaggaggagatggtggtcacggagcatgtcagtgacaaggaggccctggggtccttcatctaccacctgtgcaacgggaaagacacctaccggctccggcgccgggcaacgcggaggcggatcaacaagcgtggggccaagaactgcaatgccatccgccacttcgagaacaccttcgtggtggagacgctcatctgcggggtggtgtgaggccctcctcccccagaaccccctgccgtgttcctcttttcttctttccggctgctctctggccctcctccttccccctgcttagcttgtactttggacgcgtttctatagaggtgacatgtctctccattcctctccaaccctgcccacctccctgtaccagagctgtgatctctcggtggggggcccatctctgctgacctgggtgtggcggagggagaggcgatgctgcaaagtgttttctgtgtcccactgtcttgaagctgggcctgccaaagcctgggcccacagctgcaccggcagcccaaggggaaggaccggttgggggagccgggcatgtgaggccctgggcaaggggatggggctgtgggggcggggcggcatgggcttcagaagtatctgcacaattagaaaagtcctcagaagctttttcttggagggtacactttcttcactgtccctattcctagacctggggcttgagctgaggatgggacgatgtgcccagggagggacccaccagagcacaagagaaggtggctacctgggggtgtcccagggactctgtcagtgccttcagcccaccagcaggagcttggagtttggggagtggggatgagtccgtcaagcacaactgttctctgagtggaaccaaagaagcaaggagctaggacccccagtcctgccccccaggagcacaagcagggtcccctcagtcaaggcagtgggatgggcggctgaggaacggggcaggcaaggtcactgctcagtcacgtccacgggggacgagccgtgggttctgctgagtaggtggagctcattgctttctccaagcttggaactgttttgaaagataacacagagggaaagggagagccacctggtacttgtccaccctgcctcctctgttctgaaattccatccccctcagcttaggggaatgcacctttttccctttccttctcacttttgcatgtttttactgatcattcgatatgctaaccgttctcagccctgagccttggagaggagggctgtaacgccttcagtcagtctctggggatgaaactcttaaatgctttgtatattttctcaattagatctcttttcagaagtgtctatagaacaataaaaatcttttacttctg

SEQ ID NO: 14486 - DNA, 763 bp, Homo sapiens
  source 1..763: mol_type = unassigned DNA
agggaatgcgaagggattatgctacggagaacggatccgagcgtgacggctgaatgaatgagtgagcgagtgagtgagtgagtgagtgagcgagcgagtgagtgactgtgcgagcgagcggcagaaggaactccgacccgccccagagctcggagcggcggaggcagagaccgaggctgcaccggcagaggctgcggggcggacgcgcgggccggcgcagccatggtgaagattagcttccagcccgccgtggctggcatcaagggcgacaaggctgacaaggcgtcggcgtcggcccctgcgccggcctcggccaccgagatcctgctgacgccggctagggaggagcagcccccacaacatcgatccaagagggggggctcagtgggcggcgtgtgctacctgtcgatgggcatggtcgtgctgctcatgggcctcgtgttcgcctctgtctacatctacagatacttcttccttgcgcagctggcccgagataacttcttccgctgtggtgtgctgtatgaggactccctgtcctcccaggtccggactcagatggagctggaagaggatgtgaaaatctacctcgacgagaactacgagcgcatcaacgtgcctgtgccccagtttggcggcggtgaccctgcagacatcatccatgacttccagcggggtctgactgcgtaccatgatatctccctggacaagtgctatgtcatcgaactcaacaccaccattgtgctgccccctcgcaacttctggg

SEQ ID NO: 14487 - DNA, 3388 bp, Homo sapiens
  source 1..3388: mol_type = unassigned DNA
cgcgcctgccggaagtgagcgtgagggcggctttcaccctagctccactgcttttttagcgtcggaagggcagccctagtgggagagagaaaaaggagccggcagcggctcttacgcgtcccggggctgcgcgccactctctcggccggtaacgcggtgctttgcggctgtcgtcaagcgcggcgttgggccggcgggcgggggctgaggggctgccatggcggcggcgggccggctcccgagctcctgggccctcttctcgccgctcctcgcagggcttgcactactgggagtcgggccggtcccagcgcgggcgctgcacaacgtcacggccgagctctttggggccgaggcctggggcacccttgcggctttcggggacctcaactccgacaagcagacggatctcttcgtgctgcgggaaagaaatgacttaatcgtctttttggcagaccagaatgcaccctattttaaacccaaagtaaaggtatctttcaagaatcacagtgcattgataacaagtgtagtccctggggattatgatggagattctcaaatggatgtccttctgacatatcttcccaaaaattatgccaagagtgaattaggagctgttatcttctggggacaaaatcaaacattagatcctaacaatatgaccatactcaataggacttttcaagatgagccactaattatggatttcaatggtgatctaattcctgatatttttggtatcacaaatgaatccaaccagccacagatactattaggagggaatttatcatggcatccagcattgaccactacaagtaaaatgcgaattccacattctcatgcatttattgatctgactgaagattttacagcagatttattcctgacgacattgaatgccaccactagtaccttccagtttgaaatatgggaaaatttggatggaaacttctctgtcagtactatattggaaaaacctcaaaatatgatggtggttggacagtcagcatttgcagactttgatggagatggacacatggatcatttactgccaggctgtgaagataaaaattgccaaaagagtaccatctacttagtgagatctgggatgaagcagtgggttccagtcctacaagatttcagcaataagggcacactctggggctttgtgccatttgtggatgaacagcaaccaactgaaataccaattccaattacccttcatattggagactacaatatggatggctatccagacgctctggtcatactaaagaacacatctggaagcaaccagcaggcctttttactggagaacgtcccttgtaataatgcaagctgtgaagaggcgcgtcgaatgtttaaagtctactgggagctgacagacctaaatcaaattaaggatgccatggttgccaccttctttgacatttacgaagatggaatcttggacattgtagtgctaagtaaaggatatacaaagaatgattttgccattcatacactaaaaaataactttgaagcagatgcttattttgttaaagttattgttcttagtggtctgtgttctaatgactgtcctcgtaagataacaccctttggagtgaatcaacctggaccttatatcatgtatacaactgtagatgcaaatgggtatctgaaaaatggatcagctggccaactcagccaatccgcacatttagctctccaactaccatacaacgtgcttggtttaggtcggagcgcaaattttcttgaccatctctacgttggtattccccgtccatctggagaaaaatctatacgaaaacaagagtggactgcaatcattccaaattcccagctaattgtcattccataccctcacaatgtccctcgaagttggagtgccaaactgtatcttacaccaagtaatattgttctgcttactgctatagctctcatcggtgtctgtgttttcatcttggcaataattggcattttacattggcaggaaaagaaagcagatgatagagaaaaacgacaagaagcccaccggtttcattttgatgctatgtgacttgcctttaatattacataatggaatggctgttcacttgattagttgaaacacaaattctggcttgaaaaaataggggagattaaatattatttataaatgatgtatcccatggtaattattggaaagtattcaaataaatatggtttgaatatgtcacaaggtctttttttttaaagcactttgtatataaaaatttgggttctctattctgtagtgctgtacatttttgttcctttgtggaatgtgttgcatgtactccagtgtttgtgtatttataatcttatttgcatcatgatgatggaaaaagttgtgtaaataaaaataattaaatgagcaggaatttttgtgtccacttgacttggtcttgcttcttattctaatgatgcaaattatacttttgtgaatatatcacggagtcattaggcattcagcttcatcacagcaggtcaggggtctcactgatggcatacaatatagtgatcgggtactctgacttggtagcacagtaagacagacttgccttaaactcctaattcaaccacttacaaagtcattgtttgaacttggctcttgtttaacctctgtaaacctcagttttcttgtttattcagtggggctaatacttgagttactgtaaacattaaatgggatgatgtatgtgaagtgcttagcttggtgcctagcacagagtaagtggtcaatatgtggtagttgtcattattaatattttagatgatcttattagacttatacatctaattatagaaatacatagacttgatagaattttattttcaggcatgaagaaatattctttggaaaagctaaatttttggtgattgacataaagatttacttgctcatattaactaaaaattatagtactctccaagaattaatgtgccctaaaaattttcctccaaaaacttatccttatcatgtgataatgaagaacatttgatttcttgaaaggaaactgctgtaggcagcatctgggaatgcaaatcttcaatcacatttctattctcaaacacttggagaagtctataatttacattcagacttcaatgcaaattttgtattgtgaacttcacatttccaaaaagttactttaaaaagactttaagactgaaaaaaaaaagtttatcaatgctaataattttctagtatgcaaatggacatgtgatgcctataaaacacaaaaatttctctgaaaacaattttgttcttatttttttctttatagttcactgagattggcatgtgtttttactttgtatctaagcatgttaacatgtcttcttaataaatattccttattgaaacaaa

SEQ ID NO: 14488 - DNA, 1451 bp, Homo sapiens
  source 1..1451: mol_type = unassigned DNA
gttgtttggaaagactcaggagctgctcggctggaaggcaatgactgaagtcatctgcatgttgggttccagtcctacaagatttcagcaataagggcacactctggggctttgtgccatttgtggatgaacagcaaccaactgaaataccaattccaattacccttcatattggagactacaatatggatggctatccagacgctctggtcatactaaagaacacatctggaagcaaccagcaggcctttttactggagaacgtcccttgtaataatgcaagctgtgaagaggcgcgtcgaatgtttaaagtctactgggagctgacagacctaaatcaaattaaggatgccatggttgccaccttctttgacatttacgaagatggaatcttggacattgtagtgctaagtaaaggatatacaaagaatgattttgccattcatacactaaaaaataactttgaagcagatgcttattttgttaaagttattgttcttagtggtctgtgttctaatgactgtcctcgtaagataacaccctttggagtgaatcaacctggaccttatatcatgtatacaactgtagatgcaaatgggtatctgaaaaatggatcagctggccaactcagccaatccgcacatttagctctccaactaccatacaacgtgcttggtttaggtcggagcgcaaattttcttgaccatctctacgttggtattccccgtccatctggagaaaaatctatacgaaaacaagagtggactgcaatcattccaaattcccagctaattgtcattccataccctcacaatgtccctcgaagttggagtgccaaactgtatcttacaccaagtaatattgttctgcttactgctatagctctcatcggtgtctgtgttttcatcttggcaataattggcattttacattggcaggaaaagaaagcagatgatagagaaaaacgacaagaagcccaccggtttcattttgatgctatgtgacttgcctttaatattacataatggaatggctgttcacttgattagttgaaacacaaattctggcttgaaaaaataggggagattaaatattatttataaatgatgtatcccatggtaattattggaaagtattcaaataaatatggtttgaatatgtcacaaggtctttttttttaaagcactttgtatataaaaatttgggttctctattctgtagtgctgtacatttttgttcctttgtggaatgtgttgcatgtactccagtgtttgtgtatttataatcttatttgcatcatgatgatggaaaaagttgtgtaaataaaaataattaaatgagcaggaatttttgtgtccacttgacttggtcttgcttcttattctaatgatgcaaattatacttttgtgaatatatcacggagtcattaggcattcagcttcatcacagca

SEQ ID NO: 14489 - DNA, 1464 bp, Homo sapiens
  source 1..1464: mol_type = unassigned DNA
aacaatgtatttgctctgagttgcagccgattaacttttcttcagaggcaaatgtagacttatctctccttctcctgaccacccaccacactatacttaagaaaatggaaagggatagatttattcctgacgacattgaatgccaccactagtaccttccagtttgaaatatgggaaaatttggatggaaacttctctgtcagtactatattggaaaaacctcaaaatatgatggtggttggacagtcagcatttgcagactttgatggagatggacacatggatcatttactgccaggctgtgaagataaaaattgccaaaagagtaccatctacttagtgagatctgggatgaagcagtgggttccagtcctacaagatttcagcaataagggcacactctggggctttgtgccatttgtggatgaacagcaaccaactgaaataccaattccaattacccttcatattggagactacaatatggatggctatccagacgctctggtcatactaaagaacacatctggaagcaaccagcaggcctttttactggagaacgtcccttgtaataatgcaagctgtgaagaggcgcgtcgaatgtttaaagtctactgggagctgacagacctaaatcaaattaaggatgccatggttgccaccttctttgacatttacgaagatggaatcttggacattgtagtgctaagtaaaggatatacaaagaatgattttgccattcatacactaaaaaataactttgaagcagatgcttattttgttaaagttattgttcttagtggtctgtgttctaatgactgtcctcgtaagataacaccctttggagtgaatcaacctggaccttatatcatgtatacaactgtagatgcaaatgggtatctgaaaaatggatcagctggccaactcagccaatccgcacatttagctctccaactaccatacaacgtgcttggtttaggtcggagcgcaaattttcttgaccatctctacgttggtattccccgtccatctggagaaaaatctatacgaaaacaagagtggactgcaatcattccaaattcccagctaattgtcattccataccctcacaatgtccctcgaagttggagtgccaaactgtatcttacaccaagtaatattgttctgcttactgctatagctctcatcggtgtctgtgttttcatcttggcaataattggcattttacattggcaggaaaagaaagcagatgatagagaaaaacgacaagaagcccaccggtttcattttgatgctatgtgacttgcctttaatattacataatggaatggctgttcacttgattagttgaaacacaaattctggcttgaaaaaataggggagattaaatattatttataaatgatgtatcccatggtaattattggaaagtattcaaataaatatggtttgaatatgtcacaa

SEQ ID NO: 14490 - DNA, 1799 bp, Homo sapiens
  source 1..1799: mol_type = unassigned DNA
ctagctccactgcttttttagcgtcggaagggcagccctagtgggagagagaaaaaggagccggcagcggctcttacgcgtcccggggctgcgcgccactctctcggccggaaatgacttaatcgtctttttggcagaccagaatgcaccctattttaaacccaaagtaaaggtatctttcaagaatcacagtgcattgataacaagtgtagtccctggggattatgatggagattctcaaatggatgtccttctgacatatcttcccaaaaattatgccaagagtgaattaggagctgttatcttctggggacaaaatcaaacattagatcctaacaatatgaccatactcaataggacttttcaagatgagccactaattatggatttcaatggtgatctaattcctgatatttttggtatcacaaatgaatccaaccagccacagatactattaggagggaatttatcatggcatccagcattgaccactacaagtaaaatgcgaattccacattctcatgcatttattgatctgactgaagattttacagcagatttattcctgacgacattgaatgccaccactagtaccttccagtttgaaatatgggaaaatttggatggaaacttctctgtcagtactatattggaaaaacctcaaaatatgatggtggttggacagtcagcatttgcagactttgatggagatggacacatggatcatttactgccaggctgtgaagataaaaattgccaaaagagtaccatctacttagtgagatctgggatgaagcagtgggttccagtcctacaagatttcagcaataagggcacactctggggctttgtgccatttgtggatgaacagcaaccaactgaaataccaattccaattacccttcatattggagactacaatatggatggctatccagacgctctggtcatactaaagaacacatctggaagcaaccagcaggcctttttactggagaacgtcccttgtaataatgcaagctgtgaagaggcgcgtcgaatgtttaaagtctactgggagctgacagacctaaatcaaattaaggatgccatggttgccaccttctttgacatttacgaagatggaatcttggacattgtagtgctaagtaaaggatatacaaagaatgattttgccattcatacactaaaaaataactttgaagcagatgcttattttgttaaagttattgttcttagtggtctgtgttctaatgactgtcctcgtaagataacaccctttggagtgaatcaacctggaccttatatcatgtatacaactgtagatgcaaatgggtatctgaaaaatggatcagctggccaactcagccaatccgcacatttagctctccaactaccatacaacgtgcttggtttaggtcggagcgcaaattttcttgaccatctctacgttggtattccccgtccatctggagaaaaatctatacgaaaacaagagtggactgcaatcattccaaattcccagctaattgtcattccataccctcacaatgtccctcgaagctctcatcggtgtctgtgttttcatcttggcaataattggcattttacattggcaggaaaagaaagcagatgatagagaaaaacgacaagaagcccaccggtttcattttgatgctatgtgacttgcctttaatattacataatggaatggctgttcacttgattagttgaaacacaaattctggcttgaaaaaataggggagattaaatattatttataaatgatgtatcccatg

SEQ ID NO: 14491 - DNA, 1296 bp, Homo sapiens
  source 1..1296: mol_type = unassigned DNA
ctaagaggtgttccccattcggcagccagactccttgaaataccctttcagtaatcattcaaccaacgcttccatgtctctactctgtcgtaacaaaggctgtgggcagcactttgaccctaataccaaccttcctgattcctgttgccatcaccctggggtcccaatcttccatgatgcacttaagggttggtcctgctgccgaaagcgaactgtagatttctctgagttcttaaacatcaagggctgtactatgggaccacactgtgctgagaagcttcctgaggcccctcaacctgaaggccctgctacaagcagttcacttcaggagcaaaaacctctgaatgtgattccaaagtcagcagagaccttgcgccgggagaggcccaagtcagagttgcctctgaagctgctgccgctaaatatatcccaagccctggaaatggcattggaacagaaggaattagaccaggaacctggggcaggacttgacagtctgatccggactggttccagctgccagaacccaggatgtgatgctgtttaccaaggccctgagagtgatgctactccatgtacctaccacccaggagcaccccgattccatgaggggatgaagtcttggagctgttgtggcatccagaccctggattttggggcattcttggcacaaccagggtgcagagtcggtagacatgactgggggaagcagctcccagcatcttgccgccatgattggcaccagacagattccttagtagtggtgactgtatatggccagattccacttcctgcgtttaactgggtgaaggccagtcaaactgagcttcatgtccacattgtctttgatggtaaccgtgtgttccaagcacagatgaagctctggggggtcataaacgtggagcagagctctgtcttcttgatgccatctcgggttgaaatctccctggtcaaggctgacccaggatcctgggcccagctggagcaccctgatgcactagctaagaaggctagggcaggggttgtgttagagatggatgaggaagaatctgacgattcagatgatgatctgagctggacagaggaggaggaagaggaggaagcaatgggggaatagtgacaccagacagttgatgtctagataggacctcaatgattcccttagaatcttagataccaggatattgttggccatgtggcatcattgagcagcaggaggctgaaggaggggagaacaaaattgtccaaaccatgctgtttttttcccttaaataaatcttgtattcttcagtttca

SEQ ID NO: 14492 - DNA, 1439 bp, Homo sapiens
  source 1..1439: mol_type = unassigned DNA
atcattcaaccaacgcttccatgtctctactctgtcgtaacaaaggctgtgggcagcactttgaccctaataccaaccttcctggtgagtaaagaatcctgacctggccaggggctctgtgtgggtgttggggactggtcagctggggggcagtgtgtttgaggagcggggaaagaaactacctgccctagtttaattggtctgagtgatcttacagcctttgctggcttttttttttttcttcacattatatgggaagaaaccataaatagaaacccggggaagaggtgaaaaatgatacttggtatagttatcttcccttccttgataacttctactgatgtccacagattcctgttgccatcaccctggggtcccaatcttccatgatgcacttaagggttggtcctgctgccgaaagcgaactgtagatttctctgagttcttaaacatcaagggctgtactatgggaccacactgtgctgagaagcttcctgaggcccctcaacctgaaggccctgctacaagcagttcacttcaggagcaaaaacctctgaatgtgattccaaagtcagcagagaccttgcgccgggagaggcccaagtcagagttgcctctgaagctgctgccgctaaatatatcccaagccctggaaatggcattggaacagaaggaattagaccaggaacctggggcaggacttgacagtctgatccggactggttccagctgccagaacccaggatgtgatgctgtttaccaaggccctgagagtgatgctactccatgtacctaccacccaggagcaccccgattccatgaggggatgaagtcttggagctgttgtggcatccagaccctggattttggggcattcttggcacaaccagggtgcagagtcggtagacatgactgggggaagcagctcccagcatcttgccgccatgattggcaccagacagattccttagtagtggtgactgtatatggccagattccacttcctgcgtttaactgggtgaaggccagtcaaactgagcttcatgtccacattgtctttgatggtaaccgtgtgttccaagcacagatgaagctctggggggtcataaacgtggagcagagctctgtcttcttgatgccatctcgggttgaaatctccctggtcaaggctgacccaggatcctgggcccagctggagcaccctgatgcactagctaagaaggctagggcaggggttgtgttagagatggatgaggaagaatctgacgattcagatgatgatctgagctggacagaggaggaggaagaggaggaagcaatgggggaatagtgacaccagacagttgatgtctagataggacctcaatgattcccttagaatcttagataccaggatattgttggccatgtggcatcattgagcagcaggaggctgaagg

SEQ ID NO: 14493 - DNA, 1963 bp, Homo sapiens
  source 1..1963: mol_type = unassigned DNA
gtcaggactgcgcctgcgcatagtcttggaggcgcggcccggcggacgtgggcaggagggctggaaaagccggcgctggagcgggaacgggagtagctgcctgggcgccaaaggccgcggcactcccacgcggaccccgaagtccgcaacccggggatgggcccgcggctgcgaggggatcttctctggatcaagcaatggtggtgaaaaatgtttcgcaagggcaaaaaacgacacagtagtagcagttcccaaagtagcgaaatcagtactaagagcaagtctgtggattctagccttgggggtctttcacgatccagcactgtggccagcctcgacacagattccaccaaaagctcaggacaaagcaacaataattcagatacctgtgcagaatttcgaataaaatatgttggtgccattgagaaactgaaactctccgagggaaaaggccttgaagggccattagacctgataaattatatagacgttgcccagcaagatggaaagttgccttttgttcctccggaggaagaatttattatgggagtttccaagtatggcataaaagtatcaacatcagatcaatatgatgttttgcacaggcatgctctctacttaataatccggatggtgtgttacgatgacggtctgggggcgggaaaaagcttactggctctgaagaccacagatgcaagcaatgaggaatacagcctgtgggtttatcagtgcaacagcctggaacaagcacaagccatttgcaaggttttatccaccgcttttgactctgtattaacatctgagaaaccctgaatcctgcaatcaagtagaagtcaacttcatctgaaagttcagctgttttcaaactgcaatgctgaaatgttatgcaaataatgaagttatcccttgctctagattttctgaagaaaatggattgtgtaaaatgctgatcatttgtttattaaaatgtgtcctattacacagtgagttaactctcaatgaagtcatctattttctgggctaaaaaacttcatttgtctttttcaacttctaataagcttaacctaagtgtcacagaagcctaggtgtcacagaggtccactcagtgacaaacacacactgaaggcctgaggaagacgagatgtcacagaggtccactcagtgacaaacacacactgaaggcctgaggaagactagatgtcacagaggtccactcagtgacaaacacacactgaaggcctgaggaagacgagatgtcacagaggtccactcagtgacaaacacacactgaaggcctgaggaagactagatgtcacagaggtccactcagtgacaaacacacactgaaggcctgaggaagacgagatgtcacagaggtccactcagtgacaaacacacactgaaggcctgaggaagacgagatgtcacagaggtccactcagtgacaaacacacactgaaggcctgaggaagactagatgtcacagaggtccactcagtgacaaacacacactgaaggcctgaggaagacgagatgtcacagaggtccactcagtgacaaacacacactgaaggcctgaggaagacgagatgtcacagaggtccactcagtgacacacactgaaggcctgaggaagactgaggacatgggctcagtggtggcttcccagtcatggtatcactggcatggacctctgtccggcagaggtgtggactggagaccaggattcatgctggtctggaacagtgacattgccaacttaagacacacaaagcagattttcagaagtgtctggtcaagataacatgctggccaaccacaattcctagagttaagagaaccttaaaagattaccgctcatgctaaaagtatgtaaagatcccatgtacagtatgatagtgtactttttttaaaggactgtcaatatacaaaactttaaagattaaaaacattaaaaataaaa

SEQ ID NO: 14494 - DNA, 4859 bp, Homo sapiens
  source 1..4859: mol_type = unassigned DNA
ttccgggcggggccgcgctcccggggcgcgggtggaggagcttggaaccacgcagatcgggcgtgggcttgcggactgcagcttcccgagccgctgtcgccccggaggggcggcaaggcgggcggccgcgggccgtttccttgcctcttcctctgccccgcttcggccgcctcccgcctctcagggtcggggttgtctgtccccttcgctgtcacatcctccgcacccagcgcttggaaggtgctccatcacggtgacagacaggtgccaagcaggctggcgtctgggaggaacttcggagccggctctccctaggccccgagcttggccgcatccgtccttactctggtgaccctgggcaggtcactgactcttcgggcgctttggcatcctcgtttgaaaggggctgttatcctgcagccttgctggtcggtgagggtgagggtgagagggatctgtgcacctagcaccgtgcatggcacgtggtaggcgtttggtacatgggaatcgctgttggggtgtcacctccccagaaagttctcggcttcagtaagcgcgtcccctgccaggcgccctggcaatgcagaggagtcaccgagctccgcctttgaccagcgtgcagctgggagagtgagatcagagaccacagcagatcgtggcgctgtgatcagggggtacactcaagctgtgggtcccttaccccagccttgagatcccaggaaggcctgcagcctgaaacgggccttgaaaggtgcgtagtttctctgaaaagcatcacccaggtcagaatgaaaggaaactctctgtgcagaccgctgtatgtgggacctttgaagacagtcaaatagtgttcaattctatagggatcttctctggatcaagcaatggtggtgaaaaatgtttcgcaagggcaaaaaacgacacagtagtagcagttcccaaagtagcgaaatcagtactaagagcaagtctgtggattctagccttgggggtctttcacgatccagcactgtggccagcctcgacacagattccaccaaaagctcaggacaaagcaacaataattcagatacctgtgcagaatttcgaataaaatatgttggtgccattgagaaactgaaactctccgagggaaaaggccttgaagggccattagacctgataaattatatagacgttgcccagcaagatggaaagttgccttttgttcctccggaggaagaatttattatgggagtttccaagtatggcataaaagtatcaacatcagatcaatatgatgttttgcacaggcatgctctctacttaataatccggatggtgtgttacgatgacggtctgggggcgggaaaaagcttactggctctgaagaccacagatgcaagcaatgaggaatacagcctgtgggtttatcagtgcaacagcctggaacaagcacaagccatttgcaaggttttatccaccgcttttgactctgtattaacatctgagaaaccctgaatcctgcaatcaagtagaagtcaacttcatctgaaagttcagctgttttcaaactgcaatgctgaaatgttatgcaaataatgaagttatcccttgctctagattttctgaagaaaatggattgtgtaaaatgctgatcatttgtttattaaaatgtgtcctattacacagtgagttaactctcaatgaagtcatctattttctgggctaaaaaacttcatttgtctttttcaacttctaataagcttaacctaagtgtcacagaagcctaggtgtcacagaggtccactcagtgacaaacacacactgaaggcctgaggaagacgagatgtcacagaggtccactcagtgacaaacacacactgaaggcctgaggaagactagatgtcacagaggtccactcagtgacaaacacacactgaaggcctgaggaagacgagatgtcacagaggtccactcagtgacaaacacacactgaaggcctgaggaagactagatgtcacagaggtccactcagtgacaaacacacactgaaggcctgaggaagacgagatgtcacagaggtccactcagtgacaaacacacactgaaggcctgaggaagacgagatgtcacagaggtccactcagtgacaaacacacactgaaggcctgaggaagactagatgtcacagaggtccactcagtgacaaacacacactgaaggcctgaggaagacgagatgtcacagaggtccactcagtgacaaacacacactgaaggcctgaggaagacgagatgtcacagaggtccactcagtgacacacactgaaggcctgaggaagactgaggacatgggctcagtggtggcttcccagtcatggtatcactggcatggacctctgtccggcagaggtgtggactggagaccaggattcatgctggtctggaacagtgacattgccaacttaagacacacaaagcagattttcagaagtgtctggtcaagataacatgctggccaaccacaattcctagagttaagagaaccttaaaagattaccgctcatgctaaaagtatgtaaagatcccatgtacagtatgatagtgtactttttttaaaggactgtcaatatacaaaactttaaagattaaaaacattaaaaataaaaccatgtccatttaaaagtattttatttttttccagtcaaatgactagttaacaagaagagtaaacttattaaacatgctctaattataaatcactgcattaaggacaatgaaaataatcaatttcggttatacaatatatacagttgtgctgcaaccaaagtaatcaggtgaatgaactgaatatcatacatctcaaaatagcatcctaagctgcatattatgttatccaccccttaacagatcacacagttactcttagtctgtgtacatgttctgagccatcatcccagatctgatggagaatggcatgcaaaatgccagaatcctgcagctgcagttcatgaaacataaactttaaatataaatagatatctacaatgtttttctttctcttagttgcttttttaatttgcaaggagcaaataactaagaaaggatattagcagggtcgttaatataatttctcctctggtaagagtactattagttactgcacaatagcaccaaattgtagactggaaaaatatttcctaggtatttatgtaccagtgaacctgacagattagtttgggactggagttctaatgttgatatgaatcaactttattccttatatagctggcaccaggtggtcaaaaggctgactataaaatacagatgcaggaggattgttaaaatagacataagtgcactgtgcaaaatacatctgtttacttaaatctatgagaaaattaaatgaagggttcaaacagaaattaacaattagtgaaaacagatgtagtgctttaaaaaaaaacaaaaacaaaaaactacagatataacacatttttacccggaactttgaaaggtaaaaagcgattgctatacaacatcataaaacattccagtttgttctgtcttcctttataacaaaaacaaaaagtacaatgccaaaaaaaaaaaaaactctacacagtcttgcataataaagacaagctgcttcaatcaaatgcaccatcacaacaaatgcagttaacagcattgctgcctcactttccaagcctatatgcaaatttattcctttacttttgttaaaagtccaagtgggtatcatatgcctatttattctcagagtgccaaaatttccaatattcctactatgaatcttaccctcgcaattactaaatagaggtatgacagtcaagttcattaaacgaatgagttttggttttataatagacaacctaatcctctactaccaccccaagtagcttaagaatgatatgatggcctgaaacagtaaaaagtgggatgtttgggagtattacctgggacctatatatttctgatatgttcttgattataaacagatggacagattcaatttcaagacagtgtgactaccattcctgttggagtattatagaaatacaagacactaaactgagtaaacattctcctgggctagaagggaaggcagtggtacactcagtaggaaacagcaagtgatgtgttaatacagcatggtctgcgccacagaattctactgtgtacagttgctttctgtgtgactcaggaagttcaagaaggcaaattccaaaacacctaaagcatataaactaatttaaaagaactgttttgcaatccatcatccttagtttttaaccaaattcaggaaatgcagttttatataacctggaacagaatgaactgtagttaccctacgttgtcataaaccatcagtagttttgttaagtatgattgttcacaacaggttatacatacatgcagaatataatgatagctgcaacctcacaaattagggctagaaagtacaatgctaatgtgtaaatttccaagttgctttttaaacactgggtggatttcaaaggaatgtgtgtctttaaaggtgaactgatggcattttatcgagaaagttcagagctgggctatggacttctgaagcagcagttcactggccgcctaaaataataattgtgataaaggtcaccaactccagaactgggccaaggaatgcaggaagaatttattcattaatgcaaacatttttaggtttagctaattccgtagaggcaggatcttgattatgtataatagttaaaataacttttcagttcacctgttgggaaattcagtttttcctaataaatgcatagcaatgtttcatgaaaaccacaaattataaaaacaattactgatatgtaaaaa

SEQ ID NO: 14495 - DNA, 663 bp, Homo sapiens
  source 1..663: mol_type = unassigned DNA
agatcgggcgtgggcttgcggactgcagcttcccgagccgctgtcgccccggaggggcggcaaggcgggcggccgcgggccgtttccttgcctcttcctctgccccgcttcggccgcctcccgcctctcagggtcggggttgtctgtccccttcgctgtcacatcctccgcacccagcgcttggaaggtgctccatcacggtgacagacaggtgccaagcaggctggcgtctgggaggaacttcggagccggctctccctaggccccgagcttggccgcatccgtccttactctggtgaccctgggcaggtcactgactcttcgggcgctttggcatcctcgtttgaaaggggctgttatcctgcagccttgctggggatcttctctggatcaagcaatggtggtgaaaaatgtttcgcaagggcaaaaaacgacacagtagtagcagttcccaaagtagcgaaatcagtactaagagcaagtctgtggattctagccttgggggtctttcacgatccagcactgtggccagcctcgacacagattccaccaaaagctcaggacaaagcaacaataattcagatacctgtgcagaatttcgaataaaatatgttggtgccattgagaaactgaaactctccgagggaaaaggccttgaagggc

SEQ ID NO: 14496 - DNA, 445 bp, Homo sapiens
  source 1..445: mol_type = unassigned DNA
gcctcttcctctgccccgcttcggccgcctcccgcctctcagggtcggggttgtctgtccccttcgctgtcacatcctccgcacccagcgcttggaaggtgctccatcacggtgacagacaggggatcttctctggatcaagcaatggtggtgaaaaatgtttcgcaagggcaaaaaacgacacagtagtagcagttcccaaagtagcgaaatcagtactaagagcaagtctgtggattctagccttgggggtctttcacgatccagcactgtggccagcctcgacacagattccaccaaaagctcaggacaaagcaacaataattcagatacctgtgcagaatttcgaataaaatatgttggtgccattgagaaactgaaactctccgagggaaaaggccttgaagggccattagacctgataaattatatagacgttgcccag

SEQ ID NO: 14497 - DNA, 540 bp, Homo sapiens
  source 1..540: mol_type = unassigned DNA
gagctcgcggaggcctgacgggaacacggtcccgagagcggcgcggacggccaggaaggatgggcgccctggcaatgcagaggagtcaccgagctccgcctttgaccagcgtgcagctgggagagtgagatcagagaccacagcagatcgtggcgctgtgatcagggggtacactcaagctgtgggtcccttaccccagccttgagatcccaggaaggcctgcagcctgaaacgggccttgaaaggggatcttctctggatcaagcaatggtggtgaaaaatgtttcgcaagggcaaaaaacgacacagtagtagcagttcccaaagtagcgaaatcagtactaagagcaagtctgtggattctagccttgggggtctttcacgatccagcactgtggccagcctcgacacagattccaccaaaagctcaggacaaagcaacaataattcagatacctgtgcagaatttcgaataaaatatgttggtgccattgagaaactgaaactctccgagggaaaaggccttgaagggccattaga

SEQ ID NO: 14498 - DNA, 748 bp, Homo sapiens
  source 1..748: mol_type = unassigned DNA
aaatatagaagtaaattggatgatgaggctgattaaaaagcttgggctcagtggtcagacttgggcaagtggcctaatgtcgtcccctagtaagtggacttagagtggggtctccaaatacggagaatctttgggttgcagcaggagctttcactgactgctgcgtgagttgctcgttctttttccttcatcaggtgcgtagtttctctgaaaagcatcacccaggtcagaatgaaaggaaactctctgtgcagaccgctgtatgtgggacctttgaagacagtcaaatagtgttcaattctatagggatcttctctggatcaagcaatggtggtgaaaaatgtttcgcaagggcaaaaaacgacacagtagtagcagttcccaaagtagcgaaatcagtactaagagcaagtctgtggattctagccttgggggtctttcacgatccagcactgtggccagcctcgacacagattccaccaaaagctcaggacaaagcaacaataattcagatacctgtgcagaatttcgaataaaatatgttggtgccattgagaaactgaaactctccgagggaaaaggccttgaagggccattagacctgataaattatatagacgttgcccagcaagatggaaagttgccttttgttcctccggaggaagaatttattatgggagtttccaagtatggcataaaagtatcaacatcagatcaatatgatgttttgcacaggcatgctctctac

SEQ ID NO: 14499 - DNA, 699 bp, Homo sapiens
  source 1..699: mol_type = unassigned DNA
agatcgggcgtgggcttgcggactgcagcttcccgagccgctgtcgccccggaggggcggcaaggcgggcggccgcgggccgtttccttgcctcttcctctgccccgcttcggccgcctcccgcctctcagggtcggggttgtctgtccccttcgctgtcacatcctccgcacccagcgcttggaaggtgctccatcacggtgacagacaggtgcgtagtttctctgaaaagcatcacccaggtcagaatgaaaggaaactctctgtgcagaccgctgtatgtgggacctttgaagacagtcaaatagtgttcaattctatagggatcttctctggatcaagcaatggtggtgaaaaatgtttcgcaagggcaaaaaacgacacagtagtagcagttcccaaagtagcgaaatcagtactaagagcaagtctgtggattctagccttgggggtctttcacgatccagcactgtggccagcctcgacacagattccaccaaaagctcaggacaaagcaacaataattcagatacctgtgcagaatttcgaataaaatatgttggtgccattgagaaactgaaactctccgagggaaaaggccttgaagggccattagacctgataaattatatagacgttgcccagcaagatggaaagttgccttttgttcctccggaggaagaatttattatgggagtt

SEQ ID NO: 14500 - DNA, 659 bp, Homo sapiens
  source 1..659: mol_type = unassigned DNA
tccgggcggggccgcgctcccggggcgcgggtggaggagcttggaaccacgcagatcgggcgtgggcttgcggactgcagcttcccgagccgctgtcgccccggaggggcggcaaggcgggcggccgcgggccgtttccttgcctcttcctctgccccgcttcggccgcctcccgcctctcagggtcggggttgtctgtccccttcgctgtcacatcctccgcacccagcgcttggaaggtgctccatcacggtgacagacaggtgccaagcaggctggcgtctgggaggaacttcggagccggctctccctaggccccgagcttggccgcatccgtccttactctggtgaccctgggcaggtcactgactcttcgggcgctttggcatcctcgtttgaaaggggctgttatcctgcagccttgctggggatcttctctggatcaagcaatggtggtgaaaaatgtttcgcaagggcaaaaaacgacacagtagtagcagttcccaaagtagcgaaatcagtactaagagcaagtctgtggattctagccttgggggtctttcacgatccagcactgtggccagcctcgacacagattccaccaaaagctcaggacaaagcaacaataattcagatacctgtgcagaatttcgaataaa

SEQ ID NO: 14501 - DNA, 1772 bp, Homo sapiens
  source 1..1772: mol_type = unassigned DNA
gcggacgtgggcaggagggctggaaaagccggcgctggagcgggaacgggagtagctgcctgggcgccaaaggccgcggcactcccacgcggaccccgaagtccgcaacccggggatgggcccgcggctgcgaggggatcttctctggatcaagcaatggtggtgaaaaatgtttcgcaagggcaaaaaacgacacagtagtagcagttcccaaagtagcgaaatcagtactaagagcaagtctgtggattctagccttgggggtctttcacgatccagcactgtggccagcctcgacacagattccaccaaaagctcaggacaaagcaacaataattcagatacctgtgcagaatttcgaataaaatatgttggtgccattgagaaactgaaactctccgagggaaaaggccttgaagggccattagacctgataaattatatagacgttgcccagcaagatggaaagttgccttttgttcctccggaggaagaatttattatgggagtttccaagtatggcataaaagtatcaacatcagatcaatatgaacaagcacaagccatttgcaaggttttatccaccgcttttgactctgtattaacatctgagaaaccctgaatcctgcaatcaagtagaagtcaacttcatctgaaagttcagctgttttcaaactgcaatgctgaaatgttatgcaaataatgaagttatcccttgctctagattttctgaagaaaatggattgtgtaaaatgctgatcatttgtttattaaaatgtgtcctattacacagtgagttaactctcaatgaagtcatctattttctgggctaaaaaacttcatttgtctttttcaacttctaataagcttaacctaagtgtcacagaagcctaggtgtcacagaggtccactcagtgacaaacacacactgaaggcctgaggaagacgagatgtcacagaggtccactcagtgacaaacacacactgaaggcctgaggaagactagatgtcacagaggtccactcagtgacaaacacacactgaaggcctgaggaagacgagatgtcacagaggtccactcagtgacaaacacacactgaaggcctgaggaagactagatgtcacagaggtccactcagtgacaaacacacactgaaggcctgaggaagacgagatgtcacagaggtccactcagtgacaaacacacactgaaggcctgaggaagacgagatgtcacagaggtccactcagtgacaaacacacactgaaggcctgaggaagactagatgtcacagaggtccactcagtgacaaacacacactgaaggcctgaggaagacgagatgtcacagaggtccactcagtgacaaacacacactgaaggcctgaggaagacgagatgtcacagaggtccactcagtgacacacactgaaggcctgaggaagactgaggacatgggctcagtggtggcttcccagtcatggtatcactggcatggacctctgtccggcagaggtgtggactggagaccaggattcatgctggtctggaacagtgacattgccaacttaagacacacaaagcagattttcagaagtgtctggtcaagataacatgctggccaaccacaattcctagagttaagagaaccttaaaagattaccgctcatgctaaaagtatgtaaagatcccatgtacagtatgatagtgtactttttttaaaggactgtcaatatacaaaactttaaagattaaaaacattaaaaataaaa

SEQ ID NO: 14502 - DNA, 948 bp, Homo sapiens
  source 1..948: mol_type = unassigned DNA
gtttcctttggcggattttctgttttcggaagttgctgggttcgttttattcagcggcagtggtgctttcccgaatctcagaatgcctgttaaaagatcactgaagttggatggtctgttagaagaaaattcatttgatccttcaaaaatcacaaggaagaaaagtgttataacttattctccaacaactggaacttgtcaaatgagtctatttgcttctcccacaagttctgaagagcaaaagcacagaaatggactatcaaatgaaaagagaaaaaaattgaatcaccccagtttaactgaaagcaaagaatctacaacaaaagacaatgatgaattcatgatgttgctatcaaaagttgagaaattgtcagaagaaatcatggagataatgcaaaatttaagtagtatacaggctttggagggcagtagagagcttgaaaatctcattggaatctcctgtgcatcacatttcttaaaaagagaaatgcagaaaaccaaagaactaatgacaaaagtgaataaacaaaaactgtttgaaaagagtacaggacttcctcacaaagcatcacgtcatcttgacagctatgaattccttaaagccattttaaactgaggcattaagaagaaatgcactcaccatgagcaccaacttctgcatctgcctgatcatatttaaaggaacagagaaatatttgtaattaatctgcccagtaaataccagctcgtagcagttggcaggtgcatgtctagataaaatttcttgcagctaatttaaactttctacacgcaccagtagataatctcaatgtaaataatacatttcttcttggctctttaatgtaagccaacatggagaggaagatcttgacttatattctgtaccacatacacttctgtggacttttagcatttgtgggtagacttaataaagcatgtataaaagtg

SEQ ID NO: 14503 - DNA, 560 bp, Homo sapiens
  source 1..560: mol_type = unassigned DNA
ctgggttcgttttattcagcggcagtggtgctttcccgaatctcagaatgcctgttaaaagatcactgaagttggatggtctgttagaagaaaattcatttgatccttcaaaaatcacaaggaagaaaagtgttataacttattctccaacaactggaacttgtcaaatgagtctatttgcttctcccacaagttctgaagagcaaaagcacagaaatggactatcaaatgaaaagagaaaaaaattgaatcaccccagtttaactgaaagcaaagaatctacaacaaaagacaatgatgaattcatgatgttgctatcaaaagttgagaaattgtcagaagaaatcatggagataatgcaaaatttaagtagtatacaggctttggagggcagtagagagcttgaaaatctcattggaatctcctgtgcatcacatttcttaaaaagagaaatgcagaaaaccaaagaactaatgacaaaagtgaataaacaaaaactgtttgaaaagagtacaggacttcctcacaaaggtcagcctcagatgtcacaacctctgtga

SEQ ID NO: 14504 - DNA, 1044 bp, Homo sapiens
  source 1..1044: mol_type = unassigned DNA
gttttcggaagttgctgggttcgttttattcagcggcagtggtgctttcccgaatctcagaatgccttttgctcccgttgcccaggctagagtgcaatggcacgatttccgttcactgcaacatctgcttcccgcgttcaagcgattctcctgcctcagccttgggagtagttgggattacagtgttaaaagatcactgaagttggatggtctgttagaagaaaattcatttgatccttcaaaaatcacaaggaagaaaagtgttataacttattctccaacaactggaacttgtcaaatgagtctatttgcttctcccacaagttctgaagagcaaaagcacagaaatggactatcaaatgaaaagagaaaaaaattgaatcaccccagtttaactgaaagcaaagaatctacaacaaaagacaatgatgaattcatgatgttgctatcaaaagttgagaaattgtcagaagaaatcatggagataatgcaaaatttaagtagtatacaggctttggagggcagtagagagcttgaaaatctcattggaatctcctgtgcatcacatttcttaaaaagagaaatgcagaaaaccaaagaactaatgacaaaagtgaataaacaaaaactgtttgaaaagagtacaggacttcctcacaaagcatcacgtcatcttgacagctatgaattccttaaagccattttaaactgaggcattaagaagaaatgcactcaccatgagcaccaacttctgcatctgcctgatcatatttaaaggaacagagaaatatttgtaattaatctgcccagtaaataccagctcgtagcagttggcaggtgcatgtctagataaaatttcttgcagctaatttaaactttctacacgcaccagtagataatctcaatgtaaataatacatttcttcttggctctttaatgtaagccaacatggagaggaagatcttgacttatattctgtaccacatacacttctgtggacttttagcatttgtgggtagacttaataaagcatgtataaaagtg

SEQ ID NO: 14505 - DNA, 8044 bp, Homo sapiens
  source 1..8044: mol_type = unassigned DNA
ctcccgaaggtccagcccttacccgccttcctaccaccttaggggatttggcccggagaacgagatcaccctctcaatgaaaggcagatgtccctttaaggtttgcttctacagcccgtggactttagcctaaacacggacccgcgaagctggctttatttgtccatgtctcggacagagcctgggaagctgccagtgagatttcagagaccaagagcgcgaaggggcgggcgatgtggcaatccgtctgggatgtgaaaagcgtggagcgcatttagaggaattcgacgaaaacacaggaaatcactcctctcccgctcctgggcgccgctgccactggggcagaggactgggaaccgcggcagcgggataagtggcccagccagagagcgcagctcccgcgcccggtcctgccctgcgaaccagcgcggccccctggcgctgaggctgctccggccatggcccctcggccccgcgcccgcccaggggtcgctgtcgcctgctgctggctcctcactgttgttctacgctgctgcgtatcattcaatgttgatgtgaaaaattcaatgactttcagcggcccggtggaagacatgtttggatatactgttcaacaatatgaaaatgaagaaggaaaatgggtgcttattggttctccgttagttggccaacccaaaaacagaactggagatgtctataagtgtccagttgggagaggtgaatcattaccttgtgtaaagttggatctaccagttaatacatcaattcccaatgtcacagaagtaaaggagaacatgacatttggatcaactttagtcaccaacccaaatggaggatttctggcttgtgggcccttatatgcctatagatgtggacatttgcattacacaactggaatctgttctgacgtcagccccacatttcaagtcgtgaattccattgcccctgtacaagaatgcagcactcaactggacatagtcatagtgctggatggttccaacagtatttacccatgggacagtgttacagcttttttaaatgaccttcttgaaagaatggatattggtcctaaacagacacaggttggaattgtacagtatggagaaaacgtgacccatgagttcaacctcaataagtattcttccaccgaagaggtacttgttgcagcaaagaaaatagtccagagaggtggccgccagactatgacagctcttggaatagacacagcaagaaaggaggcattcacggaagcccggggtgcccgaagaggagttaaaaaagtcatggttattgtgacagatggagagtctcatgacaatcatcgactgaagaaggtcatccaagactgtgaagatgaaaacattcaacggttttccatagctattcttggcagctataaccgaggaaatttaagcactgaaaaatttgtggaggaaataaaatcaattgcaagtgaacccactgaaaagcatttcttcaatgtctctgatgaattggctctagtcaccattgttaaaactctgggagaaagaatatttgccctggaagccacagctgaccagtcagcagcttcatttgaaatggaaatgtctcagactggcttcagtgctcattattcacaggactgggtcatgcttggagcagtaggagcctatgattggaatggaacagttgtcatgcagaaggctagtcaaatcataatccctcgaaacacaacctttaatgttgagtctaccaaaaagaatgaaccgcttgcttcttatttaggttacactgtaaactctgctactgcttcttctggagatgtgctctatattgctggacagcctcggtacaatcatacaggccaggtcattatctacaggatggaagatggaaacatcaaaattctccagacgctcagtggagaacagattggttcctactttggcagtattttaacaacaactgacattgacaaggattctaatactgacattcttctagtcggagcccctatgtacatgggaacagagaaggaggagcaaggaaaagtgtatgtgtatgctctcaatcagacaaggtttgaatatcaaatgagcctggaacctattaagcagacgtgctgttcatctcggcagcacaattcatgcacaacagaaaacaaaaatgagccatgcggggctcgttttggaactgcaattgctgctgtaaaagacctcaatcttgatggatttaatgacatcgtgataggagctccgctggaagatgatcacgggggagctgtgtacatttatcatggaagtggcaagactataaggaaagagtatgcacaacgtattccatcaggtggggatggtaagacactgaaattttttggccagtctatccacggagaaatggatttaaatggtgacggtctgacagatgtgactattgggggccttggtggtgctgccctcttctggtcccgagatgtggccgtagttaaagtgaccatgaattttgagccaaataaagtgaatattcaaaagaaaaactgccatatggagggaaaggaaacagtatgcataaatgctacagtgtgttttgatgtgaaattaaagtctaaagaagacacgatttatgaagctgatttgcagtaccgtgtcaccctagattcactaagacaaatatcacgaagttttttctctggaactcaagagagaaaggttcaaaggaacatcacagttcgaaaatcagaatgcactaagcactccttctacatgttggacaagcatgactttcaggactctgtgagaataacgttggactttaatcttaccgatccagaaaatgggcctgttcttgatgattctctaccaaactcagtacatgaatatattccctttgccaaagattgtggaaataaggaaaaatgtatctcagacctcagcctgcatgtcgccaccactgaaaaggacctgctgattgtccgatcccagaatgataagttcaacgttagcctcacagtcaaaaatacaaaggacagtgcctataacaccaggacaatagtgcattattctccaaatctagttttttcaggaattgaggctatccaaaaagacagttgtgaatctaatcataatatcacatgtaaagttggatatcccttcctgagaagaggagagatggtaactttcaaaatattgtttcagtttaacacatcctatctcatggaaaatgtgaccatttatttaagtgcaacaagtgacagcgaagaacctcctgaaaccctttctgataatgtagtaaacatttctatcccggtaaaatatgaagttggactacagttttacagctctgcaagtgaataccacatttcaattgctgccaatgagacagtccctgaagttattaattctactgaggacattggaaatgaaattaatatcttctacttgattagaaaaagtggatcttttccaatgccagagcttaagctgtcaatttcattccccaatatgacatcaaatggttaccctgtgctgtacccaactggattgtcatcttctgagaatgcaaactgcagaccccatatctttgaggatcctttcagtatcaactctggaaagaaaatgactacatcaactgaccatctcaaacgaggcacaattctggactgcaatacatgtaaatttgctaccatcacatgtaatctcacttcttctgacatcagccaagtcaatgtttcgcttatcttgtggaaaccaacttttataaaatcatatttttccagcttaaatcttactataaggggagaacttcggagtgaaaatgcatctctggttttaagtagcagcaatcaaaaaagagagcttgctattcaaatatccaaagatgggctaccgggcagagtgccattatgggtcatcctgctgagtgcttttgccggattgttgctgttaatgctgctcattttagcactgtggaagattggattcttcaaaagaccactgaaaaagaaaatggagaaatgaaatattttatgaaagaaaataataacaattattcaataatctatcctcaggtttgcctcaaatatgtgacaagaaatgtataattcatgacatagtcatgtaactatgtaatccatcagggattcattacttggaaaatgacaggtcatgcattatccaaaaacaataccaaaaagacatattttataaaatgacaaaaaatattttacataattactcatttttgttgagtaagcaaaattacaaagtgtttttaaaaaaacctgtacaaatatgtttatgtattaaatcaccatccaaaatatttaaggaatatataaaaagatttttatgatcatagaaacatctattttcaaaacaatataaattaagcttttccccttgattcctgttggatatccatgttcagcatgacagtcagcactcgtaaatgccaagaaaagaattacctgaaaaagatcatttctccctattcaaatgagaatattttcccttggtagaatccatatacaatatggattgaaaattaagtcaccaagaatacatttagcatctttgtgttgggttctatacctaaaaattttccctccctgcccaaggtgattggaaagtactgcaattgagctaaaattttatctaggatggaaaatcaggatagactcgtttaaaaacaagtatattaaatgggttaaattaagcttttacagaacatgcttaattttgatattgagctctaaatgcaaaactcttttatactgaaaaaacacttaaagtagttttgtgtggcatcacagtgatttgtcatgaaaagccatatatgggggacatgctaaaatggcttctgaatgaaatacgacagcagagaaagatgccactgaaatgctgaaattatctttgctgagcagcttttgaatgctaagggttccagtatgtgacccaaagaaagagttgtctcaactccttggtacagggttcattcaaacccccaagctgtgagagtgtgtttatttttaattttttaaaaggtatttaatttccaaccacacttcttatttttttgaaaagacaattttccatttcagtattacattttaccaagaagtcactgctttttaggtgtgttgcatcaatatttaaataaaatcccagaaatgtattttaaagaatttcaggtttgaaaactcaaaccaacaggaagatatcacacctttgtatgtgcttctttgttcttgaagtagtcattatggttcattggaatctactgtagcataagctcctaggttgctccatttcttaggaaaatagcaatgaatgaatgtatagtagctgcatgtgtgaactactgctgtaaagtttgctgacatttctgcaacaacatttctccatctgatttaccagaacctgtaacaagaccagaacatgtattcatccagaaactcctgggctctgctttgttcaaagaggagcaaatccacatagaaattaaatgttataaatttatttttttaaactaatttccaaagaatttagctgaagactcagagtcagcctacctcttgactctccacatccgcatctaagatcctgaaggccaaaggaatgcgcctgtgggatgccaaagccatcagtagctggaagaaagaatacctctttctagaggtttggtgtcctcttgctggcctgtcattatttggaaatacgcgcttttggaatttccttcattttcgctatttccaggttcagaaatcatacctaccacttgttctttctttgcccagtaaaactcagggtttctcttattcagagttaccatgttgcacacccccagtgctcagcctgcccagaagcccttctctgatctcagcaagatcttagtagtaaagctaacggatccattgaaattcatactcagcatctgtgactactagacaaagcccatttactgaaccataagtgtgcacttttaaactaaattgttaactgaaagggaaaaaatagaaatgagggcattttgaagtttttagaaaagagaggaagagctgttggccagatcaaagagatacttataagcccggcacaatttttaacataagtcattcctggctattaagtaaaatatttcatgaaccagaagtcctgtttctctaatattataatttgttgaggtttgtgtgtgtgtgtgtgtgcatgtgcagacacatgtacacatataaattgaatacaaaaatagctctataacaccaaaaaacagagtttacagaaaataaacacaaaagctatatctgcaagacaagtttgattcatctagtttcatatagtttcatatagtttcatttttattaatatttaggtttaacttatagttctgcaattatttaaaaaacaagtacagagcgtttgattaaaaaaagtcaacaaatgtttcaaaacagctttgtacaaatgttataaaacatatttaatgattaagaaatgtactagactctatcatttacttttaaaacatttaattagaaaaacaggtgatatttaagactatttataaacttattggccaaattgccaaaaagtttctttttctctaactttggtattctaaataattgattattgctcccattgtaaactgaaccatgtatgcactctcttttctgaccaaactacaatggtatattggtaaattatttaacaacacactgtccaggagggaaaaaaaaaacagtctctgatttgtatcatttgccaatttccatggtccaaatattctctctccattttcaaactaccaaagtgaccctaatcagcttacaaaattcctggaaatgtatctgccacctcttaccaaccagtgtgagctgacttcagcacaccactgagacagattacacgatagacagatagatagatagatagatagatagatagatagatagatagatagatattgatagagaacatgttgtgtctatatacatatccaatgacacacagtataatcatgttttaaattatgccaaaagtactgattatatcaagcccagtaaacataatgctacacagcacccattctttaattttgatttctaaaattataaccttcctttgatattaataaaatgttatgaacttgcaggagaaggaaggagttgaaagaaggaaaatataaagggtgatccacagtgaaaatcagacctacacaagccacaaaaaaattgtctcattttcccaaggaattcaaagtcctgtgatacacattacaaaagatgacactttgtaaatattttgaacttctatgatccaatttcaacttcattggtccaatttgtcaaactattttcctctgagcactagattcatgggcaatttaatctctgaatattttctgtgtcataagtgtgcttgaaaagaggcttgtagtaaacagatatttttacaaaatttgatgcttctgcaaccataataattttatctataaatgcgtatatacatatatatatatatatatatacacatacactcacatgcagatatttacatatatagatattctcttttccttttataaaatcaaagtctaggctcaattggaaaatggaaatatttgcaccaaaagaaaaaagtgccattgttgtgatcaatggagtaaagctggggtatagtagaggctggggaatccctgcccatgttctctccaaggccacagcttgcacaccgtgaatggtggccccactggctccatggagtgtgccttcacgcgggggaatgtccttgtccaacacgctgtaatctactccatgggaactgactgtcctgcttttcacaacattgagaaacaggcccagagcctgtctcatgtgccaggtgcagtcacattattgttaaaataaagtggcttctgacaaatcagtttttcaaaatagcatcctatgtacttttcatttcttccaacaaccctcaggcccccttttgccagttttctcccccaggggagattttcaagactactggagaaaaatctgttaataaaacatttgctctgagtacca

SEQ ID NO: 14506 - DNA, 5001 bp, Homo sapiens
  source 1..5001: mol_type = unassigned DNA
gcaggcgccgcgccgaggaggctgccgctctggcttgccgccccccgccgccgctgcacaccggacccagccgccgtgccgcgggccatggacctgcccaggggcctggtggtggcctgggcgctcagcctgtggccagggttcacggacaccttcaacatggacaccaggaagccccgggtcatccctggctccaggaccgccttctttggctacacagtgcagcagcacgacatcagtggcaataagtggctggtcgtgggcgccccactggaaaccaatggctaccagaagacgggagacgtgtacaagtgtccagtgatccacgggaactgcaccaaactcaacctgggaagggtcaccctgtccaacgtgtccgagcggaaagacaacatgcgcctcggccttagtctcgccaccaaccccaaggacaacagcttcctggcctgcagccccctctggtctcatgagtgtgggagctcctactacaccacagggatgtgttcaagagtcaactccaacttcaggttctccaagaccgtggccccagctctccaaaggtgccagacctacatggacatcgtcattgtcctggatggctccaacagcatctacccctgggtggaggttcagcacttcctcatcaacatcctgaaaaagttttacattggcccagggcagatccaggttggagttgtgcagtatggcgaagatgtggtgcatgagtttcacctcaacgactacaggtctgtaaaagatgtggtggaagctgccagccacattgagcagagaggaggaacagagacccggacggcatttggcattgaatttgcacgctcagaggctttccagaagggtggaaggaaaggagccaagaaggtgatgattgtcatcacagatggggagtcccacgacagcccagacctggagaaggtgatccagcaaagcgaaagagacaacgtaacaagatatgcggtggccgtcctgggctactacaaccgcagggggatcaatccagaaacttttctaaatgaaatcaaatacatcgccagtgaccctgatgacaagcacttcttcaatgtcactgatgaggctgccttgaaggacattgtcgatgccctgggggacagaatcttcagcctggaaggcaccaacaagaacgagacctcctttgggctggagatgtcacagacgggcttttcctcgcacgtggtggaggatggggttctgctgggagccgtcggtgcctatgactggaatggagctgtgctaaaggagacgagtgccgggaaggtcattcctctccgcgagtcctacctgaaagagttccccgaggagctcaagaaccatggtgcatacctggggtacacagtcacatcggtcgtgtcctccaggcaggggcgggtgtacgtggccggagccccccggttcaaccacacgggcaaggtcatcctgttcaccatgcacaacaaccggagcctcaccatccaccaggctatgcggggccagcagataggctcttactttgggagtgaaatcacctcggtggacatcgacggcgacggcgtgactgatgtcctgctggtgggcgcacccatgtacttcaacgagggccgtgagcgaggcaaggtgtacgtctatgagctgagacagaacctgtttgtttataacggaacgctaaaggattcacacagttaccagaatgcccgatttgggtcctccattgcctcagttcgagacctcaaccaggattcctacaatgacgtggtggtgggagcccccctggaggacaaccacgcaggagccatctacatcttccacggcttccgaggcagcatcctgaagacacctaagcagagaatcacagcctcagagctggctaccggcctccagtattttggctgcagcatccacgggcaattggacctcaatgaggatgggctcatcgacctggcagtgggagcccttggcaacgctgtgattctgtggtcccgcccagtggttcagatcaatgccagcctccactttgagccatccaagatcaacatcttccacagagactgcaagcgcagtggcagggatgccacctgcctggccgccttcctctgcttcacgcccatcttcctggcaccccatttccaaacaacaactgttggcatcagatacaacgccaccatggatgagaggcggtatacaccgagggcccacctggacgagggcggggaccgattcaccaacagagccgtactgctctcctccggccaggagctctgtgagcggatcaacttccatgtcctggacactgctgactacgtgaagccagtgaccttctcagtcgagtattccctggaggaccctgaccatggccccatgctggacgacggctggcccaccactctcagagtctcggtgcccttctggaacggctgcaatgaggatgagcactgtgtccctgaccttgtgttggatgcccggagtgacctgcccacggccatggagtactgccagagggtgctgaggaagcctgcgcaggactgctccgcatacacgctgtccttcgacaccacagtcttcatcatagagagcacacgccagcgagtggcggtggaggccacactggagaacaggggcgagaacgcctacagcacggtcctaaatatctcgcagtcagcaaacctgcagtttgccagcttgatccagaaggaggactcagacggtagcattgagtgtgtgaacgaggagaggaggctccagaagcaagtctgcaacgtcagctatcccttcttccgggccaaggccaaggtggctttccgtcttgattttgagttcagcaaatccatcttcctacaccacctggagatcgagctcgctgcaggcagtgacagtaatgagcgggacagcaccaaggaagacaacgtggcccccttacgcttccacctcaaatacgaggctgacgtcctcttcaccaggagcagcagcctgagccactacgaggtcaagcccaacagctcgctggagagatacgatggtatcgggcctcccttcagctgcatcttcaggatccagaacttgggcttgttccccatccacgggatgatgatgaagatcaccattcccatcgccaccaggagcggcaaccgcctactgaagctgagggacttcctcacggacgaggcgaacacgtcctgtaacatctggggcaatagcactgagtaccggcccaccccagtggaggaagacttgcgtcgtgctccacagctgaatcacagcaactctgatgtcgtctccatcaactgcaatatacggctggtccccaaccaggaaatcaatttccatctactggggaacctgtggttgaggtccctaaaagcactcaagtacaaatccatgaaaatcatggtcaacgcagccttgcagaggcagttccacagccccttcatcttccgtgaggaggatcccagccgccagatcgtgtttgagatctccaagcaagaggactggcaggtccccatctggatcattgtaggcagcaccctggggggcctcctactgctggccctgctggtcctggcactgtggaagctcggcttctttagaagtgccaggcgcaggagggagcctggtctggaccccacccccaaagtgctggagtgaggctccagaggagactttgagttgatgggggccaggacaccagtccaggtagtgttgagacccaggcctgtggccccaccgagctggagcggagaggaagccagctggctttgcacttgacctcatctcccgagcaatggcgcctgctccctccagaatggaactcaagctggttttaagtggaactgccctactgggagactgggacacctttaacacagacccctagggatttaaagggacacccctacacacacccaggcccatgccaaggcctccctcaggctctgtggagggcatttgctgccccagctactaaggtgctaggaattcgtaatcatccccatcctccagagaaacccagggaggaagactgtaaatacgaacccaatctgcacactccaggcctctagttccagaaggatccaagacaaaacagatctgaattctgcccttttctctcacccatcccacccctccattggctcccaagtcacacccactcccttccccatagataggcccctggggctcccgaagaatgaacccaagagcaagggcttgatggtgacagctgcaagccagggatgaagaaagactctgagatgtggagactgatggccaggcaagtgggaccaggatactggacgctgtcctgagatgagaggtagccgggctctgcacccacgtgcattcacattgaccgcaactcacacattcccccaccagctgcagccccttgctctcagctgccaaccctcccgggtcacttttgttcccaggtacctcatgggaagcatgtggatgacacaatccctggggctgtgcattcccacgtcttcttgctgcagcctgcccctagacatggacgcaccggcctggctgcagctgggcagcaggggtaggggtagggagcctcccctccctgtatcaccccctccctacacacacacacacacacacacacacacacacacacacacacacacacacacacacacactgcctcccatccttccctcatgcccgccagtgcacagggaagggcttggccagcgctgttgaggggtcccctctggaatgcactgaataaagcacgtgcaaggactcccggagcctgtgcagccttggtggcaaatatctcatctgccggcccccaggacaagtggtatgaccagtgataatgccccaaggacaaggggcgtgcctggcgcccagtggagtaatttatgccttagtcttgttttgaggtagaaatgcaagggggacacatgaaaggcatcagtccccctgtgcatagtacgacctttactgtcgtatttttgaaaaattaaaaatacagtgttt

SEQ ID NO: 14507 - DNA, 5004 bp, Homo sapiens
  source 1..5004: mol_type = unassigned DNA
gcaggcgccgcgccgaggaggctgccgctctggcttgccgccccccgccgccgctgcacaccggacccagccgccgtgccgcgggccatggacctgcccaggggcctggtggtggcctgggcgctcagcctgtggccagggttcacggacaccttcaacatggacaccaggaagccccgggtcatccctggctccaggaccgccttctttggctacacagtgcagcagcacgacatcagtggcaataagtggctggtcgtgggcgccccactggaaaccaatggctaccagaagacgggagacgtgtacaagtgtccagtgatccacgggaactgcaccaaactcaacctgggaagggtcaccctgtccaacgtgtccgagcggaaagacaacatgcgcctcggccttagtctcgccaccaaccccaaggacaacagcttcctggcctgcagccccctctggtctcatgagtgtgggagctcctactacaccacagggatgtgttcaagagtcaactccaacttcaggttctccaagaccgtggccccagctctccaaaggtgccagacctacatggacatcgtcattgtcctggatggctccaacagcatctacccctgggtggaggttcagcacttcctcatcaacatcctgaaaaagttttacattggcccagggcagatccaggttggagttgtgcagtatggcgaagatgtggtgcatgagtttcacctcaacgactacaggtctgtaaaagatgtggtggaagctgccagccacattgagcagagaggaggaacagagacccggacggcatttggcattgaatttgcacgctcagaggctttccagaagggtggaaggaaaggagccaagaaggtgatgattgtcatcacagatggggagtcccacgacagcccagacctggagaaggtgatccagcaaagcgaaagagacaacgtaacaagatatgcggtggccgtcctgggctactacaaccgcagggggatcaatccagaaacttttctaaatgaaatcaaatacatcgccagtgaccctgatgacaagcacttcttcaatgtcactgatgaggctgccttgaaggacattgtcgatgccctgggggacagaatcttcagcctggaaggcaccaacaagaacgagacctcctttgggctggagatgtcacagacgggcttttcctcgcacgtggtggaggatggggttctgctgggagccgtcggtgcctatgactggaatggagctgtgctaaaggagacgagtgccgggaaggtcattcctctccgcgagtcctacctgaaagagttccccgaggagctcaagaaccatggtgcatacctggggtacacagtcacatcggtcgtgtcctccaggcaggggcgggtgtacgtggccggagccccccggttcaaccacacgggcaaggtcatcctgttcaccatgcacaacaaccggagcctcaccatccaccaggctatgcggggccagcagataggctcttactttgggagtgaaatcacctcggtggacatcgacggcgacggcgtgactgatgtcctgctggtgggcgcacccatgtacttcaacgagggccgtgagcgaggcaaggtgtacgtctatgagctgagacagaacctgtttgtttataacggaacgctaaaggattcacacagttaccagaatgcccgatttgggtcctccattgcctcagttcgagacctcaaccaggattcctacaatgacgtggtggtgggagcccccctggaggacaaccacgcaggagccatctacatcttccacggcttccgaggcagcatcctgaagacacctaagcagagaatcacagcctcagagctggctaccggcctccagtattttggctgcagcatccacgggcaattggacctcaatgaggatgggctcatcgacctggcagtgggagcccttggcaacgctgtgattctgtggtcccgcccagtggttcagatcaatgccagcctccactttgagccatccaagatcaacatcttccacagagactgcaagcgcagtggcagggatgccacctgcctggccgccttcctctgcttcacgcccatcttcctggcaccccatttccaaacaacaactgttggcatcagatacaacgccaccatggatgagaggcggtatacaccgagggcccacctggacgagggcggggaccgattcaccaacagagccgtactgctctcctccggccaggagctctgtgagcggatcaacttccatgtcctggacactgctgactacgtgaagccagtgaccttctcagtcgagtattccctggaggaccctgaccatggccccatgctggacgacggctggcccaccactctcagagtctcggtgcccttctggaacggctgcaatgaggatgagcactgtgtccctgaccttgtgttggatgcccggagtgacctgcccacggccatggagtactgccagagggtgctgaggaagcctgcgcaggactgctccgcatacacgctgtccttcgacaccacagtcttcatcatagagagcacacgccagcgagtggcggtggaggccacactggagaacaggggcgagaacgcctacagcacggtcctaaatatctcgcagtcagcaaacctgcagtttgccagcttgatccagaaggaggactcagacggtagcattgagtgtgtgaacgaggagaggaggctccagaagcaagtctgcaacgtcagctatcccttcttccgggccaaggccaaggtggctttccgtcttgattttgagttcagcaaatccatcttcctacaccacctggagatcgagctcgctgcaggcagtgacagtaatgagcgggacagcaccaaggaagacaacgtggcccccttacgcttccacctcaaatacgaggctgacgtcctcttcaccaggagcagcagcctgagccactacgaggtcaagcccaacagctcgctggagagatacgatggtatcgggcctcccttcagctgcatcttcaggatccagaacttgggcttgttccccatccacgggatgatgatgaagatcaccattcccatcgccaccaggagcggcaaccgcctactgaagctgagggacttcctcacggacgaggtggcgaacacgtcctgtaacatctggggcaatagcactgagtaccggcccaccccagtggaggaagacttgcgtcgtgctccacagctgaatcacagcaactctgatgtcgtctccatcaactgcaatatacggctggtccccaaccaggaaatcaatttccatctactggggaacctgtggttgaggtccctaaaagcactcaagtacaaatccatgaaaatcatggtcaacgcagccttgcagaggcagttccacagccccttcatcttccgtgaggaggatcccagccgccagatcgtgtttgagatctccaagcaagaggactggcaggtccccatctggatcattgtaggcagcaccctggggggcctcctactgctggccctgctggtcctggcactgtggaagctcggcttctttagaagtgccaggcgcaggagggagcctggtctggaccccacccccaaagtgctggagtgaggctccagaggagactttgagttgatgggggccaggacaccagtccaggtagtgttgagacccaggcctgtggccccaccgagctggagcggagaggaagccagctggctttgcacttgacctcatctcccgagcaatggcgcctgctccctccagaatggaactcaagctggttttaagtggaactgccctactgggagactgggacacctttaacacagacccctagggatttaaagggacacccctacacacacccaggcccatgccaaggcctccctcaggctctgtggagggcatttgctgccccagctactaaggtgctaggaattcgtaatcatccccatcctccagagaaacccagggaggaagactgtaaatacgaacccaatctgcacactccaggcctctagttccagaaggatccaagacaaaacagatctgaattctgcccttttctctcacccatcccacccctccattggctcccaagtcacacccactcccttccccatagataggcccctggggctcccgaagaatgaacccaagagcaagggcttgatggtgacagctgcaagccagggatgaagaaagactctgagatgtggagactgatggccaggcaagtgggaccaggatactggacgctgtcctgagatgagaggtagccgggctctgcacccacgtgcattcacattgaccgcaactcacacattcccccaccagctgcagccccttgctctcagctgccaaccctcccgggtcacttttgttcccaggtacctcatgggaagcatgtggatgacacaatccctggggctgtgcattcccacgtcttcttgctgcagcctgcccctagacatggacgcaccggcctggctgcagctgggcagcaggggtaggggtagggagcctcccctccctgtatcaccccctccctacacacacacacacacacacacacacacacacacacacacacacacacacacacacacactgcctcccatccttccctcatgcccgccagtgcacagggaagggcttggccagcgctgttgaggggtcccctctggaatgcactgaataaagcacgtgcaaggactcccggagcctgtgcagccttggtggcaaatatctcatctgccggcccccaggacaagtggtatgaccagtgataatgccccaaggacaaggggcgtgcctggcgcccagtggagtaatttatgccttagtcttgttttgaggtagaaatgcaagggggacacatgaaaggcatcagtccccctgtgcatagtacgacctttactgtcgtatttttgaaaaattaaaaatacagtgttt

SEQ ID NO: 14508 - DNA, 3009 bp, Homo sapiens
  source 1..3009: mol_type = unassigned DNA
atcaaatacatcgccagtgaccctgatgacaagcacttcttcaatgtcactgatgaggctgccttgaaggacattgtcgatgccctgggggacagaatcttcagcctggaaggcaccaacaagaacgagacctcctttgggctggagatgtcacagacgggcttttcctcgcacgtggtggaggatggggttctgctgggagccgtcggtgcctatgactggaatggagctgtgctaaaggagacgagtgccgggaaggtcattcctctccgcgagtcctacctgaaagagttccccgaggagctcaagaaccatggtgcatacctggggtacacagtcacatcggtcgtgtcctccaggcaggggcgggtgtacgtggccggagccccccggttcaaccacacgggcaaggtcatcctgttcaccatgcacaacaaccggagcctcaccatccaccaggctatgcggggccagcagataggctcttactttgggagtgaaatcacctcggtggacatcgacggcgacggcgtgactgatgtcctgctggtgggcgcacccatgtacttcaacgagggccgtgagcgaggcaaggtgtacgtctatgagctgagacagaacctgtttgtttataacggaacgctaaaggattcacacagttaccagaatgcccgatttgggtcctccattgcctcagttcgagacctcaaccaggattcctacaatgacgtggtggtgggagcccccctggaggacaaccacgcaggagccatctacatcttccacggcttccgaggcagcatcctgaagacacctaagcagagaatcacagcctcagagctggctaccggcctccagtattttggctgcagcatccacgggcaattggacctcaatgaggatgggctcatcgacctggcagtgggagcccttggcaacgctgtgattctgtggtcccgcccagtggttcagatcaatgccagcctccactttgagccatccaagatcaacatcttccacagagactgcaagcgcagtggcagggatgccacctgcctggccgccttcctctgcttcacgcccatcttcctggcaccccatttccaaacaacaactgttggcatcagatacaacgccaccatggatgagaggcggtatacaccgagggcccacctggacgagggcggggaccgattcaccaacagagccgtactgctctcctccggccaggagctctgtgagcggatcaacttccatgtcctggacactgctgactacgtgaagccagtgaccttctcagtcgagtattccctggaggaccctgaccatggccccatgctggacgacggctggcccaccactctcagagtctcggtgcccttctggaacggctgcaatgaggatgagcactgtgtccctgaccttgtgttggatgcccggagtgacctgcccacggccatggagtactgccagagggtgctgaggaagcctgcgcaggactgctccgcatacacgctgtccttcgacaccacagtcttcatcatagagagcacacgccagcgagtggcggtggaggccacactggagaacaggggcgagaacgcctacagcacggtcctaaatatctcgcagtcagcaaacctgcagtttgccagcttgatccagaaggaggactcagacggtagcattgagtgtgtgaacgaggagaggaggctccagaagcaagtctgcaacgtcagctatcccttcttccgggccaaggccaaggtggctttccgtcttgattttgagttcagcaaatccatcttcctacaccacctggagatcgagctcgctgcaggcagtgacagtaatgagcgggacagcaccaaggaagacaacgtggcccccttacgcttccacctcaaatacgaggctgacgtcctcttcaccaggagcagcagcctgagccactacgaggtcaagcccaacagctcgctggagagatacgatggtatcgggcctcccttcagctgcatcttcaggatccagaacttgggcttgttccccatccacgggatgatgatgaagatcaccattcccatcgccaccaggagcggcaaccgcctactgaagctgagggacttcctcacggacgaggcgaacacgtcctgtaacatctggggcaatagcactgagtaccggcccaccccagtggaggaagacttgcgtcgtgctccacagctgaatcacagcaactctgatgtcgtctccatcaactgcaatatacggctggtccccaaccaggaaatcaatttccatctactggggaacctgtggttgaggtccctaaaagcactcaagtacaaatccatgaaaatcatggtcaacgcagccttgcagaggcagttccacagccccttcatcttccgtgaggaggatcccagccgccagatcgtgtttgagatctccaagcaagaggactggcaggtccccatctggatcattgtaggcagcaccctggggggcctcctactgctggccctgctggtcctggcactgtggaagctcggcttctttagaagtgccaggcgcaggagggagcctggtctggaccccacccccaaagtgctggagtgaggctccagaggagactttgagttgatgggggccaggacaccagtccaggtagtgttgagacccaggcctgtggccccaccgagctggagcggagaggaagccagctggctttgcacttgacctcatctcccgagcaatggcgcctgctccctccagaatggaactcaagctggttttaagtggaactgccctactgggagactgggacacctttaacacagacccctagggatttaaagggacacccctacacacacacacacacacacacacacacacacacacactgcctcccatccttccctcatgcccgccagtgcacagggaagggcttggccagcgctgttgaggggtcccctctggaatgcactgaataaagcacgtgcaagg

SEQ ID NO: 14509 - DNA, 2612 bp, Homo sapiens
  source 1..2612: mol_type = unassigned DNA
agtgcaggctgcaggcgccgcgccgaggaggctgccgctctggcttgccgccccccgccgccgctgcacaccggacccagccgccgtgccgcgggccatggacctgcccaggggcctggtggtggcctgggcgctcagcctgtggccagggttcacggacaccttcaacatggacaccaggaagccccgggtcatccctggctccaggaccgccttctttggctacacagtgcagcagcacgacatcagtggcaataagtggctggtcgtgggcgccccactggaaaccaatggctaccagaagacgggagacgtgtacaagtgtccagtgatccacgggaactgcaccaaactcaacctgggaagggtcaccctgtccaacgtgtccgagcggaaagacaacatgcgcctcggccttagtctcgccaccaaccccaaggacaacagcttcctggcctgcagccccctctggtctcatgagtgtgggagctcctactacaccacagggatgtgttcaagagtcaactccaacttcaggttctccaagaccgtggccccagctctccaaaggtgccagacctacatggacatcgtcattgtcctggatggctccaacagcatctacccctgggtggaggttcagcacttcctcatcaacatcctgaaaaagttttacattggcccagggcagatccaggttggagttgtgcagtatggcgaagatgtggtgcatgagtttcacctcaacgactacaggtctgtaaaagatgtggtggaagctgccagccacattgagcagagaggaggaacagagacccggacggcatttggcattgaatttgcacgctcagaggctttccagaagggtggaaggaaaggagccaagaaggtgatgattgtcatcacagatggggagtcccacgacagcccagacctggagaaggtgatccagcaaagcgaaagagacaacgtaacaagatatgcggtggccgtcctgggctactacaaccgcagggggatcaatccagaaacttttctaaatgaaatcaaatacatcgccagtgaccctgatgacaagcacttcttcaatgtcactgatgaggctgccttgaaggacattgtcgatgccctgggggacagaatcttcagcctggaaggcaccaacaagaacgagacctcctttgggctggagatgtcacagacgggcttttcctcgcacgtggtggaggatggggttctgctgggagccgtcggtgcctatgactggaatggagctgtgctaaaggagacgagtgccgggaaggtcattcctctccgcgagtcctacctgaaagagttccccgaggagctcaagaaccatggtgcatacctggggtacacagtcacatcggtcgtgtcctccaggcaggggcgggtgtacgtggccggagccccccggttcaaccacacgggcaaggtcatcctgttcaccatgcacaacaaccggagcctcaccatccaccaggctatgcggggccagcagataggctcttactttgggagtgaaatcacctcggtggacatcgacggcgacggcgtgactgatgtcctgctggtgggcgcacccatgtacttcaacgagggccgtgagcgaggcaaggtgtacgtctatgagctgagacagaacctgtttgtttataacggaacgctaaaggattcacacagttaccagaatgcccgatttgggtcctccattgcctcagttcgagacctcaaccaggattcctacaatgacgtggtggtgggagcccccctggaggacaaccacgcaggagccatctacatcttccacggcttccgaggcagcatcctgaagacacctaagcagagaatcacagcctcagagctggctaccggcctccagtattttggctgcagcatccacgggcaattggacctcaatgaggatgggctcatcgacctggcagtgggagcccttggcaacgctgtgattctgtggaccccacccccaaagtgctggagtgaggctccagaggagactttgagttgatgggggccaggacaccagtccaggtagtgttgagacccaggcctgtggccccaccgagctggagcggagaggaagccagctggctttgcacttgacctcatctcccgagcaatggcgcctgctccctccagaatggaactcaagctggttttaagtggaactgccctactgggagactgggacacctttaacacagacccctagggatttaaagggacacccctacacacacccaggcccatgccaaggcctccctcaggctctgtggagggcatttgctgccccagctactaaggtgctaggaattcgtaatcatccccatcctccagagaaacccagggaggaagactgtaaatacgaacccaatctgcacactccaggcctctagttccagaaggatccaagacaaaacagatctgaattctgcccttttctctcacccatcccacccctccattggctcccaagtcacacccactcccttccccatagataggcccctggggctcccgaagaatgaacccaagagcaagggcttgatggtgacagctgcaagccaggg

SEQ ID NO: 14510 - DNA, 7869 bp, Homo sapiens
  source 1..7869: mol_type = unassigned DNA
ttttccctgctctcaccgggcgggggagagaagccctctggacagcttctagagtgtgcaggttctcgtatccctcggccaagggtatcctctgcaaacctctgcaaacccagcgcaactacggtcccccggtcagacccaggatggggccagaacggacaggggccgcgccgctgccgctgctgctggtgttagcgctcagtcaaggcattttaaattgttgtttggcctacaatgttggtctcccagaagcaaaaatattttccggtccttcaagtgaacagtttggctatgcagtgcagcagtttataaatccaaaaggcaactggttactggttggttcaccctggagtggctttcctgagaaccgaatgggagatgtgtataaatgtcctgttgacctatccactgccacatgtgaaaaactaaatttgcaaacttcaacaagcattccaaatgttactgagatgaaaaccaacatgagcctcggcttgatcctcaccaggaacatgggaactggaggttttctcacatgtggtcctctgtgggcacagcaatgtgggaatcagtattacacaacgggtgtgtgttctgacatcagtcctgattttcagctctcagccagcttctcacctgcaactcagccctgcccttccctcatagatgttgtggttgtgtgtgatgaatcaaatagtatttatccttgggatgcagtaaagaattttttggaaaaatttgtacaaggcctggatataggccccacaaagacacaggtggggttaattcagtatgccaataatccaagagttgtgtttaacttgaacacatataaaaccaaagaagaaatgattgtagcaacatcccagacatcccaatatggtggggacctcacaaacacattcggagcaattcaatatgcaagaaaatatgcttattcagcagcttctggtgggcgacgaagtgctacgaaagtaatggtagttgtaactgacggtgaatcacatgatggttcaatgttgaaagctgtgattgatcaatgcaaccatgacaatatactgaggtttggcatagcagttcttgggtacttaaacagaaacgcccttgatactaaaaatttaataaaagaaataaaagcaatcgctagtattccaacagaaagatactttttcaatgtgtctgatgaagcagctctactagaaaaggctgggacattaggagaacaaattttcagcattgaaggtactgttcaaggaggagacaactttcagatggaaatgtcacaagtgggattcagtgcagattactcttctcaaaatgatattctgatgctgggtgcagtgggagcttttggctggagtgggaccattgtccagaagacatctcatggccatttgatctttcctaaacaagcctttgaccaaattctgcaggacagaaatcacagttcatatttaggttactctgtggctgcaatttctactggagaaagcactcactttgttgctggtgctcctcgggcaaattataccggccagatagtgctatatagtgtgaatgagaatggcaatatcacggttattcaggctcaccgaggtgaccagattggctcctattttggtagtgtgctgtgttcagttgatgtggataaagacaccattacagacgtgctcttggtaggtgcaccaatgtacatgagtgacctaaagaaagaggaaggaagagtctacctgtttactatcaaagagggcattttgggtcagcaccaatttcttgaaggccccgagggcattgaaaacactcgatttggttcagcaattgcagctctttcagacatcaacatggatggctttaatgatgtgattgttggttcaccactagaaaatcagaattctggagctgtatacatttacaatggtcatcagggcactatccgcacaaagtattcccagaaaatcttgggatccgatggagcctttaggagccatctccagtactttgggaggtccttggatggctatggagatttaaatggggattccatcaccgatgtgtctattggtgcctttggacaagtggttcaactctggtcacaaagtattgctgatgtagctatagaagcttcattcacaccagaaaaaatcactttggtcaacaagaatgctcagataattctcaaactctgcttcagtgcaaagttcagacctactaagcaaaacaatcaagtggccattgtatataacatcacacttgatgcagatggattttcatccagagtaacctccagggggttatttaaagaaaacaatgaaaggtgcctgcagaagaatatggtagtaaatcaagcacagagttgccccgagcacatcatttatatacaggagccctctgatgttgtcaactctttggatttgcgtgtggacatcagtctggaaaaccctggcactagccctgcccttgaagcctattctgagactgccaaggtcttcagtattcctttccacaaagactgtggtgaggacggactttgcatttctgatctagtcctagatgtccgacaaataccagctgctcaagaacaaccctttattgtcagcaaccaaaacaaaaggttaacattttcagtaacgctgaaaaataaaagggaaagtgcatacaacactggaattgttgttgatttttcagaaaacttgttttttgcatcattctccctgccggttgatgggacagaagtaacatgccaggtggctgcatctcagaagtctgttgcctgcgatgtaggctaccctgctttaaagagagaacaacaggtgacttttactattaactttgacttcaatcttcaaaaccttcagaatcaggcgtctctcagtttccaagccttaagtgaaagccaagaagaaaacaaggctgataatttggtcaacctcaaaattcctctcctgtatgatgctgaaattcacttaacaagatctaccaacataaatttttatgaaatctcttcggatgggaatgttccttcaatcgtgcacagttttgaagatgttggtccaaaattcatcttctccctgaaggtaacaacaggaagtgttccagtaagcatggcaactgtaatcatccacatccctcagtataccaaagaaaagaacccactgatgtacctaactggggtgcaaacagacaaggctggtgacatcagttgtaatgcagatatcaatccactgaaaataggacaaacatcttcttctgtatctttcaaaagtgaaaatttcaggcacaccaaagaattgaactgcagaactgcttcctgtagtaatgttacctgctggttgaaagacgttcacatgaaaggagaatactttgttaatgtgactaccagaatttggaacgggactttcgcatcatcaacgttccagacagtacagctaacggcagctgcagaaatcaacacctataaccctgagatatatgtgattgaagataacactgttacgattcccctgatgataatgaaacctgatgagaaagccgaagtaccaacaggagttataataggaagtataattgctggaatccttttgctgttagctctggttgcaattttatggaagctcggcttcttcaaaagaaaatatgaaaagatgaccaaaaatccagatgagattgatgagaccacagagctcagtagctgaaccagcagacctacctgcagtgggaaccggcagcatcccagccagggtttgctgtttgcgtgaatggatttctttttaaatcccatattttttttatcatgtcgtaggtaaactaacctggtattttaagagaaaactgcaggtcagtttggaatgaagaaattgtggggggtgggggaggtgcggggggcaggtagggaaataatagggaaaatacctattttatatgatgggggaaaaaaagtaatctttaaactggctggcccagagtttacattctaatttgcattgtgtcagaaacatgaaatgcttccaagcatgacaacttttaaagaaaaatatgatactctcagattttaagggggaaaactgttctctttaaaatatttgtctttaaacagcaactacagaagtggaagtgcttgatatgtaagtacttccacttgtgtatattttaatgaatattgatgttaacaagaggggaaaacaaaacacaggttttttcaatttatgctgctcatccaaagttgccacagatgatacttccaagtgataattttatttataaactaggtaaaatttgttgttggttccttttagaccacggctgccccttccacaccccatcttgctctaatgatcaaaacatgcttgaataactgagcttagagtatacctcctatatgtccatttaagttaggagagggggcgatatagagaataaggcacaaaattttgtttaaaactcagaatataacatgtaaaatcccatctgctagaagcccatcctgtgccagaggaaggaaaaggaggaaatttcctttctcttttaggaggcacaacagttctcttctaggatttgtttggctgactggcagtaacctagtgaatttctgaaagatgagtaatttctttggcaaccttcctcctcccttactgaaccactctcccacctcctggtggtaccattattatagaagccctctacagcctgactttctctccagcggtccaaagttatcccctcctttacccctcatccaaagttcccactccttcaggacagctgctgtgcattagatattaggggggaaagtcatctgtttaatttacacacttgcatgaattactgtatataaactccttaacttcagggagctattttcatttagtgctaaacaagtaagaaaaataagctcgagtgaatttctaaatgttggaatgttatgggatgtaaacaatgtaaagtaagacatctcaggatttcaccagaagttacagatgaggcactggaagccaccaaattagcaggtgcaccttctgtggctgtcttgtttctgaagtacttaaacttccacaagagtgaatttgacctaggcaagtttgttcaaaaggtagatcctgagatgatttggtcagattgggataaggcccagcaatctgcattttaacaagcaccccagtcactaggatgcagatggaccacactttgagaaacaccacccatttctactttttgcaccttattttctctgttcctgagcccccacattctctaggagaaacttagaggaaaagggcacagacactacatatctaaagctttggacaagtccttgacctctataaacttcagagtcctcattataaaatgggaagactgagctggagttcagcagtgatgcttttagttttaaaagtctatgatctggacttcctataatacaaatacacaatcctccaagaatttgacttggaaaaaaatgtcaaaggaaaacaggttatctgcccatgtgcatatggacaaccttgactaccctggcctggcccgtggtggcagtccagggctatctgtactgtttacagaattactttgtagttgacaacacaaaacaaacaaaaaaggcataaaatgccagcggtttatagaaaaaacagcatggtattctccagttaggtatgccagagtccaattcttttaacagctgtgagaatttgctgcttcattccaacaaaattttatttaaaaaaaaaaaaaaaagactggagaaactagtcattagcttgataaagaatatttaacagctagtggtgctggtgtgtacctgaagctccagctacttgagagactgagacaggaagatcgcttgagcccaggagttcaagtccagcctaagcaacatagcaagaccctgtctcaaaaaaatgactatttaaaaagacaatgtggccaggcacggtggctcacacctgtaatcccaacactttgggaggctgaggccggtggatcacgaggtcaggagtttgagactagcctggccaacatggtgaaaccccatctctaataatataaaaattagctgggcgtagtagcaggtgcctgtaatcccagttactcgggaagctgaggcaggagaatcacttgaacccgggaggcagaggtttcagtgagccgagatcgcgccactgcactccagcctgggtgacagggcaagactctgtctcaaacaaacaaacaaaaaaaaagttagtactgtatatgtaaatactagcttttcaatgtgctatacaaacaattatagcacatccttccttttactctgtctcacctcctttaggtgagtacttccttaaataagtgctaaacatacatatacggaacttgaaagctttggttagccttgccttaggtaatcagcctagtttacactgtttccagggagtagttgaattactataaaccattagccacttgtctctgcaccatttatcacaccaggacagggtctctcaacctgggcgctactgtcatttggggccaggtgattcttccttgcaggggctgtcctgtaccttgtaggacagcagccctgtcctagaaggtatgtttagcagcattcctggcctctagctacccgatgccagagcatgctccccccgcagtcatgacaatcaaaaaatgtctccagacattgtcaaatgcctcctggggggcagtatttctcaagcacttttaagcaaaggtaagtattcatacaagaaatttagggggaaaaaacattgtttaaataaaagctatgtgttcctattcaacaatatttttgctttaaaagtaagtagagggcataaaagatgtcatattcaaatttccatttcataaatggtgtacagacaaggtctatagaatgtggtaaaaacttgactgcaacacaaggcttataaaatagtaagatagtaaaatagcttatgaagaaactacagagatttaaaattgtgcatgactcatttcagcagcaaaataagaactcctaactgaacagaaatttttctacctagcaatgttattcttgtaaaatagttacctattaaaactgtgaagagtaaaactaaagccaatttattatagtcacacaagtgattatactaaaaattattataaaggttataattttataatgtatttacctgtcctgatatatagctataacccaatatatgaaaatctcaaaaattaagacatcatcatacagaaggcaggattccttaaactgagatccctgatccatctttaatatttcaatttgcacacataaaacaatgcccttttgtgtacattcaggcatacccattttaatcaatttgaaaggttaatttaaacctctagaggtgaatgagaaacatgggggaaaagtatgaaataggtgaaaatcttaactatttctttgaactctaaagactgaaactgtagccattatgtaaataaagtttcatatgtacctgtttattttggcagattaagtcaaaatatgaatgtatatattgcataactatgttagaattgtatatattttaaagaaattgtcttggatattttcctttatacataatagataagtcttttttcaaatgtggtgtttgatgtttttgattaaatgtgttttgcctctttccacaaaaactgtaaaaataaatgcatgtttgtacaaaaagttgcagaattcatttgatttatgagaaacaaaaattaaattgtagtcaacagttagtagtttttctcatatccaagtataacaaacagaaaagtttcattattgtaacccacttttttcataccacattattgaatattgttacaattgttttgaaaataaagccattttctttgggcttttataagtta

SEQ ID NO: 14511 - DNA, 3487 bp, Homo sapiens
  source 1..3487: mol_type = unassigned DNA
gcaactacggtcccccggtcagacccaggatggggccagaacggacaggggccgcgccgctgccgctgctgctggtgttagcgctcagtcaaggcattttaaattgttgtttggcctacaatgttggtctcccagaagcaaaaatattttccggtccttcaagtgaacagtttggctatgcagtgcagcagtttataaatccaaaaggcaactggttactggttggttcaccctggagtggctttcctgagaaccgaatgggagatgtgtataaatgtcctgttgacctatccactgccacatgtgaaaaactaaatttgcaaacttcaacaagcattccaaatgttactgagatgaaaaccaacatgagcctcggcttgatcctcaccaggaacatgggaactggaggttttctcacatgtggtcctctgtgggcacagcaatgtgggaatcagtattacacaacgggtgtgtgttctgacatcagtcctgattttcagctctcagccagcttctcacctgcaactcagccctgcccttccctcatagatgttgtggttgtgtgtgatgaatcaaatagtatttatccttgggatgcagtaaagaattttttggaaaaatttgtacaaggcctggatataggccccacaaagacacaggtggggttaattcagtatgccaataatccaagagttgtgtttaacttgaacacatataaaaccaaagaagaaatgattgtagcaacatcccagacatcccaatatggtggggacctcacaaacacattcggagcaattcaatatgcaagaaaatatgcttattcagcagcttctggtgggcgacgaagtgctacgaaagtaatggtagttgtaactgacggtgaatcacatgatggttcaatgttgaaagctgtgattgatcaatgcaaccatgacaatatactgaggtttggcatagcagttcttgggtacttaaacagaaacgcccttgatactaaaaatttaataaaagaaataaaagcaatcgctagtattccaacagaaagatactttttcaatgtgtctgatgaagcagctctactagaaaaggctgggacattaggagaacaaattttcagcattgaaggtactgttcaaggaggagacaactttcagatggaaatgtcacaagtgggattcagtgcagattactcttctcaaaatgatattctgatgctgggtgcagtgggagcttttggctggagtgggaccattgtccagaagacatctcatggccatttgatctttcctaaacaagcctttgaccaaattctgcaggacagaaatcacagttcatatttaggttactctgtggctgcaatttctactggagaaagcactcactttgttgctggtgctcctcgggcaaattataccggccagatagtgctatatagtgtgaatgagaatggcaatatcacggttattcaggctcaccgaggtgaccagattggctcctattttggtagtgtgctgtgttcagttgatgtggataaagacaccattacagacgtgctcttggtaggtgcaccaatgtacatgagtgacctaaagaaagaggaaggaagagtctacctgtttactatcaaagagggcattttgggtcagcaccaatttcttgaaggccccgagggcattgaaaacactcgatttggttcagcaattgcagctctttcagacatcaacatggatggctttaatgatgtgattgttggttcaccactagaaaatcagaattctggagctgtatacatttacaatggtcatcagggcactatccgcacaaagtattcccagaaaatcttgggatccgatggagcctttaggagccatctccagtactttgggaggtccttggatggctatggagatttaaatggggattccatcaccgatgtgtctattggtgcctttggacaagtggttcaactctggtcacaaagtattgctgatgtagctatagaagcttcattcacaccagaaaaaatcactttggtcaacaagaatgctcagataattctcaaactctgcttcagtgcaaagttcagacctactaagcaaaacaatcaagtggccattgtatataacatcacacttgatgcagatggattttcatccagagtaacctccagggggttatttaaagaaaacaatgaaaggtgcctgcagaagaatatggtagtaaatcaagcacagagttgccccgagcacatcatttatatacaggagccctctgatgttgtcaactctttggatttgcgtgtggacatcagtctggaaaaccctggcactagccctgcccttgaagcctattctgagactgccaaggtcttcagtattcctttccacaaagactgtggtgaggacggactttgcatttctgatctagtcctagatgtccgacaaataccagctgctcagttgatgggacagaagtaacatgccaggtggctgcatctcagaagtctgttgcctgcgatgtaggctaccctgctttaaagagagaacaacaggtgacttttactattaactttgacttcaatcttcaaaaccttcagaatcaggcgtctctcagtttccaagccttaagtgaaagccaagaagaaaacaaggctgataatttggtcaacctcaaaattcctctcctgtatgatgctgaaattcacttaacaagatctaccaacataaatttttatgaaatctcttcggatgggaatgttccttcaatcgtgcacagttttgaagatgttggtccaaaattcatcttctccctgaaggtaacaacaggaagtgttccagtaagcatggcaactgtaatcatccacatccctcagtataccaaagaaaagaacccactgatgtacctaactggggtgcaaacagacaaggctggtgacatcagttgtaatgcagatatcaatccactgaaaataggacaaacatcttcttctgtatctttcaaaagtgaaaatttcaggcacaccaaagaattgaactgcagaactgcttcctgtagtaatgttacctgctggttgaaagacgttcacatgaaaggagaatactttgttaatgtgactaccagaatttggaacgggactttcgcatcatcaacgttccagacagtacagctaacggcagctgcagaaatcaacacctataaccctgagatatatgtgattgaagataacactgttacgattcccctgatgataatgaaacctgatgagaaagccgaagtaccaacaggagttataataggaagtataattgctggaatccttttgctgttagctctggttgcaattttatggaagctcggcttcttcaaaagaaaatatgaaaagatgaccaaaaatccagatgagattgatgagaccacagagctcagtagctgaaccagcagacctacctgcagtgggaaccggcagcatcccagccagggtttgctg

SEQ ID NO: 14512 - DNA, 3674 bp, Homo sapiens
  source 1..3674: mol_type = unassigned DNA
gcaactacggtcccccggtcagacccaggatggggccagaacggacaggggccgcgccgctgccgctgctgctggtgttagcgctcagtcaaggcattttaaattgttgtttggcctacaatgttggtctcccagaagcaaaaatattttccggtccttcaagtgaacagtttggctatgcagtgcagcagtttataaatccaaaaggcaactggttactggttggttcaccctggagtggctttcctgagaaccgaatgggagatgtgtataaatgtcctgttgacctatccactgccacatgtgaaaaactaaatttgcaaacttcaacaagcattccaaatgttactgagatgaaaaccaacatgagcctcggcttgatcctcaccaggaacatgggaactggaggttttctcacatgtggtcctctgtgggcacagcaatgtgggaatcagtattacacaacgggtgtgtgttctgacatcagtcctgattttcagctctcagccagcttctcacctgcaactcagccctgcccttccctcatagatgttgtggttgtgtgtgatgaatcaaatagtatttatccttgggatgcagtaaagaattttttggaaaaatttgtacaaggcctggatataggccccacaaagacacaggtggggttaattcagtatgccaataatccaagagttgtgtttaacttgaacacatataaaaccaaagaagaaatgattgtagcaacatcccagacatcccaatatggtggggacctcacaaacacattcggagcaattcaatatgcaagaaaatatgcttattcagcagcttctggtgggcgacgaagtgctacgaaagtaatggtagttgtaactgacggtgaatcacatgatggttcaatgttgaaagctgtgattgatcaatgcaaccatgacaatatactgaggtttggcatagcagttcttgggtacttaaacagaaacgcccttgatactaaaaatttaataaaagaaataaaagcaatcgctagtattccaacagaaagatactttttcaatgtgtctgatgaagcagctctactagaaaaggctgggacattaggagaacaaattttcagcattgaaggtactgttcaaggaggagacaactttcagatggaaatgtcacaagtgggattcagtgcagattactcttctcaaaatgatattctgatgctgggtgcagtgggagcttttggctggagtgggaccattgtccagaagacatctcatggccatttgatctttcctaaacaagcctttgaccaaattctgcaggacagaaatcacagttcatatttaggttactctgtggctgcaatttctactggagaaagcactcactttgttgctggtgctcctcgggcaaattataccggccagatagtgctatatagtgtgaatgagaatggcaatatcacggttattcaggctcaccgaggtgaccagattggctcctattttggtagtgtgctgtgttcagttgatgtggataaagacaccattacagacgtgctcttggtaggtgcaccaatgtacatgagtgacctaaagaaagaggaaggaagagtctacctgtttactatcaaagagggcattttgggtcagcaccaatttcttgaaggccccgagggcattgaaaacactcgatttggttcagcaattgcagctctttcagacatcaacatggatggctttaatgatgtgattgttggttcaccactagaaaatcagaattctggagctgtatacatttacaatggtcatcagggcactatccgcacaaagtattcccagctgttgtgtactataatttcgtgtcaaacctgctcttttagaaaatcttgggatccgatggagcctttaggagccatctccagtactttgggaggtccttggatggctatggagatttaaatggggattccatcaccgatgtgtctattggtgcctttggacaagtggttcaactctggtcacaaagtattgctgatgtagctatagaagcttcattcacaccagaaaaaatcactttggtcaacaagaatgctcagataattctcaaactctgcttcagtgcaaagttcagacctactaagcaaaacaatcaagtggccattgtatataacatcacacttgatgcagatggattttcatccagagtaacctccagggggttatttaaagaaaacaatgaaaggtgcctgcagaagaatatggtagtaaatcaagcacagagttgccccgagcacatcatttatatacaggagccctctgatgttgtcaactctttggatttgcgtgtggacatcagtctggaaaaccctggcactagccctgcccttgaagcctattctgagactgccaaggtcttcagtattcctttccacaaagactgtggtgaggacggactttgcatttctgatctagtcctagatgtccgacaaataccagctgctcaagaacaaccctttattgtcagcaaccaaaacaaaaggttaacattttcagtaacgctgaaaaataaaagggaaagtgcatacaacactggaattgttgttgatttttcagaaaacttgttttttgcatcattctccctgccggttgatgggacagaagtaacatgccaggtggctgcatctcagaagtctgttgcctgcgatgtaggctaccctgctttaaagagagaacaacaggtgacttttactattaactttgacttcaatcttcaaaaccttcagaatcaggcgtctctcagtttccaagccttaagtgaaagccaagaagaaaacaaggctgataatttggtcaacctcaaaattcctctcctgtatgatgctgaaattcacttaacaagatctaccaacataaatttttatgaaatctcttcggatgggaatgttccttcaatcgtgcacagttttgaagatgttggtccaaaattcatcttctccctgaaggtaacaacaggaagtgttccagtaagcatggcaactgtaatcatccacatccctcagtataccaaagaaaagaacccactgatgtacctaactggggtgcaaacagacaaggctggtgacatcagttgtaatgcagatatcaatccactgaaaataggacaaacatcttcttctgtatctttcaaaagtgaaaatttcaggcacaccaaagaattgaactgcagaactgcttcctgtagtaatgttacctgctggttgaaagacgttcacatgaaaggagaatactttgttaatgtgactaccagaatttggaacgggactttcgcatcatcaacgttccagacagtacagctaacggcagctgcagaaatcaacacctataaccctgagatatatgtgattgaagataacactgttacgattcccctgatgataatgaaacctgatgagaaagccgaagtaccaacaggagttataataggaagtataattgctggaatccttttgctgttagctctggttgcaattttatggaagctcggcttcttcaaaagaaaatatgaaaagatgaccaaaaatccagatgagattgatgagaccacagagctcagtagctgaaccagcagacctacctgcagtgggaaccggcagcatcccagccagggtttgctgtttg

SEQ ID NO: 14513 - DNA, 3530 bp, Homo sapiens
  source 1..3530: mol_type = unassigned DNA
gcaactacggtcccccggtcagacccaggatggggccagaacggacaggggccgcgccgctgccgctgctgctggtgttagcgctcagtcaaggcattttaaattgttgtttggcctacaatgttggtctcccagaagcaaaaatattttccggtccttcaagtgaacagtttggctatgcagtgcagcagtttataaatccaaaaggcaactggttactggttggttcaccctggagtggctttcctgagaaccgaatgggagatgtgtataaatgtcctgttgacctatccactgccacatgtgaaaaactaaatttgcaaacttcaacaagcattccaaatgttactgagatgaaaaccaacatgagcctcggcttgatcctcaccaggaacatgggaactggaggttttctcacatgtggtcctctgtgggcacagcaatgtgggaatcagtattacacaacgggtgtgtgttctgacatcagtcctgattttcagctctcagccagcttctcacctgcaactcagccctgcccttccctcatagatgttgtggttgtgtgtgatgaatcaaatagtatttatccttgggatgcagtaaagaattttttggaaaaatttgtacaaggcctggatataggccccacaaagacacaggtggggttaattcagtatgccaataatccaagagttgtgtttaacttgaacacatataaaaccaaagaagaaatgattgtagcaacatcccagacatcccaatatggtggggacctcacaaacacattcggagcaattcaatatgcaagaaaatatgcttattcagcagcttctggtgggcgacgaagtgctacgaaagtaatggtagttgtaactgacggtgaatcacatgatggttcaatgttgaaagctgtgattgatcaatgcaaccatgacaatatactgaggtttggcatagcagttcttgggtacttaaacagaaacgcccttgatactaaaaatttaataaaagaaataaaagcaatcgctagtattccaacagaaagatactttttcaatgtgtctgatgaagcagctctactagaaaaggctgggacattaggagaacaaattttcagcattgaaggtactgttcaaggaggagacaactttcagatggaaatgtcacaagtgggattcagtgcagattactcttctcaaaatgatattctgatgctgggtgcagtgggagcttttggctggagtgggaccattgtccagaagacatctcatggccatttgatctttcctaaacaagcctttgaccaaattctgcaggacagaaatcacagttcatatttaggttactctgtggctgcaatttctactggagaaagcactcactttgttgctggtgctcctcgggcaaattataccggccagatagtgctatatagtgtgaatgagaatggcaatatcacggttattcaggctcaccgaggtgaccagattggctcctattttggtagtgtgctgtgttcagttgatgtggataaagacaccattacagacgtgctcttggtaggtgcaccaatgtacatgagtgacctaaagaaagaggaaggaagagtctacctgtttactatcaaagagggcattttgggtcagcaccaatttcttgaaggccccgagggcattgaaaacactcgatttggttcagcaattgcagctctttcagacatcaacatggatggctttaatgatgtgattgttggttcaccactagaaaatcagaattctggagctgtatacatttacaatggtcatcagggcactatccgcacaaagtattcccagaaaatcttgggatccgatggagcctttaggagccatctccagtactttgggaggtccttggatggctatggagatttaaatggggattccatcaccgatgtgtctattggtgcctttggacaagtggttcaactctggtcacaaagtattgctgatgtagctatagaagcttcattcacaccagaaaaaatcactttggtcaacaagaatgctcagataattctcaaactctgcttcagtgcaaagttcagacctactaagcaaaacaatcaagtggccattgtatataacatcacacttgatgcagatggattttcatccagagtaacctccagggggttatttaaagaaaacaatgaaaggtgcctgcagaagaatatggtagtaaatcaagcacagagttgccccgagcacatcatttatatacaggagccctctgatgttgtcaactctttggatttgcgtgtggacatcagtctggaaaaccctggcactagccctgcccttgaagcctattctgagactgccaaggtcttcagtattcctttccacaaagactgtggtgaggacggactttgcatttctgatctagtcctagatgtccgacaaataccagctgctcaagaacaaccctttattgtcagcaaccaaaacaaaaggttaacattttcagtaacgctgaaaaataaaagggaaagtgcatacaacactggaattgttgttgatttttcagaaaacttgttttttgcatcattctccctgccggttgatgggacagaagtaacatgccaggtggctgcatctcagaagtctgttgcctgcgatgtaggctaccctgctttaaagagagaacaacaggtgacttttactattaactttgacttcaatcttcaaaaccttcagaatcaggcgtctctcagtttccaagccttaagtgaaagccaagaagaaaacaaggctgataatttggtcaacctcaaaattcctctcctgtatgatgctgaaattcacttaacaaggtaacaacaggaagtgttccagtaagcatggcaactgtaatcatccacatccctcagtataccaaagaaaagaacccactgatgtacctaactggggtgcaaacagacaaggctggtgacatcagttgtaatgcagatatcaatccactgaaaataggacaaacatcttcttctgtatctttcaaaagtgaaaatttcaggcacaccaaagaattgaactgcagaactgcttcctgtagtaatgttacctgctggttgaaagacgttcacatgaaaggagaatactttgttaatgtgactaccagaatttggaacgggactttcgcatcatcaacgttccagacagtacagctaacggcagctgcagaaatcaacacctataaccctgagatatatgtgattgaagataacactgttacgattcccctgatgataatgaaacctgatgagaaagccgaagtaccaacaggagttataataggaagtataattgctggaatccttttgctgttagctctggttgcaattttatggaagctcggcttcttcaaaagaaaatatgaaaagatgaccaaaaatccagatgagattgatgagaccacagagctcagtagctgaaccagcagacctacctgcagtgggaaccggcagcatcccagccagggtttgctgtttg

SEQ ID NO: 14514 - DNA, 3334 bp, Homo sapiens
  source 1..3334: mol_type = unassigned DNA
attcctgcctgggaggttgtggaagaaggaagatggccagagctttgtgtccactgcaagccctctggcttctggagtgggtgctgctgctcttgggaccttgtgctgcccctccagcctgggccttgaacctggacccagtgcagctcaccttctatgcaggccccaatggcagccagtttggattttcactggacttccacaaggacagccatgggagagtggccatcgtggtgggcgccccgcggaccctgggccccagccaggaggagacgggcggcgtgttcctgtgcccctggagggccgagggcggccagtgcccctcgctgctctttgacctccgtgatgagacccgaaatgtaggctcccaaactttacaaaccttcaaggcccgccaaggactgggggcgtcggtcgtcagctggagcgacgtcattgtggcctgcgccccctggcagcactggaacgtcctagaaaagactgaggaggctgagaagacgcccgtaggtagctgctttttggctcagccagagagcggccgccgcgccgagtactccccctgtcgcgggaacaccctgagccgcatttacgtggaaaatgattttagctgggacaagcgttactgtgaagcgggcttcagctccgtggtcactcaggccggagagctggtgcttggggctcctggcggctattatttcttaggtctcctggcccaggctccagttgcggatattttctcgagttaccgcccaggcatccttttgtggcacgtgtcctcccagagcctctcctttgactccagcaacccagagtacttcgacggctactgggggtactcggtggccgtgggcgagttcgacggggatctcaacactacagaatatgtcgtcggtgcccccacttggagctggaccctgggagcggtggaaattttggattcctactaccagaggctgcatcggctgcgcggagagcagatggcgtcgtattttgggcattcagtggctgtcactgacgtcaacggggatgggaggcatgatctgctggtgggcgctccactgtatatggagagccgggcagaccgaaaactggccgaagtggggcgtgtgtatttgttcctgcagccgcgaggcccccacgcgctgggtgcccccagcctcctgctgactggcacacagctctatgggcgattcggctctgccatcgcacccctgggcgacctcgaccgggatggctacaatgacattgcagtggctgccccctacgggggtcccagtggccggggccaagtgctggtgttcctgggtcagagtgaggggctgaggtcacgtccctcccaggtcctggacagccccttccccacaggctctgcctttggcttctcccttcgaggtgccgtagacatcgatgacaacggatacccagacctgatcgtgggagcttacggggccaaccaggtggctgtgtacagagctcagccagtggtgaaggcctctgtccagctactggtgcaagattcactgaatcctgctgtgaagagctgtgtcctacctcagaccaagacacccgtgagctgcttcaacatccagatgtgtgttggagccactgggcacaacattcctcagaagctatccctaaatgccgagctgcagctggaccggcagaagccccgccagggccggcgggtgctgctgctgggctctcaacaggcaggcaccaccctgaacctggatctgggcggaaagcacagccccatctgccacaccaccatggccttccttcgagatgaggcagacttccgggacaagctgagccccattgtgctcagcctcaatgtgtccctaccgcccacggaggctggaatggcccctgctgtcgtgctgcatggagacacccatgtgcaggagcagacacgaatcgtcctggactgtggggaagatgacgtatgtgtgccccagcttcagctcactgccagcgtgacgggctccccgctcctagttggggcagataatgtcctggagctgcagatggacgcagccaacgagggcgagggggcctatgaagcagagctggccgtgcacctgccccagggcgcccactacatgcgggccctaagcaatgtcgagggctttgagagactcatctgtaatcagaagaaggagaatgagaccagggtggtgctgtgtgagctgggcaaccccatgaagaagaacgcccagataggaatcgcgatgttggtgagcgtggggaatctggaagaggctggggagtctgtgtccttccagctgcagatacggagcaagaacagccagaatccaaacagcaagattgtgctgctggacgtgccggtccgggcagaggcccaagtggagctgcgagggaactcctttccagcctccctggtggtggcagcagaagaaggtgagagggagcagaacagcttggacagctggggacccaaagtggagcacacctatgagctccacaacaatggccctgggactgtgaatggtcttcacctcagcatccaccttccgggacagtcccagccctccgacctgctctacatcctggatatacagccccaggggggccttcagtgcttcccacagcctcctgtcaaccctctcaaggtggactgggggctgcccatccccagcccctcccccattcacccggcccatcacaagcgggatcgcagacagatcttcctgccagagcccgagcagccctcgaggcttcaggatccagttctcgtaagctgcgactcggcgccctgtactgtggtgcagtgtgacctgcaggagatggcgcgcgggcagcgggccatggtcacggtgctggccttcctgtggctgcccagcctctaccagaggcctctggatcagtttgtgctgcagtcgcacgcatggttcaacgtgtcctccctcccctatgcggtgcccccgctcagcctgccccgaggggaagctcaggtgtggacacagctgctccgggccttggaggagagggccattccaatctggtgggtgctggtgggtgtgctgggtggcctgctgctgctcaccatcctggtcctggccatgtggaaggtcggcttcttcaagcggaaccggccacccctggaagaagatgatgaagagggggagtgatggtgcagcctacactattctagcaggagggttgggcgtgctacctgcaccgccccttctccaacaagttgcctccaagctttgggttggagctgttccattgggtcctcttggtgtcgtttccctcccaacagagctgggctaccccccctcctgctgcctaataaagagactgagccctg

SEQ ID NO: 14515 - DNA, 3232 bp, Homo sapiens
  source 1..3232: mol_type = unassigned DNA
attcctgcctgggaggttgtggaagaaggaagatggccagagctttgtgtccactgcaagccctctggcttctggagtgggtgctgctgctcttgggaccttgtgctgcccctccagcctgggccttgaacctggacccagtgcagctcaccttctatgcaggccccaatggcagccagtttggattttcactggacttccacaaggacagccatgggagagtggccatcgtggtgggcgccccgcggaccctgggccccagccaggaggagacgggcggcgtgttcctgtgcccctggagggccgagggcggccagtgcccctcgctgctctttgacctccgtgatgagacccgaaatgtaggctcccaaactttacaaaccttcaaggcccgccaaggactgggggcgtcggtcgtcagctggagcgacgtcattgtggcctgcgccccctggcagcactggaacgtcctagaaaagactgaggaggctgagaagacgcccgtaggtagctgctttttggctcagccagagagcggccgccgcgccgagtactccccctgtcgcgggaacaccctgagccgcatttacgtggaaaatgattttagctgggacaagcgttactgtgaagcgggcttcagctccgtggtcactcaggccggagagctggtgcttggggctcctggcggctattatttcttaggtctcctggcccaggctccagttgcggatattttctcgagttaccgcccaggcatccttttgtggcacgtgtcctcccagagcctctcctttgactccagcaacccagagtacttcgacggctactgggggtactcggtggccgtgggcgagttcgacggggatctcaacactacagaatatgtcgtcggtgcccccacttggagctggaccctgggagcggtggaaattttggattcctactaccagaggctgcatcggctgcgcggagagcagatggcgtcgtattttgggcattcagtggctgtcactgacgtcaacggggatgggaggcatgatctgctggtgggcgctccactgtatatggagagccgggcagaccgaaaactggccgaagtggggcgtgtgtatttgttcctgcagccgcgaggcccccacgcgctgggtgcccccagcctcctgctgactggcacacagctctatgggcgattcggctctgccatcgcacccctgggcgacctcgaccgggatggctacaatgacattgcagtggctgccccctacgggggtcccagtggccggggccaagtgctggtgttcctgggtcagagtgaggggctgaggtcacgtccctcccaggtcctggacagccccttccccacaggctctgcctttggcttctcccttcgaggtgccgtagacatcgatgacaacggatacccagacctgatcgtgggagcttacggggccaaccaggtggctgtgtacagagctcagccagtggtgaaggcctctgtccagctactggtgcaagattcactgaatcctgctgtgaagagctgtgtcctacctcagaccaagacacccgtgagctgcttcaacatccagatgtgtgttggagccactgggcacaacattcctcagaagctatccctaaatgccgagctgcagctggaccggcagaagccccgccagggccggcgggtgctgctgctgggctctcaacaggcaggcaccaccctgaacctggatctgggcggaaagcacagccccatctgccacaccaccatggccttccttcgagatgaggcagacttccgggacaagctgagccccattgtgctcagcctcaatgtgtccctaccgcccacggaggctggaatggcccctgctgtcgtgctgcatggagacacccatgtgcaggagcagacacgaatcgtcctggactgtggggaagatgacgtatgtgtgccccagcttcagctcactgccagcgtgacgggctccccgctcctagttggggcagataatgtcctggagctgcagatggacgcagccaacgagggcgagggggcctatgaagcagagctggccgtgcacctgccccagggcgcccactacatgcgggccctaagcaatgtcgagggctttgagagactcatctgtaatcagaagaaggagaatgagaccagggtggtgctgtgtgagctgggcaaccccatgaagaagaacgcccagataggaatcgcgatgttggtgagcgtggggaatctggaagaggctggggagtctgtgtccttccagctgcagatacggagcaagaacagccagaatccaaacagcaagattgtgctgctggacgtgccggtccgggcagaggcccaagtggagctgcgagggaactcctttccagcctccctggtggtggcagcagaagaaggtgagagggagcagaacagcttggacagctggggacccaaagtggagcacacctatgagctccacaacaatggccctgggactgtgaatggtcttcacctcagcatccaccttccgggacagtcccagccctccgacctgctctacatcctggatatacagccccaggggggccttcagtgcttcccacagcctcctgtcaaccctctcaaggtggactgggggctgcccatccccagcccctcccccattcacccggcccatcacaagcgggatcgcagacagatcttcctgccagagcccgagcagccctcgaggcttcaggatccagttctcgtaagctgcgactcggcgccctgtactgtggtgcagtgtgacctgcaggagatggcgcgcgggcagcgggccatggtcacggtgctggccttcctgtggctgcccagcctctaccaggtgtggacacagctgctccgggccttggaggagagggccattccaatctggtgggtgctggtgggtgtgctgggtggcctgctgctgctcaccatcctggtcctggccatgtggaaggtcggcttcttcaagcggaaccggccacccctggaagaagatgatgaagagggggagtgatggtgcagcctacactattctagcaggagggttgggcgtgctacctgcaccgccccttctccaacaagttgcctccaagctttgggttggagctgttccattgggtcctcttggtgtcgtttccctcccaacagagctgggctaccccccctcctgctgcctaataaagagactgagccctg

SEQ ID NO: 14516 - DNA, 1212 bp, Homo sapiens
  source 1..1212: mol_type = unassigned DNA
actgtgaagcgggcttcagctccgtggtcactcaggccggagagctggtgcttggggctcctggcggctattatttcttagggtactcggtggccgtgggcgagttcgacggggatctcaacactacagaatatgtcgtcggtgcccccacttggagctggaccctgggagcggtggaaattttggattcctactaccagaggctgcatcggctgcgcggagagcagatggcgtcgtattttgggcattcagtggctgtcactgacgtcaacggggatgggaggcatgatctgctggtgggcgctccactgtatatggagagccgggcagaccgaaaactggccgaagtggggcgtgtgtatttgttcctgcagccgcgaggcccccacgcgctgggtgcccccagcctcctgctgactggcacacagctctatgggcgattcggctctgccatcgcacccctgggcgacctcgaccgggatggctacaatgacattgcagtggctgccccctacgggggtcccagtggccggggccaagtgctggtgttcctgggtcagagtgaggggctgaggtcacgtccctcccaggtcctggacagccccttccccacaggctctgcctttggcttctcccttcgaggtgccgtagacatcgatgacaacggatacccaggtgccctggactgcctccagctagaaatgcccaagaaaggcccttggacattcgctggaagtgccaagagacacggccaggggctcatgcctggcctggtgtcccactatggactgccagaggggctgggtgaaacctccagtgggggaggtggtgtggggaacccctgggaagatgagatgaggatcccatgccctaatcgccaattctgacccattcctcgatgtctatagacctgatcgtgggagcttacggggccaaccaggtggctgtgtacagagctcagccagtggtgaaggcctctgtccagctactggtgcaagattcactgaatcctgctgtgaagagctgtgtcctacctcagaccaagacacccgtgagctgcttcaacatccagatgtgtgttggagccactgggcacaacattcctcagaagctatccctaaatgccgagctgcagctggaccggcagaagccccgccagggccggcgggtgctgctgctgggctctcaacaggcaggcaccaccctgaacct

SEQ ID NO: 14517 - DNA, 4884 bp, Homo sapiens
  source 1..4884: mol_type = unassigned DNA
tttccccggaaggaaagcgcagcccgggctgggctcgcaaggtggggaggtgcgggactgggcgtggggaggcggggcgcgcgccgggggacccctccctcctgtcctccttgcggtcgaccggtgcgcttgccagatccgccgcgaagccgggatcgaaggcgacagcgcggccaagggggcgcggccgggacaagctgggggccggttgcccggggcagggacggcggcgacccggccgctggggaggcaggaagatagacccacggatcttaggaagggatccgagagcgcagctgtgaaactggctggggctgggggcacgaaaccgatcagcgctacggagcgcagcggccggcgggttccagtgtcctccggcggcgcggggagcaggtgaacaggtcctcacgcccagctccgcgccctcacgcgctctcgccgggaccccgcttccgctggcagccatgggccccggccccagccgcgcgccccgcgccccacgcctgatgctctgtgcgctcgccttgatggtggcggccggcggctgcgtcgtctccgccttcaacctggatacccgattcctggtagtgaaggaggccgggaacccgggcagcctcttcggctactcggtcgccctccatcggcagacagagcggcagcagcgctacctgctcctggctggtgccccccgggagctcgctgtgcccgatggctacaccaaccggactggtgctgtgtacctgtgcccactcactgcccacaaggatgactgtgagcggatgaacatcacagtgaaaaatgaccctggccatcacattattgaggacatgtggcttggagtgactgtggccagccagggccctgcaggcagagttctggtctgtgcccaccgctacacccaggtgctgtggtcagggtcagaagaccagcggcgcatggtgggcaagtgctacgtgcgaggcaatgacctagagctggactccagtgatgactggcagacctaccacaacgagatgtgcaatagcaacacagactacctggagacgggcatgtgccagctgggcaccagcggtggcttcacccagaacactgtgtacttcggcgcccccggtgcctacaactggaaaggaaacagctacatgattcagcgcaaggagtgggacttatctgagtatagttacaaggacccagaggaccaaggaaacctctatattgggtacacgatgcaggtaggcagcttcatcctgcaccccaaaaacatcaccattgtgacaggtgccccacggcaccgacatatgggcgcggtgttcttgctgagccaggaggcaggcggagacctgcggaggaggcaggtgctggagggctcgcaggtgggcgcctattttggcagcgccattgccctggcagacctgaacaatgatgggtggcaggacctcctggtgggcgccccctactacttcgagaggaaagaggaagtagggggtgccatctatgtcttcatgaaccaggcgggaacctccttccctgctcacccctcactccttcttcatggccccagtggctctgcctttggtttatctgtggccagcattggtgacatcaaccaggatggatttcaggatattgctgtgggagctccgtttgaaggcttgggcaaagtgtacatctatcacagtagctctaaggggctccttagacagccccagcaggtaatccatggagagaagctgggactgcctgggttggccaccttcggctattccctcagtgggcagatggatgtggatgagaacttctacccagaccttctagtgggaagcctgtcagaccacattgtgctgctgcgggcccggcccgtcatcaacatcgtccacaagaccttggtgcccaggccagctgtgctggaccctgcactttgcacggccacctcttgtgtgcaagtggagctgtgctttgcttacaaccagagtgccgggaaccccaactacaggcgaaacatcaccctggcctacactctggaggctgacagggaccgccggccgccccggctccgctttgccggcagtgagtccgctgtcttccacggcttcttctccatgcccgagatgcgctgccagaagctggagctgctcctgatggacaacctccgtgacaaactccgccccatcatcatctccatgaactactctttacctttgcggatgcccgatcgcccccggctggggctgcggtccctggacgcctacccgatcctcaaccaggcacaggctctggagaaccacactgaggtccagttccagaaggagtgcgggcctgacaacaagtgtgagagcaacttgcagatgcgggcagccttcgtgtcagagcagcagcagaagctgagcaggctccagtacagcagagacgtccggaaattgctcctgagcatcaacgtgacgaacacccggacctcggagcgctccggggaggacgcccacgaggcgctgctcaccctggtggtgcctcccgccctgctgctgtcctcagtgcgcccccccggggcctgccaagctaatgagaccatcttttgcgagctggggaaccccttcaaacggaaccagaggatggagctgctcatcgcctttgaggtcatcggggtgaccctgcacacaagggaccttcaggtgcagctgcagctctccacgtcgagtcaccaggacaacctgtggcccatgatcctcactctgctggtggactatacactccagacctcgcttagcatggtaaatcaccggctacaaagcttctttggggggacagtgatgggtgagtctggcatgaaaactgtggaggatgtaggaagccccctcaagtatgaattccaggtgggcccaatgggggaggggctggtgggcctggggaccctggtcctaggtctggagtggccctacgaagtcagcaatggcaagtggctgctgtatcccacggagatcaccgtccatggcaatgggtcctggccctgccgaccacctggagaccttatcaaccctctcaacctcactctttctgaccctggggacaggccatcatccccacagcgcaggcggcgacagctggatccagggggaggccagggccccccacctgtcactctggctgctgccaaaaaagccaagtctgagactgtgctgacctgtgccacagggcgtgcccactgtgtgtggctagagtgccccatccctgatgcccccgttgtcaccaacgtgactgtgaaggcacgagtgtggaacagcaccttcatcgaggattacagagactttgaccgagtccgggtaaatggctgggctaccctattcctccgaaccagcatccccaccatcaacatggagaacaagaccacgtggttctctgtggacattgactcggagctggtggaggagctgccggccgaaatcgagctgtggctggtgctggtggccgtgggtgcagggctgctgctgctggggctgatcatcctcctgctgtggaagtgtgacttctttaagcggacccgctattatcagatcatgcccaagtaccacgcagtgcggatccgggaggaggagcgctacccacctccagggagcaccctgcccaccaagaagcactgggtgaccagctggcagactcgggaccaatactactgacgtcctccctgatcccaccccctcctcccccagtgtcccctttcttcctatttatcataagttatgcctctgacagtccacaggggccaccacctttggctggtagcagcaggctcaggcacatacacctcgtcaagagcatgcacatgctgtctggccctggggatcttcccacaggagggccagcgctgtggaccttacaacgccgagtgcactgcattcctgtgccctagatgcacgtggggcccactgctcgtggactgtgctggtgcatcacggatggtgcatgggctcgccgtgtctcagcctctgccagcgccaaaacaagccaaagagcctcccaccagagccgggaggaaaaggcccctgcaatgtggtgacacctccccctttcacactggatccatcttgagccacagtcactggattgactttgctgtcaaaactactgacagggagcagcccccgggccgctggctggtgggcccccaatgacacccatgccagagaggtggggatcctgcctaaggttgtctacgggggcacttggaggacctggcgtgctcagacccaacagcaaaggaactagaaagaaggacccagaacggcttgctttcctgcatctctgtgaagcctctctccttggccacagactgaactcgcagggaatgcagcaggaaggaacaaagacaggcaaacggcaacgtagcctgggctcactgtgctggggcacggcgggatcctccacagagaggaggggaccaattctggacagacagatgttgggaggatacagaggagatgccacttctcactcaccactaccagccagcctcagaaggccccagagagaccctgcaagaccacggagggagcgacacttgaatgtagaataggcagggggccctgccccaccccatccagccagaccccacgctgaccatgcgtcaggggcctagaggtggagttcttagctatccttggctttcagagccagcctggctctgccccctcccccatgggctgtgtcctaaggcccatttgagaagctgaggctagttccagaaaacctctcctgacccctgcctgttggcaggcccactccccagccccagccccttccatggtactgtagcaggggaattccctccccctccttgtgccttctttgtatataggcttctcacggcgaccaataaacagctcccagtttgtatgc

SEQ ID NO: 14518 - DNA, 4888 bp, Homo sapiens
  source 1..4888: mol_type = unassigned DNA
agatccgccgcgaagccgggatcgaaggcgacagcgcggccaagggggcgcggccgggacaagctgggggccggttgcccggggcagggacggcggcgacccggccgctggggaggcaggaagatagacccacggatcttaggaagggatccgagagcgcagctgtgaaactggctggggctgggggcacgaaaccgatcagcgctacggagcgcagcggccggcgggttccagtgtcctccggcggcgcggggagcaggtgaacaggtcctcacgcccagctccgcgccctcacgcgctctcgccgggaccccgcttccgctggcagccatgggccccggccccagccgcgcgccccgcgccccacgcctgatgctctgtgcgctcgccttgatggtggcggccggcggctgcgtcgtctccgccttcaacctggatacccgattcctggtagtgaaggaggccgggaacccgggcagcctcttcggctactcggtcgccctccatcggcagacagagcggcagcagcgctacctgctcctggctggtgccccccgggagctcgctgtgcccgatggctacaccaaccggactggtgctgtgtacctgtgcccactcactgcccacaaggatgactgtgagcggatgaacatcacagtgaaaaatgaccctggccatcacattattgaggacatgtggcttggagtgactgtggccagccagggccctgcaggcagagttctggtctgtgcccaccgctacacccaggtgctgtggtcagggtcagaagaccagcggcgcatggtgggcaagtgctacgtgcgaggcaatgacctagagctggactccagtgatgactggcagacctaccacaacgagatgtgcaatagcaacacagactacctggagacgggcatgtgccagctgggcaccagcggtggcttcacccagaacactgtgtacttcggcgcccccggtgcctacaactggaaaggaaacagctacatgattcagcgcaaggagtgggacttatctgagtatagttacaaggacccagaggaccaaggaaacctctatattgggtacacgatgcaggtaggcagcttcatcctgcaccccaaaaacatcaccattgtgacaggtgccccacggcaccgacatatgggcgcggtgttcttgctgagccaggaggcaggcggagacctgcggaggaggcaggtgctggagggctcgcaggtgggcgcctattttggcagcgccattgccctggcagacctgaacaatgatgggtggcaggacctcctggtgggcgccccctactacttcgagaggaaagaggaagtagggggtgccatctatgtcttcatgaaccaggcgggaacctccttccctgctcacccctcactccttcttcatggccccagtggctctgcctttggtttatctgtggccagcattggtgacatcaaccaggatggatttcaggatattgctgtgggagctccgtttgaaggcttgggcaaagtgtacatctatcacagtagctctaaggggctccttagacagccccagcaggtaatccatggagagaagctgggactgcctgggttggccaccttcggctattccctcagtgggcagatggatgtggatgagaacttctacccagaccttctagtgggaagcctgtcagaccacattgtgctgctgcgggcccggcccgtcatcaacatcgtccacaagaccttggtgcccaggccagctgtgctggaccctgcactttgcacggccacctcttgtgtgcaagtggagctgtgctttgcttacaaccagagtgccgggaaccccaactacaggcgaaacatcaccctggcctacactctggaggctgacagggaccgccggccgccccggctccgctttgccggcagtgagtccgctgtcttccacggcttcttctccatgcccgagatgcgctgccagaagctggagctgctcctgatggacaacctccgtgacaaactccgccccatcatcatctccatgaactactctttacctttgcggatgcccgatcgcccccggctggggctgcggtccctggacgcctacccgatcctcaaccaggcacaggctctggagaaccacactgaggtccagttccagaaggagtgcgggcctgacaacaagtgtgagagcaacttgcagatgcgggcagccttcgtgtcagagcagcagcagaagctgagcaggctccagtacagcagagacgtccggaaattgctcctgagcatcaacgtgacgaacacccggacctcggagcgctccggggaggacgcccacgaggcgctgctcaccctggtggtgcctcccgccctgctgctgtcctcagtgcgcccccccggggcctgccaagctaatgagaccatcttttgcgagctggggaaccccttcaaacggaaccagaggatggagctgctcatcgcctttgaggtcatcggggtgaccctgcacacaagggaccttcaggtgcagctgcagctctccacgtcgagtcaccaggacaacctgtggcccatgatcctcactctgctggtggactatacactccagacctcgcttagcatggtaaatcaccggctacaaagcttctttggggggacagtgatgggtgagtctggcatgaaaactgtggaggatgtaggaagccccctcaagtatgaattccaggtgggcccaatgggggaggggctggtgggcctggggaccctggtcctaggtctggagtggccctacgaagtcagcaatggcaagtggctgctgtatcccacggagatcaccgtccatggcaatgggtcctggccctgccgaccacctggagaccttatcaaccctctcaacctcactctttctgaccctggggacaggccatcatccccacagcgcaggcggcgacagctggatccagggggaggccagggccccccacctgtcactctggctgctgccaaaaaagccaagtctgagactgtgctgacctgtgccacagggcgtgcccactgtgtgtggctagagtgccccatccctgatgcccccgttgtcaccaacgtgactgtgaaggcacgagtgtggaacagcaccttcatcgaggattacagagactttgaccgagtccgggtaaatggctgggctaccctattcctccgaaccagcatccccaccatcaacatggagaacaagaccacgtggttctctgtggacattgactcggagctggtggaggagctgccggccgaaatcgagctgtggctggtgctggtggccgtgggtgcagggctgctgctgctggggctgatcatcctcctgctgtggaagtgcggcttcttcaagcgagcccgcactcgcgccctgtatgaagctaagaggcagaaggcggagatgaagagccagccgtcagagacagagaggctgaccgacgactactgagggggcagccccccgcccccggcccacctggtgtgacttctttaagcggacccgctattatcagatcatgcccaagtaccacgcagtgcggatccgggaggaggagcgctacccacctccagggagcaccctgcccaccaagaagcactgggtgaccagctggcagactcgggaccaatactactgacgtcctccctgatcccaccccctcctcccccagtgtcccctttcttcctatttatcataagttatgcctctgacagtccacaggggccaccacctttggctggtagcagcaggctcaggcacatacacctcgtcaagagcatgcacatgctgtctggccctggggatcttcccacaggagggccagcgctgtggaccttacaacgccgagtgcactgcattcctgtgccctagatgcacgtggggcccactgctcgtggactgtgctggtgcatcacggatggtgcatgggctcgccgtgtctcagcctctgccagcgccaaaacaagccaaagagcctcccaccagagccgggaggaaaaggcccctgcaatgtggtgacacctccccctttcacactggatccatcttgagccacagtcactggattgactttgctgtcaaaactactgacagggagcagcccccgggccgctggctggtgggcccccaatgacacccatgccagagaggtggggatcctgcctaaggttgtctacgggggcacttggaggacctggcgtgctcagacccaacagcaaaggaactagaaagaaggacccagaacggcttgctttcctgcatctctgtgaagcctctctccttggccacagactgaactcgcagggaatgcagcaggaaggaacaaagacaggcaaacggcaacgtagcctgggctcactgtgctggggcacggcgggatcctccacagagaggaggggaccaattctggacagacagatgttgggaggatacagaggagatgccacttctcactcaccactaccagccagcctcagaaggccccagagagaccctgcaagaccacggagggagcgacacttgaatgtagaataggcagggggccctgccccaccccatccagccagaccccacgctgaccatgcgtcaggggcctagaggtggagttcttagctatccttggctttcagagccagcctggctctgccccctcccccatgggctgtgtcctaaggcccatttgagaagctgaggctagttccagaaaacctctcctgacccctgcctgttggcaggcccactccccagccccagccccttccatggtactgtagcaggggaattccctccccctccttgtgccttctttgtatataggcttctcacggcgaccaataaacagctcccagtttgt

SEQ ID NO: 14519 - DNA, 3448 bp, Homo sapiens
  source 1..3448: mol_type = unassigned DNA
tttccccggaaggaaagcgcagcccgggctgggctcgcaaggtggggaggtgcgccccacgcctgatgctctgtgcgctcgccttgatggtggcggccggcggctgcgtcgtctccgccttcaacctggatacccgattcctggtagtgaaggaggccgggaacccgggcagcctcttcggctactcggtcgccctccatcggcagacagagcggcagcagcgctacctgctcctggctggtgccccccgggagctcgctgtgcccgatggctacaccaaccggactggtgctgtgtacctgtgcccactcactgcccacaaggatgactgtgagcggatgaacatcacagtgaaaaatgaccctggccatcacattattgaggacatgtggcttggagtgactgtggccagccagggccctgcaggcagagttctggtctgtgcccaccgctacacccaggtgctgtggtcagggtcagaagaccagcggcgcatggtgggcaagtgctacgtgcgaggcaatgacctagagctggactccagtgatgactggcagacctaccacaacgagatgtgcaatagcaacacagactacctggagacgggcatgtgccagctgggcaccagcggtggcttcacccagaacactgtgtacttcggcgcccccggtgcctacaactggaaaggaaacagctacatgattcagcgcaaggagtgggacttatctgagtatagttacaaggacccagaggaccaaggaaacctctatattgggtacacgatgcaggtaggcagcttcatcctgcaccccaaaaacatcaccattgtgacaggtgccccacggcaccgacatatgggcgcggtgttcttgctgagccaggaggcaggcggagacctgcggaggaggcaggtgctggagggctcgcaggtgggcgcctattttggcagcgccattgccctggcagacctgaacaatgatgggtggcaggacctcctggtgggcgccccctactacttcgagaggaaagaggaagtagggggtgccatctatgtcttcatgaaccaggcgggaacctccttccctgctcacccctcactccttcttcatggccccagtggctctgcctttggtttatctgtggccagcattggtgacatcaaccaggatggatttcaggatattgctgtgggagctccgtttgaaggcttgggcaaagtgtacatctatcacagtagctctaaggggctccttagacagccccagcaggtaatccatggagagaagctgggactgcctgggttggccaccttcggctattccctcagtgggcagatggatgtggatgagaacttctacccagaccttctagtgggaagcctgtcagaccacattgtgctgctgcgggcccggcccgtcatcaacatcgtccacaagaccttggtgcccaggccagctgtgctggaccctgcactttgcacggccacctcttgtgtgcaagtggagctgtgctttgcttacaaccagagtgccgggaaccccaactacaggcgaaacatcaccctggcctacactctggaggctgacagggaccgccggccgccccggctccgctttgccggcagtgagtccgctgtcttccacggcttcttctccatgcccgagatgcgctgccagaagctggagctgctcctgatggacaacctccgtgacaaactccgccccatcatcatctccatgaactactctttacctttgcggatgcccgatcgcccccggctggggctgcggtccctggacgcctacccgatcctcaaccaggcacaggctctggagaaccacactgaggtccagttccagaaggagtgcgggcctgacaacaagtgtgagagcaacttgcagatgcgggcagccttcgtgtcagagcagcagcagaagctgagcaggctccagtacagcagagacgtccggaaattgctcctgagcatcaacgtgacgaacacccggacctcggagcgctccggggaggacgcccacgaggcgctgctcaccctggtggtgcctcccgccctgctgctgtcctcagtgcgcccccccggggcctgccaagctaatgagaccatcttttgcgagctggggaaccccttcaaacggaaccagaggatggagctgctcatcgcctttgaggtcatcggggtgaccctgcacacaagggaccttcaggtgcagctgcagctctccacgtcgagtcaccaggacaacctgtggcccatgatcctcactctgctggtggactatacactccagacctcgcttagcatggtaaatcaccggctacaaagcttctttggggggacagtgatgggtgagtctggcatgaaaactgtggaggatgtaggaagccccctcaagtatgaattccaggtgggcccaatgggggaggggctggtgggcctggggaccctggtcctaggtctggagtggccctacgaagtcagcaatggcaagtggctgctgtatcccacggagatcaccgtccatggcaatgggtcctggccctgccgaccacctggagaccttatcaaccctctcaacctcactctttctgaccctggggacaggccatcatccccacagcgcaggcggcgacagctggatccagggggaggccagggccccccacctgtcactctggctgctgccaaaaaagccaagtctgagactgtgctgacctgtgccacagggcgtgcccactgtgtgtggctagagtgccccatccctgatgcccccgttgtcaccaacgtgactgtgaaggcacgagtgtggaacagcaccttcatcgaggattacagagactttgaccgagtccgggtaaatggctgggctaccctattcctccgaaccagcatccccaccatcaacatggagaacaagaccacgtggttctctgtggacattgactcggagctggtggaggagctgccggccgaaatcgagctgtggctggtgctggtggccgtgggtgcagggctgctgctgctggggctgatcatcctcctgctgtggaagtgcggcttcttcaagcgagcccgcactcgcgccctgtatgaagctaagaggcagaaggcggagatgaagagccagccgtcagagacagagaggctgaccgacgactactgagggggcagccccccgcccccggcccacctggtgtgacttctttaagcggacccgctattatcagatcatgcccaagtaccacgcagtgcggatccgggaggaggagcgctacccacctccagggagcaccctgcccaccaagaagcactgggtgaccagctggcagactcgggaccaatactactgacgtcctccctgatcccaccccctcctcccccagtgtcccctttcttcctatttatcataagttatgcctctgacagtccaca

SEQ ID NO: 14520 - DNA, 1810 bp, Homo sapiens
  source 1..1810: mol_type = unassigned DNA
ctttccccggaaggaaagcgcagcccgggctgggctcgcaagccatgggccccggccccagccgcgcgccccgcgccccacgcctgatgctctgtgcgctcgccttgatggtggcggccggcggctgcgtcgtctccgccttcaacctggatacccgattcctggtagtgaaggaggccgggaacccgggcagcctcttcggctactcggtcgccctccatcggcagacagagcggcagcagcgctacctgctcctggctggtgccccccgggagctcgctgtgcccgatggctacaccaaccggactggtgctgtgtacctgtgcccactcactgcccacaaggatgactgtgagcggatgaacatcacagtgaaaaatgaccctggccatcacattattgaggacatgtggcttggagtgactgtggccagccagggccctgcaggcagagttctggaaacagctacatgattcagcgcaaggagtgggacttatctgagtatagttacaaggacccagaggaccaaggaaacctctatattgggtacacgatgcaggtaggcagcttcatcctgcaccccaaaaacatcaccattgtgacaggtgccccacggcaccgacatatgggcgcggtgttcttgctgagccaggaggcaggcggagacctgcggaggaggcaggtgctggagggctcgcaggtgggcgcctattttggcagcgccattgccctggcagacctgaacaatgatgggtggcaggacctcctggtgggcgccccctactacttcgagaggaaagaggaagtagggggtgccatctatgtcttcatgaaccaggcgggaacctccttccctgctcacccctcactccttcttcatggccccagtggctctgcctttggtttatctgtggccagcattggtgacatcaaccaggatggatttcaggatattgctgtgggagctccgtttgaaggcttgggcaaagtgtacatctatcacagtagctctaaggggctccttagacagccccagcaggtaatccatggagagaagctgggactgcctgggttggccaccttcggctattccctcagtgggcagatggatgtggatgagaacttctacccagaccttctagtgggaagcctgtcagaccacattgtgctgctgcgggcccggcccgtcatcaacatcgtccacaagaccttggtgcccaggccagctgtgctggaccctgcactttgcacggccacctcttgtgtgcaagtggagctgtgctttgcttacaaccagagtgccgggaaccccaactacaggcgaaacatcagtgagtgctggggtgcagcgtaaaaggggtacgctcccctgtccccttgctgaccaccctgtctacctgtagccctggcctacactctggaggctgacagggaccgccggccgccccggctccgctttgccggcagtgagtccgctgtcttccacggcttcttctccatgcccgagatgcgctgccagaagctggagctgctcctgatggacaacctccgtgacaaactccgccccatcatcatctccatgaactactctttacctttgcggatgcccgatcgcccccggctggggctgcggtccctggacgcctacccgatcctcaaccaggcacaggctctggagaaccacactgaggtccagttccagaaggagtgcgggcctgacaacaagtgtgagagcaacttgcagatgcgggcagccttcgtgtcagagcagcagcagaagctgagcaggctccagtacagcagagacgtc

SEQ ID NO: 14521 - DNA, 7889 bp, Homo sapiens
  source 1..7889: mol_type = unassigned DNA
ccggcccgggacccgctcgcgcagacttctcgggcggactgaggacgccgccgctcggggccgcccctgtgctcgccttcagcgcccgctcagcccgccgtccgcgccccggtggcgggcccgacgcccgcattccgcccgtgtccaggcgcagagctcccgccccggggagcttcctggccgtcggcgggccccgcggcccgcgcgctcggcgccctgctcgccgggcagaggggaaggcggcggccggctggggatgggcggcccggctgcgccgaggggcgccgggaggctccgcgcgctgctgctggcgctggtggtcgcggggatccccgcgggcgcctacaacctcgacccgcagcgccccgtgcacttccagggccccgctgactcgttcttcggctacgcagttctggagcatttccacgacaacacgcgctgggtccttgtgggcgcaccaaaggcagattccaaatacagcccttcagtgaagtctcctggggctgtgtttaagtgccgtgttcacaccaaccctgaccggagatgcaccgaactggacatggctcgagggaagaatcggggcacgtcctgcggaaagacctgccgggaagaccgcgatgatgagtggatgggggtgagcctggcccgacagcccaaggctgatggccgtgtgttggcctgtgctcatcgctggaagaacatctactatgaagccgaccacatcctaccccatggcttctgctacatcatcccctccaacctccaggccaaaggcaggacgctgatcccttgctatgaagagtataagaagaagtacggagaggaacacggctcctgccaggctgggatagcgggcttcttcaccgaggagctggtggtgatgggtgctccagggtcattttattgggctggaaccatcaaagtgctgaaccttacggacaacacctatttaaaactgaacgacgaagtgatcatgaacaggcggtacacctacctgggctacgcagtgaccgctggccacttctctcacccgtccaccattgatgtggtaggaggtgccccacaggacaaaggcatcggcaaggtttatattttcagagctgaccgaagatcaggcaccttaattaagatctttcaagcatcaggtaaaaagatgggctcttacttcggctcctccttgtgcgcagttgacctgaatggggacggcctctctgacctgctggtgggggcccccatgttttctgagatcagggatgagggacaggtcactgtctacatcaacagaggaaatggagccctcgaggagcagctggctctgactggggatggtgcctacaatgcgcactttggagagagcattgccagcctggacgatctggacaatgatgggttcccagatgtggccattggtgcacccaaggaggatgacttcgcaggggcggtctatatctatcatggtgatgccggtgggatagtccctcagtactcaatgaaactgtctgggcagaagataaatccagtgctccggatgtttggtcagtccatatcgggaggcattgatatggatggaaatggctatcctgatgtcactgttggagccttcatgtccgacagcgtggttcttctcagagcaaggcctgtcattacggtggatgtctccatcttcctcccgggctccatcaacatcacagcgcctcagtgtcacgacggacagcagcctgtgaactgcctgaacgtcaccacctgcttcagcttccatggcaaacacgttccaggagagattggcctgaattatgttctgatggctgacgtggccaaaaaggagaagggccagatgcccagggtctactttgtgctgctgggagagaccatgggtcaggtcacagagaagctgcagctgacttacatggaggagacgtgtcgtcactatgtggcccatgtgaagcggagggtgcaggacgtcatcagcccgatcgtgtttgaagcagcctacagcctcagtgagcatgtgactggagaggaggagagggaactgccgcctctgacaccagttctccgctggaaaaagggacaaaagattgcccaaaagaatcagactgtttttgaaaggaattgccgttcagaggactgtgccgcagacctgcagcttcagggtaaactgctgctctccagtatggatgagaaaaccctgtatctagctttgggggctgtgaagaacatctccctaaacatctctatctccaacctcggagatgatgcctatgatgccaacgtgtccttcaatgtttcccgggagctcttcttcatcaacatgtggcagaaggaggagatgggcatctcctgtgagctgctggaatcggacttcctcaaatgcagcgtgggatttcctttcatgaggtcaaagtcaaagtatgaattcagcgtgatctttgatacaagccacctgtctggggaagaggaagttctcagcttcattgttactgctcagagtggcaacacggagcgctctgaatccctgcatgacaacaccctcgtgctgatggtgccactgatgcacgaggtggacacgtccatcaccggaatcatgtctccaacctcctttgtatatggcgagtccgtggacgcagccaacttcattcagctggatgacctggagtgtcactttcagcccatcaatatcacccttcaggtctacaacactggcccaagcacccttccagggtcatctgtcagcatctctttccctaatcgactctcatctggtggtgcagagatgtttcatgtccaggaaatggtggtgggccaagagaagggaaactgctctttccagaaaaacccaactccctgcatcatccctcaagaacaagaaaatatcttccacacaatatttgcttttttcacaaagtctggaagaaaagtcttggactgtgaaaaaccaggaatttcttgcctaacagcacactgtaactttagtgctcttgctaaagaagaaagtcgtactatagacatttacatgctgctgaacacagaaatactgaaaaaggacagttcgtctgtcatccagttcatgtcccgcgccaaggtgaaggtggatcctgccctaagggtggtggaaatagctcatgggaacccagaagaggtgacggtggtcttcgaggccctgcacaatctggagccccgtggctacgtcgtggggtggatcatcgccatcagtttgttggtgggaatcctcatcttcctgctgctggccgtgctgctctggaagatgggcttctttcgccgaaggtacaaagaaattatcgaagctgagaagaaccggaaagagaatgaagacagttgggactgggtccagaaaaaccagtgagctgccacaccagtcacatgacctgatcactagcctgtcatccttggtctttgtatcttccatatttggaagaaaaaaatcttctccagatttttcggaggccccactgatgctgttctcttcttcattctatcaagcccaggtgccagcctgaggcagccacttcggccaggtcacacgaccggggccagcaccacttcctttaaagatgaactctgaactttggagagtgagctacagagccgagcaatatttatggatgcaacacgcatggtcaaccctcaggggaaaactgttacctaaagtatttttataaatataagccttttatactgattatgtcttttatatttgtatcgatgttttattatttctattaaatagttatataattcactcaagcactgatatctggcctaaaatcttggaagtacatgtccatgaatacaaattttaaaggatgaaaatcttaccgtactttggaacttgctgtttaaaaagacagatgaaataagttgaagaaacctcatgtaatgaatccaccaggctggcagtggtgcatataaactgtgggtgtggcaagaccccgaagacatttcacatctttatcgcctcgatcaagtgtggagtcacatgctaatgtgtgctaaagaactgtaagtgttttttcatatgtacttttcattggaagattcccaacaagaatttggatggaaaacctgatccctagcaagaagtctgctctgtatcacctttatatagcagacatgtcaccctgcttctacacagatgatggatgaaagcttggagcaatgccatgtggtcatctggtaaacctcagaatggcgtctcatcctggacatcctgcatcagagttcacacaccacaaggactaaatccttgtcccctaagcaaagaattgggtctgaatgctgtgagggattgcctttttgtggtaattttcattgagagatcttcatttcccctaccaccctggctgtcccagctagtggtgattgcagattccttcccagagaggacatttaaccgttttaaaaaaaatgtcttagattgggttcccaagaagcagtccctgaaacaaggatttgtgtgcaagtaacttattaaggaagtattcccaggggataccagtaagagagtgggggaagcaggacaaggaaggagacaaagccaggcaaatgtttgtcatttcagggagagctccatgaagtttagcctcagcctgatcaggggaactccggaggaaaagttaggcctcagaggtgtcccaacctgaatcaaggggctggctgcacccagaggagatgtaaacgttttattctcaattcctgctggcgtaatggctccagtagctcaggacagtcctctaaaggacaaccacagatgcatcctcagccaggggagacacagggaaatgatgcaaaagaaatgatgcaaaggatctgagcagaacactgcccctccccaccccctgaatgtgtgagtgctgagttacggccttcagtatccaagctctctgtttgacagtagatatattgtcagatgcactgtgctgcttagttttgagtgcagtgtgattttctgaaagggcaatgagatgatggatgtagcatgctcagcactgacctggcccatagtgatcactcaataactgttaacagctatggctgctattcctactgatggataaccatctaataagacagaaaacatggggctaagagcagggtctaacggagtcttaatggcttattacagcctgccaaagtgccagctacatacacatggcatccagtgcggatgaaacaatctataaaaccaagggtctttcttatagcaccttttttactggaagctaacacgttgggagtccgtgaacattgtcaaaaagacatcaaactcaacttctgggaagacagatttttaatacacatacttggctaatactcacaaacatatctaaagttttggcaaaattatgagggtgatgggtgggtactaacctggcatggagcaggtgtgtcttttggtttcttatgcagttgactctgctgcagggagattacagatgtaacctcatgcttctcttcctggtgaacatgggaatagaccaaaaaaatcaagggtcaatggcatgaactaagctgatcctggaaatcagggatgttgcatctaactgtgggatggaggcacagaggtagctacagggagcaggacgaggcaaagaaagcagctgtcactcagagttcgcttatgagttttatcaaaagcagcaagaaaagcagtcttgggtgggttttatcacttattaacagccatttatgaggcccctgctgtgtgtcaggcactgtgcaaggtgctggaggttccccagagaacacttcagggacattttgcctcagggtggcaaaatgcagtggcatgtggactttttgaatgggatgccatttgcagctttcctttgatggactcttgttcataatgccatgttttctttaatgaatcatttaggattcttaggtgatatttctggaacagcaccatcaacagctttggccacatgcacttagagcaactaacttgcctcctgccggggtgtaggtgcgttggtgacagtgtagaagggtgattcgcaggcccatgttctgcccaccagcaaagccccactggagaagggtagactcctgtgggcagtctcagagctgggacctatttgcttctgcttgattctgcgtgggtggacccacatgagcagctgtatacccaggaggtcactaagactttataaaggcaggttttaagaaaaccagccttggcatcaccaccagcagatactgaaagcctccccaggaacctgtctggggaaggatgatgcctctgctggtctgatcgtgctgagtagcaggtgggctacggggactggggagttaagcattttgtgcagtgatagagaagtcaagcatatcgttagcgctctctcaacttgggcagttcacaagctccttcccagctcagaagccctctctatgctctcaggggaagcagatggggtggatcagtacatctgtgttacccttccagaatattatttgaaaattctacagtatgttctactttctccccttcctgcttccatggtttcactgtggaatcctataagatattctcctgagcagtattatttcagtttccttcagcttttagttgaatcttcaatgtggttttaaccaactgttcagagaactgaaatggtttttaaatatgaaaaaggacctttgtaaaaatggagtaaaacagtgccccttttttaaaaaaagttttgcttatgcttaatttacataggactcaggagagtttggaacatcctccaagtgggccatagagctgtcacaaagaagaggccatgatgtttagaaacaaggggacactagcaggaggggcagggtccactggcttagtggcaactgacaggcatccattccgaataactcagcactgaggtttcctcaggcagttctttaggaaaactgtcagcatcatgggtactcagaggtatggtagaccttgtagaagatccactaggaagtcctccttcaccaaatcatgtagctactgcccttgagccaaaggcaatgaggtttaaaacaaaaacccaacagcactcctgggaacatcctgttttccatgcggaagcatagcagatccccagacgatccgtgtgctgtatgctacctgttgaaccctagcatggtggctttttaaaaggttatttatgacttttatttttgggtaaggcattatggccaggtgcatgcagttatgtctgggttacgtgtgaaacgtacatctggtgaactgtatacttggctcaaacttctcaaaatttagaggtgctggaaaggattgtcacttggagcctttagtagacaaaaggcagaaagtgagcatcatttcagaaatgctttagtatgcacacttttagctgatattttgatatatagaataataatatacacagtggagaatattcaaagagtggctgaagggagaatacagagccagtagggccaaaatgaaacttctaggatgtcttctgaattttcagcacatggggggaataagtgaacaaatttcccaacatcgtgcaatgctttatagcacaatgatctagatttcagactgtgttaaggttttttctttgttgatgttgttgttttaattctaatgtgcacggtgtgactggcagagtgagtttaaaagctttacgagtgattaattgcttggcaggcacccacgctatctgcatttccagaactttactgatgcatccatgtacatttccactgaggaattttggtgggtggggggaggttgtgctgcctcacaatgtcacgtgtattaaagtctaagcagtcacttctgattcacttgcactgtttgggaaatgtcaggtttacaaaaacatacatgtttggaataaaaaatggctgcaaacaattcagaa

SEQ ID NO: 14522 - DNA, 1892 bp, Homo sapiens
  source 1..1892: mol_type = unassigned DNA
attattttaactaccccctgggagggtgagcaccttctgtgctctgtccccaaccttccacttcccctcaacgcgctgctcagggatgaccttcggcactgtgcttcttctgagtgtcctggcttcttatcatggattcaacctggatgtggaggagcctacgatcttccaggaggatgcaggcggctttgggcagagcgtggtgcagttcggtggatctcgactcgtggtgggagcacccctggaggtggtggcggccaaccagacgggacggctgtatgactgcgcagctgccaccggcatgtgccagcctccaccaacggctcccggctcctggcctgtggcccgaccctgcacagagtctgtggggagaactcatactcaaagggttcctgcctcctgctgggctcgcgctgggagatcatccagacagtccccgacgccacgccagtttgcactgatgcagtactcaaacctcctgaagatccacttcaccttcacccaattccggaccagcccgagccagcagagcctggtggatcccatcgtccaactgaaaggcctgacgttcacggccacgggcatcctgacagtggtgacacagctatttcatcataagaatggggcccgaaaaagtgccaagaagatcctcattgtcatcacagatgggcagaagtacaaagaccccctggaatacagtgatgtcatcccccaggcagagaaggctggcatcatccgctacgctatcggggtgcgcctcttcttcacccctgccccaggctcagcctgcatctccttcaggtgcagtgctgctgggctcatcctcctcggctgtctctctgctgcaggtgggacacgctttccagggacccactgccaggcaggagctgaataccatcagctcagcgcctccgcaggaccacgtgttcaaggtggacaactttgcagcccttggcagcatccagaagcagctgcaggagaagatctatgcagttgagggaacccagtccagggcaagcagctccttccagcacgagatgtcccaagaaggcttcagcacagccctcacaatggtgggtagagcctgccctcaatccatagctcttggataccaactctgcacccaccctgggctgggggctgggagccagacataaacaagagcagaccccatcctcaatcgccagggagaggcccccacgcgtgtgttaggggccaggagcacagcagggaggagggtagcctgggttcctgctctcaaggatcatgtattctagtggaggagacagtaagcaagagcctctcagatagcactaagcatcagggtagagagagagatagccagaggagcctcagtaatggaaaaggccagccctggacaaatcaggggagactgttctgggcacaggacaaagcaagtgccaaggtcctgaggcaggacccaggtcctcggcgggagagatccgggcttgccagagcccagggagcccaggcagcctggaaggagagggctggaggctgagaaggaccaggtgggatcaaagatgtggtttggaagtgcgtgtgtgttcaaaggatccagatggggccggtcactgtggctcatgcctgtaatcccagcactttgggaggctgagacgggcggatcacttgaggtcaggagtttgagaccaactggccaacatggcgaaaccccacctctactaaaaatacaaaaaaattagccaggtgtggtggctcatgcctgtaatcctagctacttgggaggccaaggcaggagaattgcttgaacccaggaggcagaggttgcactgagccgagattgtgccactgcacttcagcctaggtgacagaacgagtctctgtctcaaaacaacaacaacaacaaaaac

SEQ ID NO: 14523 - DNA, 3912 bp, Homo sapiens
  source 1..3912: mol_type = unassigned DNA
ctgtgctctgtccccaaccttccacttcccctcaacgcgctgctcagggatgaccttcggcactgtgcttcttctgagtgtcctggcttcttatcatggattcaacctggatgtggaggagcctacgatcttccaggaggatgcaggcggctttgggcagagcgtggtgcagttcggtggatctcgactcgtggtgggagcacccctggaggtggtggcggccaaccagacgggacggctgtatgactgcgcagctgccaccggcatgtgccagcccatcccgctgcacatccgccctgaggccgtgaacatgtccttgggcctgaccctggcagcctccaccaacggctcccggctcctggcctgtggcccgaccctgcacagagtctgtggggagaactcatactcaaagggttcctgcctcctgctgggctcgcgctgggagatcatccagacagtccccgacgccacgccagagtgtccacatcaagagatggacatcgtcttcctgattgacggctctggaagcattgaccaaaatgactttaaccagatgaagggctttgtccaagctgtcatgggccagtttgagggcactgacaccctgtttgcactgatgcagtactcaaacctcctgaagatccacttcaccttcacccaattccggaccagcccgagccagcagagcctggtggatcccatcgtccaactgaaaggcctgacgttcacggccacgggcatcctgacagtggtgacacagctatttcatcataagaatggggcccgaaaaagtgccaagaagatcctcattgtcatcacagatgggcagaagtacaaagaccccctggaatacagtgatgtcatcccccaggcagagaaggctggcatcatccgctacgctatcggggtgggacacgctttccagggacccactgccaggcaggagctgaataccatcagctcagcgcctccgcaggaccacgtgttcaaggtggacaactttgcagcccttggcagcatccagaagcagctgcaggagaagatctatgcagttgagggaacccagtccagggcaagcagctccttccagcacgagatgtcccaagaaggcttcagcacagccctcacaatggatggcctcttcctgggggctgtggggagctttagctggtctggaggtgccttcctgtatcccccaaatatgagccccaccttcatcaacatgtctcaggagaatgtggacatgagggactcttacctgggttactccaccgagctagccctgtggaagggggtacagaacctggtcctgggggccccccgctaccagcataccgggaaggctgtcatcttcacccaggtgtccaggcaatggaggaagaaggccgaagtcacagggacgcagatcggctcctacttcggggcctccctctgctctgtggatgtggacagcgatggcagcaccgacctgatcctcattggggccccccattactatgagcagacccgagggggccaggtgtccgtgtgtcccttgcctagggggagggtgcagtggcagtgtgacgctgttctccgtggtgagcagggccacccctggggccgctttggggcagccctgacagtgttgggggatgtgaatgaggacaagctgatagacgtggccattggggccccgggagagcaggagaaccggggtgctgtctacctgtttcacggagcctcagaatccggcatcagcccctcccacagccagcggattgccagctcccagctctcccccaggctgcagtattttgggcaggcgctgagtgggggtcaggacctcacccaggatggactgatggacctggccgtgggggcccggggccaggtgctcctgctcaggagtctgccggtgctgaaagtgggggtggccatgagattcagccctgtggaggtggccaaggctgtgtaccggtgctgggaagagaagcccagtgccctggaagctggggacgccaccgtctgtctcaccatccagaaaagctcactggaccagctaggtgacatccaaagctctgtcaggtttgatctggcactggacccaggtcgtctgacttctcgtgccattttcaatgaaaccaagaaccccactttgactcgaagaaaaaccctgggactggggattcactgtgaaaccctgaagctgcttttgccagattgtgtggaggatgtggtgagccccatcattctgcacctcaacttctcactggtgagagagcccatcccctccccccagaacctgcgtcctgtgctggccgtgggctcacaagacctcttcactgcttctctccccttcgagaagaactgtgggcaagatggcctctgtgaaggggacctgggtgtcaccctcagcttctcaggcctgcagaccctgaccgtggggagctccctggagctcaacgtgattgtgactgtgtggaacgcaggtgaggattcctacggaaccgtggtcagcctctactatccagcagggctgtcgcaccgacgggtgtcaggagcccagaagcagccccatcagagtgccctgcgcctggcatgtgagacagtgcccactgaggatgagggcctaagaagcagccgctgcagtgtcaaccaccccatcttccatgagggctctaacggcaccttcatagtcacattcgatgtctcctacaaggccaccctgggagacaggatgcttatgagggccagtgcaagcagtgagaacaataaggcttcaagcagcaaggccaccttccagctggagctcccggtgaagtatgcagtctacaccatgatcagcaggcaggaagaatccaccaagtacttcaactttgcaacctccgatgagaagaaaatgaaagaggctgagcatcgataccgtgtgaataacctcagccagcgagatctggccatcagcattaacttctgggttcctgtcctgctgaacggggtggctgtgtgggatgtggtcatggaggccccatctcagagtctcccctgtgtttcagagagaaaacctccccagcattctgacttcctgacccagatttcaagaagtcccatgctggactgctccattgctgactgcctgcagttccgctgtgacgtcccctccttcagcgtccaggaggagctggatttcaccctgaagggcaatctcagtttcggctgggtccgcgagacattgcagaagaaggtgttggtcgtgagtgtggctgaaattacgttcgacacatccgtgtactcccagcttccaggacaggaggcatttatgagagctcagatggagatggtgctagaagaagacgaggtctacaatgccattcccatcatcatgggcagctctgtgggggctctgctactgctggcgctcatcacagccacactgtacaagcttggcttcttcaaacgccactacaaggaaatgctggaggacaagcctgaagacactgccacattcagtggggacgatttcagctgtgtggccccaaatgtgcctttgtcctaataatccactttcctgtttatctctaccactgtgggctggacttgcttgcaaccataaatcaacttacatggaaacaacttctgcatagatctgcactggcctaagcaacctaccaggtgctaagcaccttctcggagagatagagattgtaatgtttttacatatctgtccatctttttcagcaatgacccactttttacagaagcaggcatggtgccagcataaattttcatatgcttaagaattgtcacatgaaatgaggatgtttatagcacactttccttgcgtggaagagctataacccagggacctgagtgcctctctgggaatagtcgggggaacctatttgtgggcattgaaaaagttttttcactttc

SEQ ID NO: 14524 - DNA, 3912 bp, Homo sapiens; identical to SEQ ID NO: 14523
  source 1..3912: mol_type = unassigned DNA

SEQ ID NO: 14525 - DNA, 5208 bp, Homo sapiens
  source 1..5208: mol_type = unassigned DNA
acacctccctccccgcctgccagtgtcaccagcctgttgcctctgtgagaaagtaccactgtaagaggccaaagggcatgatcattttcctctttcaccctgtctaggttgccagcaaatcccacgggcctcctgacgctgcccctggggccacaggtccctcgagtgctggaaggatgaaggattcctgcatcactgtgatggccatggcgctgctgtctgggttctttttcttcgcgccggcctcgagctacaacctggacgtgcggggcgcgcggagcttctccccaccgcgcgccgggaggcactttggataccgcgtcctgcaggtcggaaacggggtcatcgtgggagctccaggggaggggaacagcacaggaagcctctatcagtgccagtcgggcacaggacactgcctgccagtcaccctgagaggttccaactatacctccaagtacttgggaatgaccttggcaacagaccccacagatggaagcattttggcctgtgaccctgggctgtctcgaacgtgtgaccagaacacctatctgagtggcctgtgttacctcttccgccagaatctgcagggtcccatgctgcaggggcgccctggttttcaggaatgtatcaagggcaacgtagacctggtatttctgtttgatggttcgatgagcttgcagccagatgaatttcagaaaattctggacttcatgaaggatgtgatgaagaaactcagcaacacttcgtaccagtttgctgctgttcagttttccacaagctacaaaacagaatttgatttctcagattatgttaaacggaaggaccctgatgctctgctgaagcatgtaaagcacatgttgctgttgaccaatacctttggtgccatcaattatgtcgcgacagaggtgttccgggaggagctgggggcccggccagatgccaccaaagtgcttatcatcatcacggatggggaggccactgacagtggcaacatcgatgcggccaaagacatcatccgctacatcatcgggattggaaagcattttcagaccaaggagagtcaggagaccctccacaaatttgcatcaaaacccgcgagcgagtttgtgaaaattctggacacatttgagaagctgaaagatctattcactgagctgcagaagaagatctatgtcattgagggcacaagcaaacaggacctgacttccttcaacatggagctgtcctccagcggcatcagtgctgacctcagcaggggccatgcagtcgtgggggcagtaggagccaaggactgggctgggggctttcttgacctgaaggcagacctgcaggatgacacatttattgggaatgaaccattgacaccagaagtgagagcaggctatttgggttacaccgtgacctggctgccctcccggcaaaagacttcgttgctggcctcgggagcccctcgataccagcacatgggccgagtgctgctgttccaagagccacagggcggaggacactggagccaggtccagacaatccatgggacccagattggctcttatttcggtggggagctgtgtggcgtcgacgtggaccaagatggggagacagagctgctgctgattggtgccccactgttctatggggagcagagaggaggccgggtgtttatctaccagagaagacagttggggtttgaagaagtctcagagctgcagggggaccccggctacccactcgggcggtttggagaagccatcactgctctgacagacatcaacggcgatgggctggtagacgtggctgtgggggcccctctggaggagcagggggctgtgtacatcttcaatgggaggcacggggggcttagtccccagccaagtcagcggatagaagggacccaagtgctctcaggaattcagtggtttggacgctccatccatggggtgaaggaccttgaaggggatggcttggcagatgtggctgtgggggctgagagccagatgatcgtgctgagctcccggcccgtggtggatatggtcaccctgatgtccttctctccagctgagatcccagtgcatgaagtggagtgctcctattcaaccagtaacaagatgaaagaaggagttaatatcacaatctgtttccagatcaagtctctcatcccccagttccaaggccgcctggttgccaatctcacttacactctgcagctggatggccaccggaccagaagacgggggttgttcccaggagggagacatgaactcagaaggaatatagctgtcaccaccagcatgtcatgcactgacttctcatttcatttcccggtatgtgttcaagacctcatctcccccatcaatgtttccctgaatttctctctttgggaggaggaagggacaccgagggaccaaagggcgcagggcaaggacataccgcccatcctgagaccctccctgcactcggaaacctgggagatcccttttgagaagaactgtggggaggacaagaagtgtgaggcaaacttgagagtgtccttctctcctgcaagatccagagccctgcgtctaactgcttttgccagcctctctgtggagctgagcctgagtaacttggaagaagatgcttactgggtccagctggacctgcacttccccccgggactctccttccgcaaggtggagatgctgaagccccatagccagatacctgtgagctgcgaggagcttcctgaagagtccaggcttctgtccagggcattatcttgcaatgtgagctctcccatcttcaaagcaggccactcggttgctctgcagatgatgtttaatacactggtaaacagctcctggggggactcggttgaattgcacgccaatgtgacctgtaacaatgaggactcagacctcctggaggacaactcagccactaccatcatccccatcctgtaccccatcaacatcctcatccaggaccaagaagactccacactctatgtcagtttcacccccaaaggccccaagatccaccaagtcaagcacatgtaccaggtgaggatccagccttccatccacgaccacaacatacccaccctggaggctgtggttggggtgccacagcctcccagcgaggggcccatcacacaccagtggagcgtgcagatggagcctcccgtgccctgccactatgaggatctggagaggctcccggatgcagctgagccttgtctccccggagccctgttccgctgccctgttgtcttcaggcaggagatcctcgtccaagtgatcgggactctggagctggtgggagagatcgaggcctcttccatgttcagcctctgcagctccctctccatctccttcaacagcagcaagcatttccacctctatggcagcaacgcctccctggcccaggttgtcatgaaggttgacgtggtgtatgagaagcagatgctctacctctacgtgctgagcggcatcggggggctgctgctgctgctgctcattttcatagtgctgtacaaggttggtttcttcaaacggaacctgaaggagaagatggaggctggcagaggtgtcccgaatggaatccctgcagaagactctgagcagctggcatctgggcaagaggctggggatcccggctgcctgaagcccctccatgagaaggactctgagagtggtggtggcaaggactgagtccaggcctgtgaggtgcagagtgcccagaactggactcaggatgcccagggccactctgcctctgcctgcattctgccgtgtgccctcgggcgagtcactgcctctccctggccctcagtttccctatctcgaacatggaactcattcctgcctgtctcctttgcaggctcatagggaagacctgctgagggaccagccaagagggctgcaaaagtgagggcttgtcattaccagacggttcaccagcctctcttggtttccttccttggaagagaatgtctgatctaaatgtggagaaactgtagtctcaggacctagggatgttctggccctcacccctgccctgggatgtccacagatgcctccaccccccagaacctgtccttgcacactcccctgcactggagtccagtctcttctgctggcagaaagcaaatgtgacctgtgtcactacgtgactgtggcacacgccttgttcttggccaaagaccaaattccttggcatgccttccagcaccctgcaaaatgagaccctcgtggccttccccagcctcttctagagccgtgatgcctccctgttgaagctctggtgacaccagcctttctcccaggccaggctccttcctgtcttcctgcattcacccagacagctccctctgcctgaaccttccatctcgccacccctccttccttgaccagcagatcccagctcacgtcacacttggttgggtcctcacatctttcacacttccaccagcctgcactactccctcaaagcacacgtcatgtttcttcatccggcagcctggatgttttttccctgtttaatgattgacgtacttagcagctatctctcagtgaactgtgagggtaaaggctatacttgtcttgttcaccttgggatgatgcctcatgatatgtcagggcgtgggacatctagtaggtgcttgacataatttcactgaattaatgacagagccagtgggaagatacagaaaaagaggggctgggctgggcgcggtggttcacgcctgtaatcccagcactttgggaggccaaggagggtggatcacctgaggtcaggagttagaggccagcctggcgaaaccccatctctactaaaaatacaaaatccaggcgtggtggcacacacctgtagtcccagctactcaggaggttgaggtaggagaattgcttgaacctgggaggtggaggttgcagtgagccaagattgcgccattgcactccagcctgggcaacacagcgagactccgtctcaaggaaaaaataaaaataaaaagcgggcacgggcccgtgacatccccacccttggaggctgtcttctcaggctctgccctgccctagctccacaccctctcccaggacccatcacgcctgtgcagtggcccccacagaaagactgagctcaaggtgggaaccacgtctgctaacttggagccccagtgccaagcacagtgcctgcatgtatttatccaataaatgtgaaattctgtcc

SEQ ID NO: 14526 - DNA, 4956 bp, Homo sapiens
  source 1..4956: mol_type = unassigned DNA
acacctccctccccgcctgccagtgtcaccagcctgttgcctctgtgagaaagtaccactgtaagaggccaaagggcatgatcattttcctctttcaccctgtctaggttgccagcaaatcccacgggcctcctgacgctgcccctggggccacaggtccctcgagtgctggaaggatgaaggattcctgcatcactgtgatggccatggcgctgctgtctgggttctttttcttcgcgccggcctcgagctacaacctggacgtgcggggcgcgcggagcttctccccaccgcgcgccgggaggcactttggataccgcgtcctgcaggtcggaaacggggtcatcgtgggagctccaggggaggggaacagcacaggaagcctctatcagtgccagtcgggcacaggacactgcctgccagtcaccctgagaggttccaactatacctccaagtacttgggaatgaccttggcaacagaccccacagatggaagcattttgtttgctgctgttcagttttccacaagctacaaaacagaatttgatttctcagattatgttaaacggaaggaccctgatgctctgctgaagcatgtaaagcacatgttgctgttgaccaatacctttggtgccatcaattatgtcgcgacagaggtgttccgggaggagctgggggcccggccagatgccaccaaagtgcttatcatcatcacggatggggaggccactgacagtggcaacatcgatgcggccaaagacatcatccgctacatcatcgggattggaaagcattttcagaccaaggagagtcaggagaccctccacaaatttgcatcaaaacccgcgagcgagtttgtgaaaattctggacacatttgagaagctgaaagatctattcactgagctgcagaagaagatctatgtcattgagggcacaagcaaacaggacctgacttccttcaacatggagctgtcctccagcggcatcagtgctgacctcagcaggggccatgcagtcgtgggggcagtaggagccaaggactgggctgggggctttcttgacctgaaggcagacctgcaggatgacacatttattgggaatgaaccattgacaccagaagtgagagcaggctatttgggttacaccgtgacctggctgccctcccggcaaaagacttcgttgctggcctcgggagcccctcgataccagcacatgggccgagtgctgctgttccaagagccacagggcggaggacactggagccaggtccagacaatccatgggacccagattggctcttatttcggtggggagctgtgtggcgtcgacgtggaccaagatggggagacagagctgctgctgattggtgccccactgttctatggggagcagagaggaggccgggtgtttatctaccagagaagacagttggggtttgaagaagtctcagagctgcagggggaccccggctacccactcgggcggtttggagaagccatcactgctctgacagacatcaacggcgatgggctggtagacgtggctgtgggggcccctctggaggagcagggggctgtgtacatcttcaatgggaggcacggggggcttagtccccagccaagtcagcggatagaagggacccaagtgctctcaggaattcagtggtttggacgctccatccatggggtgaaggaccttgaaggggatggcttggcagatgtggctgtgggggctgagagccagatgatcgtgctgagctcccggcccgtggtggatatggtcaccctgatgtccttctctccagctgagatcccagtgcatgaagtggagtgctcctattcaaccagtaacaagatgaaagaaggagttaatatcacaatctgtttccagatcaagtctctcatcccccagttccaaggccgcctggttgccaatctcacttacactctgcagctggatggccaccggaccagaagacgggggttgttcccaggagggagacatgaactcagaaggaatatagctgtcaccaccagcatgtcatgcactgacttctcatttcatttcccggtatgtgttcaagacctcatctcccccatcaatgtttccctgaatttctctctttgggaggaggaagggacaccgagggaccaaagggcgggcaaggacataccgcccatcctgagaccctccctgcactcggaaacctgggagatcccttttgagaagaactgtggggaggacaagaagtgtgaggcaaacttgagagtgtccttctctcctgcaagatccagagccctgcgtctaactgcttttgccagcctctctgtggagctgagcctgagtaacttggaagaagatgcttactgggtccagctggacctgcacttccccccgggactctccttccgcaaggtggagatgctgaagccccatagccagatacctgtgagctgcgaggagcttcctgaagagtccaggcttctgtccagggcattatcttgcaatgtgagctctcccatcttcaaagcaggccactcggttgctctgcagatgatgtttaatacactggtaaacagctcctggggggactcggttgaattgcacgccaatgtgacctgtaacaatgaggactcagacctcctggaggacaactcagccactaccatcatccccatcctgtaccccatcaacatcctcatccaggaccaagaagactccacactctatgtcagtttcacccccaaaggccccaagatccaccaagtcaagcacatgtaccaggtgaggatccagccttccatccacgaccacaacatacccaccctggaggctgtggttggggtgccacagcctcccagcgaggggcccatcacacaccagtggagcgtgcagatggagcctcccgtgccctgccactatgaggatctggagaggctcccggatgcagctgagccttgtctccccggagccctgttccgctgccctgttgtcttcaggcaggagatcctcgtccaagtgatcgggactctggagctggtgggagagatcgaggcctcttccatgttcagcctctgcagctccctctccatctccttcaacagcagcaagcatttccacctctatggcagcaacgcctccctggcccaggttgtcatgaaggttgacgtggtgtatgagaagcagatgctctacctctacgtgctgagcggcatcggggggctgctgctgctgctgctcattttcatagtgctgtacaaggttggtttcttcaaacggaacctgaaggagaagatggaggctggcagaggtgtcccgaatggaatccctgcagaagactctgagcagctggcatctgggcaagaggctggggatcccggctgcctgaagcccctccatgagaaggactctgagagtggtggtggcaaggactgagtccaggcctgtgaggtgcagagtgcccagaactggactcaggatgcccagggccactctgcctctgcctgcattctgccgtgtgccctcgggcgagtcactgcctctccctggccctcagtttccctatctcgaacatggaactcattcctgcctgtctcctttgcaggctcatagggaagacctgctgagggaccagccaagagggctgcaaaagtgagggcttgtcattaccagacggttcaccagcctctcttggtttccttccttggaagagaatgtctgatctaaatgtggagaaactgtagtctcaggacctagggatgttctggccctcacccctgccctgggatgtccacagatgcctccaccccccagaacctgtccttgcacactcccctgcactggagtccagtctcttctgctggcagaaagcaaatgtgacctgtgtcactacgtgactgtggcacacgccttgttcttggccaaagaccaaattccttggcatgccttccagcaccctgcaaaatgagaccctcgtggccttccccagcctcttctagagccgtgatgcctccctgttgaagctctggtgacaccagcctttctcccaggccaggctccttcctgtcttcctgcattcacccagacagctccctctgcctgaaccttccatctcgccacccctccttccttgaccagcagatcccagctcacgtcacacttggttgggtcctcacatctttcacacttccaccagcctgcactactccctcaaagcacacgtcatgtttcttcatccggcagcctggatgttttttccctgtttaatgattgacgtacttagcagctatctctcagtgaactgtgagggtaaaggctatacttgtcttgttcaccttgggatgatgcctcatgatatgtcagggcgtgggacatctagtaggtgcttgacataatttcactgaattaatgacagagccagtgggaagatacagaaaaagaggggctgggctgggcgcggtggttcacgcctgtaatcccagcactttgggaggccaaggagggtggatcacctgaggtcaggagttagaggccagcctggcgaaaccccatctctactaaaaatacaaaatccaggcgtggtggcacacacctgtagtcccagctactcaggaggttgaggtaggagaattgcttgaacctgggaggtggaggttgcagtgagccaagattgcgccattgcactccagcctgggcaacacagcgagactccgtctcaaggaaaaaataaaaataaaaagcgggcacgggcccgtgacatccccacccttggaggctgtcttctcaggctctgccctgccctagctccacaccctctcccaggacccatcacgcctgtgcagtggcccccacagaaagactgagctcaaggtgggaaccacgtctgctaacttggagccccagtgccaagcacagtgcctgcatgtatttatccaataaatgtgaaattctgtcc

SEQ ID NO: 14527 - DNA, 1416 bp, Homo sapiens
  source 1..1416: mol_type = unassigned DNA
ctctttcaccctgtctaggttgccagcaaatcccacgggcctcctgacgctgcccctggggccacaggtccctcgagtgctggaaggatgaaggattcctgcatcactgtgatggccatggcgctgctgtctgggttctttttcttcgcgccggcctcgagctacaacctggacgtgcggggcgcgcggagcttctccccaccgcgcgccgggaggcactttggataccgcgtcctgcagatcaagtctctcatcccccagttccaaggccgcctggttgccaatctcacttacactctgcagctggatggccaccggaccagaagacgggggttgttcccaggagggagacatgaactcagaaggaatatagctgtcaccaccagcatgtcatgcactgacttctcatttcatttcccgatgatgtttaatacactggtaaacagctcctggggggactcggttgaattgcacgccaatgtgacctgtaacaatgaggactcagacctcctggaggacaactcagccactaccatcatccccatcctgtaccccatcaacatcctcatccaggaccaagaagactccacactctatgtcagtttcacccccaaaggccccaagatccaccaagtcaagcacatgtaccaggtgaggatccagccttccatccacgaccacaacatacccaccctggaggctgtggttggggtgccacagcctcccagcgaggggcccatcacacaccagtggagcgtgcagatggagcctcccgtgccctgccactatgaggatctggagaggctcccggatgcagctgagccttgtctccccggagccctgttccgctgccctgttgtcttcaggcaggagatcctcgtccaagtgatcgggactctggagctggtgggagagatcgaggcctcttccatgttcagcctctgcagctccctctccatctccttcaacagcagcaagcatttccacctctatggcagcaacgcctccctggcccaggttgtcatgaaggttgacgtggtgtatgagaagcagatgctctacctctacgtgctgagcggcatcggggggctgctgctgctgctgctcattttcatagtgctgtacaaggttggtttcttcaaacggaacctgaaggagaagatggaggctggcagaggtgtcccgaatggaatccctgcagaagactctgagcagctggcatctgggcaagaggctggggatcccggctgcctgaagcccctccatgagaaggactctgagagtggtggtggcaaggactgagtccaggcctgtgaggtgcagagtgcccagaactggactcaggatgcccagggccactctgcctctgcctgcattctgccgtgtgccctcgggcgagtcactgcctctccctgg

SEQ ID NO: 14528 - DNA, 833 bp, Homo sapiens
  source 1..833: mol_type = unassigned DNA
cctctttcaccctgtctaggttgccagcaaatcccacgggcctcctgacgctgcccctggggccacaggtccctcgagtgctggaaggatgaaggattcctgcatcactgtgatggccatggcgctgctgtctgggttctttttcttcgcgccggcctcgagctacaacctggacgtgcggggcgcgcggagcttctccccaccgcgcgccgggaggcactttggataccgcgtcctgcaggtcggaaacggggtcatcgtgggagctccaggggaggggaacagcacaggaagcctctatcagtgccagtcgggcacaggacactgcctgccagtcaccctgagaggttccaactatacctccaagtacttgggaatgaccttggcaacagaccccacagatggaagcattttggcctgtgaccctgggctgtctcgaacgtgtgaccagaacacctatctgagtggcctgtgttacctcttccgccagaatctgcagggtcccatgctgcaggggcgccctggttttcaggtttgctgctgttcagttttccacaagctacaaaacagaatttgatttctcagattatgttaaacggaaggaccctgatgctctgctgaagcatgtaaagcacatgttgctgttgaccaatacctttggtgccatcaattatgtcgcgacagaggtgttccgggaggagctgggggcccggccagatgccaccaaagtgcttatcatcatcacggatggggaggccactgacagtggcaacatcgatgcggccaaagacatcatccgctacatcatcgggattggaaagcattttcagacc

SEQ ID NO: 14529 - DNA, 4742 bp, Homo sapiens
  source 1..4742: mol_type = unassigned DNA
ttttctgcccttctttgctttggtggcttccttgtggttcctcagtggtgcctgcaacccctggttcacctccttccaggttctggctccttccagccatggctctcagagtccttctgttaacagccttgaccttatgtcatgggttcaacttggacactgaaaacgcaatgaccttccaagagaacgcaaggggcttcgggcagagcgtggtccagcttcagggatccagggtggtggttggagccccccaggagatagtggctgccaaccaaaggggcagcctctaccagtgcgactacagcacaggctcatgcgagcccatccgcctgcaggtccccgtggaggccgtgaacatgtccctgggcctgtccctggcagccaccaccagcccccctcagctgctggcctgtggtcccaccgtgcaccagacttgcagtgagaacacgtatgtgaaagggctctgcttcctgtttggatccaacctacggcagcagccccagaagttcccagaggccctccgagggtgtcctcaagaggatagtgacattgccttcttgattgatggctctggtagcatcatcccacatgactttcggcggatgaaggagtttgtctcaactgtgatggagcaattaaaaaagtccaaaaccttgttctctttgatgcagtactctgaagaattccggattcactttaccttcaaagagttccagaacaaccctaacccaagatcactggtgaagccaataacgcagctgcttgggcggacacacacggccacgggcatccgcaaagtggtacgagagctgtttaacatcaccaacggagcccgaaagaatgcctttaagatcctagttgtcatcacggatggagaaaagtttggcgatcccttgggatatgaggatgtcatccctgaggcagacagagagggagtcattcgctacgtcattggggtgggagatgccttccgcagtgagaaatcccgccaagagcttaataccatcgcatccaagccgcctcgtgatcacgtgttccaggtgaataactttgaggctctgaagaccattcagaaccagcttcgggagaagatctttgcgatcgagggtactcagacaggaagtagcagctcctttgagcatgagatgtctcaggaaggcttcagcgctgccatcacctctaatggccccttgctgagcactgtggggagctatgactgggctggtggagtctttctatatacatcaaaggagaaaagcaccttcatcaacatgaccagagtggattcagacatgaatgatgcttacttgggttatgctgccgccatcatcttacggaaccgggtgcaaagcctggttctgggggcacctcgatatcagcacatcggcctggtagcgatgttcaggcagaacactggcatgtgggagtccaacgctaatgtcaagggcacccagatcggcgcctacttcggggcctccctctgctccgtggacgtggacagcaacggcagcaccgacctggtcctcatcggggccccccattactacgagcagacccgagggggccaggtgtccgtgtgccccttgcccagggggagggctcggtggcagtgtgatgctgttctctacggggagcagggccaaccctggggccgctttggggcagccctaacagtgctgggggacgtaaatggggacaagctgacggacgtggccattggggccccaggagaggaggacaaccggggtgctgtttacctgtttcacggaacctcaggatctggcatcagcccctcccatagccagcggatagcaggctccaagctctctcccaggctccagtattttggtcagtcactgagtgggggccaggacctcacaatggatggactggtagacctgactgtaggagcccaggggcacgtgctgctgctcaggtcccagccagtactgagagtcaaggcaatcatggagttcaatcccagggaagtggcaaggaatgtatttgagtgtaatgatcaggtggtgaaaggcaaggaagccggagaggtcagagtctgcctccatgtccagaagagcacacgggatcggctaagagaaggacagatccagagtgttgtgacttatgacctggctctggactccggccgcccacattcccgcgccgtcttcaatgagacaaagaacagcacacgcagacagacacaggtcttggggctgacccagacttgtgagaccctgaaactacagttgccgaattgcatcgaggacccagtgagccccattgtgctgcgcctgaacttctctctggtgggaacgccattgtctgctttcgggaacctccggccagtgctggcggaggatgctcagagactcttcacagccttgtttccctttgagaagaattgtggcaatgacaacatctgccaggatgacctcagcatcaccttcagtttcatgagcctggactgcctcgtggtgggtgggccccgggagttcaacgtgacagtgactgtgagaaatgatggtgaggactcctacaggacacaggtcaccttcttcttcccgcttgacctgtcctaccggaaggtgtccacgctccagaaccagcgctcacagcgatcctggcgcctggcctgtgagtctgcctcctccaccgaagtgtctggggccttgaagagcaccagctgcagcataaaccaccccatcttcccggaaaactcagaggtcacctttaatatcacgtttgatgtagactctaaggcttcccttggaaacaaactgctcctcaaggccaatgtgaccagtgagaacaacatgcccagaaccaacaaaaccgaattccaactggagctgccggtgaaatatgctgtctacatggtggtcaccagccatggggtctccactaaatatctcaacttcacggcctcagagaataccagtcgggtcatgcagcatcaatatcaggtcagcaacctggggcagaggagcctccccatcagcctggtgttcttggtgcccgtccggctgaaccagactgtcatatgggaccgcccccaggtcaccttctccgagaacctctcgagtacgtgccacaccaaggagcgcttgccctctcactccgactttctggctgagcttcggaaggcccccgtggtgaactgctccatcgctgtctgccagagaatccagtgtgacatcccgttctttggcatccaggaagaattcaatgctaccctcaaaggcaacctctcgtttgactggtacatcaagacctcgcataaccacctcctgatcgtgagcacagctgagatcttgtttaacgattccgtgttcaccctgctgccgggacagggggcgtttgtgaggtcccagacggagaccaaagtggagccgttcgaggtccccaaccccctgccgctcatcgtgggcagctctgtcgggggactgctgctcctggccctcatcaccgccgcgctgtacaagctcggcttcttcaagcggcaatacaaggacatgatgagtgaagggggtcccccgggggccgaaccccagtagcggctccttcccgacagagctgcctctcggtggccagcaggactctgcccagaccacacgtagcccccaggctgctggacacgtcggacagcgaagtatccccgacaggacgggcttgggcttccatttgtgtgtgtgcaagtgtgtatgtgcgtgtgtgcaagtgtctgtgtgcaagtgtgtgcacatgtgtgcgtgtgcgtgcatgtgcacttgcacgcccatgtgtgagtgtgtgcaagtatgtgagtgtgtccaagtgtgtgtgcgtgtgtccatgtgtgtgcaagtgtgtgcatgtgtgcgagtgtgtgcatgtgtgtgctcaggggcgtgtggctcacgtgtgtgactcagatgtctctggcgtgtgggtaggtgacggcagcgtagcctctccggcagaagggaactgcctgggctcccttgtgcgtgggtgaagccgctgctgggttttcctccgggagaggggacggtcaatcctgtgggtgaagacagagggaaacacagcagcttctctccactgaaagaagtgggacttcccgtcgcctgcgagcctgcggcctgctggagcctgcgcagcttggatggagactccatgagaagccgtgggtggaaccaggaacctcctccacaccagcgctgatgcccaataaagatgcccactgaggaatgatgaagcttcctttctggattcatttattatttcaatgtgactttaattttttggatggataagcttgtctatggtacaaaaatcacaaggcattcaagtgtacagtgaaaagtctccctttccagatattcaagtcacctccttaaaggtagtcaagattgtgttttgaggtttccttcagacagattccaggcgatgtgcaagtgtatgcacgtgtgcacacacaccacacatacacacacacaagcttttttacacaaatggtagcatactttatattggtctgtatcttgctttttttcaccaatatttctcagacatcggttcatattaagacataaattactttttcattcttttataccgctgcatagtattccattgtgtgagtgtaccataatgtatttaaccagtcttcttttgatatactattttcattctcttgttattgcatcaatgctgagttaataaatcaaatatatgtcatttttgcatatatgtaaggataa

SEQ ID NO: 14530 - DNA, 4745 bp, Homo sapiens
  source 1..4745: mol_type = unassigned DNA
ttttctgcccttctttgctttggtggcttccttgtggttcctcagtggtgcctgcaacccctggttcacctccttccaggttctggctccttccagccatggctctcagagtccttctgttaacagccttgaccttatgtcatgggttcaacttggacactgaaaacgcaatgaccttccaagagaacgcaaggggcttcgggcagagcgtggtccagcttcagggatccagggtggtggttggagccccccaggagatagtggctgccaaccaaaggggcagcctctaccagtgcgactacagcacaggctcatgcgagcccatccgcctgcaggtccccgtggaggccgtgaacatgtccctgggcctgtccctggcagccaccaccagcccccctcagctgctggcctgtggtcccaccgtgcaccagacttgcagtgagaacacgtatgtgaaagggctctgcttcctgtttggatccaacctacggcagcagccccagaagttcccagaggccctccgagggtgtcctcaagaggatagtgacattgccttcttgattgatggctctggtagcatcatcccacatgactttcggcggatgaaggagtttgtctcaactgtgatggagcaattaaaaaagtccaaaaccttgttctctttgatgcagtactctgaagaattccggattcactttaccttcaaagagttccagaacaaccctaacccaagatcactggtgaagccaataacgcagctgcttgggcggacacacacggccacgggcatccgcaaagtggtacgagagctgtttaacatcaccaacggagcccgaaagaatgcctttaagatcctagttgtcatcacggatggagaaaagtttggcgatcccttgggatatgaggatgtcatccctgaggcagacagagagggagtcattcgctacgtcattggggtgggagatgccttccgcagtgagaaatcccgccaagagcttaataccatcgcatccaagccgcctcgtgatcacgtgttccaggtgaataactttgaggctctgaagaccattcagaaccagcttcgggagaagatctttgcgatcgagggtactcagacaggaagtagcagctcctttgagcatgagatgtctcaggaaggcttcagcgctgccatcacctctaatggccccttgctgagcactgtggggagctatgactgggctggtggagtctttctatatacatcaaaggagaaaagcaccttcatcaacatgaccagagtggattcagacatgaatgatgcttacttgggttatgctgccgccatcatcttacggaaccgggtgcaaagcctggttctgggggcacctcgatatcagcacatcggcctggtagcgatgttcaggcagaacactggcatgtgggagtccaacgctaatgtcaagggcacccagatcggcgcctacttcggggcctccctctgctccgtggacgtggacagcaacggcagcaccgacctggtcctcatcggggccccccattactacgagcagacccgagggggccaggtgtccgtgtgccccttgcccagggggcagagggctcggtggcagtgtgatgctgttctctacggggagcagggccaaccctggggccgctttggggcagccctaacagtgctgggggacgtaaatggggacaagctgacggacgtggccattggggccccaggagaggaggacaaccggggtgctgtttacctgtttcacggaacctcaggatctggcatcagcccctcccatagccagcggatagcaggctccaagctctctcccaggctccagtattttggtcagtcactgagtgggggccaggacctcacaatggatggactggtagacctgactgtaggagcccaggggcacgtgctgctgctcaggtcccagccagtactgagagtcaaggcaatcatggagttcaatcccagggaagtggcaaggaatgtatttgagtgtaatgatcaggtggtgaaaggcaaggaagccggagaggtcagagtctgcctccatgtccagaagagcacacgggatcggctaagagaaggacagatccagagtgttgtgacttatgacctggctctggactccggccgcccacattcccgcgccgtcttcaatgagacaaagaacagcacacgcagacagacacaggtcttggggctgacccagacttgtgagaccctgaaactacagttgccgaattgcatcgaggacccagtgagccccattgtgctgcgcctgaacttctctctggtgggaacgccattgtctgctttcgggaacctccggccagtgctggcggaggatgctcagagactcttcacagccttgtttccctttgagaagaattgtggcaatgacaacatctgccaggatgacctcagcatcaccttcagtttcatgagcctggactgcctcgtggtgggtgggccccgggagttcaacgtgacagtgactgtgagaaatgatggtgaggactcctacaggacacaggtcaccttcttcttcccgcttgacctgtcctaccggaaggtgtccacgctccagaaccagcgctcacagcgatcctggcgcctggcctgtgagtctgcctcctccaccgaagtgtctggggccttgaagagcaccagctgcagcataaaccaccccatcttcccggaaaactcagaggtcacctttaatatcacgtttgatgtagactctaaggcttcccttggaaacaaactgctcctcaaggccaatgtgaccagtgagaacaacatgcccagaaccaacaaaaccgaattccaactggagctgccggtgaaatatgctgtctacatggtggtcaccagccatggggtctccactaaatatctcaacttcacggcctcagagaataccagtcgggtcatgcagcatcaatatcaggtcagcaacctggggcagaggagcctccccatcagcctggtgttcttggtgcccgtccggctgaaccagactgtcatatgggaccgcccccaggtcaccttctccgagaacctctcgagtacgtgccacaccaaggagcgcttgccctctcactccgactttctggctgagcttcggaaggcccccgtggtgaactgctccatcgctgtctgccagagaatccagtgtgacatcccgttctttggcatccaggaagaattcaatgctaccctcaaaggcaacctctcgtttgactggtacatcaagacctcgcataaccacctcctgatcgtgagcacagctgagatcttgtttaacgattccgtgttcaccctgctgccgggacagggggcgtttgtgaggtcccagacggagaccaaagtggagccgttcgaggtccccaaccccctgccgctcatcgtgggcagctctgtcgggggactgctgctcctggccctcatcaccgccgcgctgtacaagctcggcttcttcaagcggcaatacaaggacatgatgagtgaagggggtcccccgggggccgaaccccagtagcggctccttcccgacagagctgcctctcggtggccagcaggactctgcccagaccacacgtagcccccaggctgctggacacgtcggacagcgaagtatccccgacaggacgggcttgggcttccatttgtgtgtgtgcaagtgtgtatgtgcgtgtgtgcaagtgtctgtgtgcaagtgtgtgcacatgtgtgcgtgtgcgtgcatgtgcacttgcacgcccatgtgtgagtgtgtgcaagtatgtgagtgtgtccaagtgtgtgtgcgtgtgtccatgtgtgtgcaagtgtgtgcatgtgtgcgagtgtgtgcatgtgtgtgctcaggggcgtgtggctcacgtgtgtgactcagatgtctctggcgtgtgggtaggtgacggcagcgtagcctctccggcagaagggaactgcctgggctcccttgtgcgtgggtgaagccgctgctgggttttcctccgggagaggggacggtcaatcctgtgggtgaagacagagggaaacacagcagcttctctccactgaaagaagtgggacttcccgtcgcctgcgagcctgcggcctgctggagcctgcgcagcttggatggagactccatgagaagccgtgggtggaaccaggaacctcctccacaccagcgctgatgcccaataaagatgcccactgaggaatgatgaagcttcctttctggattcatttattatttcaatgtgactttaattttttggatggataagcttgtctatggtacaaaaatcacaaggcattcaagtgtacagtgaaaagtctccctttccagatattcaagtcacctccttaaaggtagtcaagattgtgttttgaggtttccttcagacagattccaggcgatgtgcaagtgtatgcacgtgtgcacacacaccacacatacacacacacaagcttttttacacaaatggtagcatactttatattggtctgtatcttgctttttttcaccaatatttctcagacatcggttcatattaagacataaattactttttcattcttttataccgctgcatagtattccattgtgtgagtgtaccataatgtatttaaccagtcttcttttgatatactattttcattctcttgttattgcatcaatgctgagttaataaatcaaatatatgtcatttttgcatatatgtaaggataa

SEQ ID NO: 14531 - DNA, 4649 bp, Homo sapiens
  source 1..4649: mol_type = unassigned DNA
agtaccttggtccagctcttcctgcaacggcccaggagctcagagctccacatctgaccttctagtcatgaccaggaccagggcagcactcctcctgttcacagccttagcaacttctctaggtttcaacttggacacagaggagctgacagccttccgtgtggacagcgctgggtttggagacagcgtggtccagtatgccaactcctgggtggtggttggagccccccaaaagataacagctgccaaccaaacgggtggcctctaccagtgtggctacagcactggtgcctgtgagcccatcggcctgcaggtgcccccggaggccgtgaacatgtccctgggcctgtccctggcgtctaccaccagcccttcccagctgctggcctgcggccccaccgtgcaccacgagtgcgggaggaacatgtacctcaccggactctgcttcctcctgggccccacccagctcacccagaggctcccggtgtccaggcaggagtgcccaagacaggagcaggacattgtgttcctgatcgatggctcaggcagcatctcctcccgcaactttgccacgatgatgaacttcgtgagagctgtgataagccagttccagagacccagcacccagttttccctgatgcagttctccaacaaattccaaacacacttcactttcgaggaattcaggcgcagctcaaaccccctcagcctgttggcttctgttcaccagctgcaagggtttacatacacggccaccgccatccaaaatgtcgtgcaccgattgttccatgcctcatatggggcccgtagggatgccgccaaaattctcattgtcatcactgatgggaagaaagaaggcgacagcctggattataaggatgtcatccccatggctgatgcagcaggcatcatccgctatgcaattggggttggattagcttttcaaaacagaaattcttggaaagaattaaatgacattgcatcgaagccctcccaggaacacatatttaaagtggaggactttgatgctctgaaagatattcaaaaccaactgaaggagaagatctttgccattgagggtacggagaccacaagcagtagctccttcgaattggagatggcacaggagggcttcagcgctgtgttcacacctgatggccccgttctgggggctgtggggagcttcacctggtctggaggtgccttcctgtaccccccaaatatgagccctaccttcatcaacatgtctcaggagaatgtggacatgagggactcttacctgggttactccaccgagctggccctctggaaaggggtgcagagcctggtcctgggggccccccgctaccagcacaccgggaaggctgtcatcttcacccaggtgtccaggcaatggaggatgaaggccgaagtcacggggactcagatcggctcctacttcggggcctccctctgctccgtggacgtagacagcgacggcagcaccgacctggtcctcatcggggccccccattactacgagcagacccgagggggccaggtgtctgtgtgtcccttgcccagggggtggagaaggtggtggtgtgatgctgttctctacggggagcagggccacccctggggtcgctttggggcggctctgacagtgctgggggatgtgaatggggacaagctgacagacgtggtcatcggggccccaggagaggaggagaaccggggtgctgtctacctgtttcacggagtcttgggacccagcatcagcccctcccacagccagcggatcgcgggctcccagctctcctccaggctgcagtattttgggcaggcactgagcgggggtcaagacctcacccaggatggactggtggacctggctgtgggggcccggggccaggtgctcctgctcaggaccagacctgtgctctgggtgggggtgagcatgcagttcatacctgccgagatccccaggtctgcgtttgagtgtcgggagcaggtggtctctgagcagaccctggtacagtccaacatctgcctttacattgacaaacgttctaagaacctgcttgggagccgtgacctccaaagctctgtgaccttggacctggccctcgaccctggccgcctgagtccccgtgccaccttccaggaaacaaagaaccggagtctgagccgagtccgagtcctcgggctgaaggcacactgtgaaaacttcaacctgctgctcccgagctgcgtggaggactctgtgacccccattaccttgcgtctgaacttcacgctggtgggcaagcccctccttgccttcagaaacctgcggcctatgctggccgccgatgctcagagatacttcacggcctccctaccctttgagaagaactgtggagccgaccatatctgccaggacaatctcggcatctccttcagcttcccaggcttgaagtccctgctggtggggagtaacctggagctgaacgcagaagtgatggtgtggaatgacggggaagactcctacggaaccaccatcaccttctcccaccccgcaggactgtcctaccgctacgtggcagagggccagaaacaagggcagctgcgttccctgcacctgacatgtgacagcgccccagttgggagccagggcacctggagcaccagctgcagaatcaaccacctcatcttccgtggcggcgcccagatcaccttcttggctacctttgacgtctcccccaaggctgtcctgggagaccggctgcttctgacagccaatgtgagcagtgagaacaacactcccaggaccagcaagaccaccttccagctggagctcccggtgaagtatgctgtctacactgtggttagcagccacgaacaattcaccaaatacctcaacttctcagagtctgaggagaaggaaagccatgtggccatgcacagataccaggtcaataacctgggacagagggacctgcctgtcagcatcaacttctgggtgcctgtggagctgaaccaggaggctgtgtggatggatgtggaggtctcccacccccagaacccatcccttcggtgctcctcagagaaaatcgcacccccagcatctgacttcctggcgcacattcagaagaatcccgtgctggactgctccattgctggctgcctgcggttccgctgtgacgtcccctccttcagcgtccaggaggagctggatttcaccctgaagggcaacctcagctttggctgggtccgccagatattgcagaagaaggtgtcggtcgtgagtgtggctgaaattacgttcgacacatccgtgtactcccagcttccaggacaggaggcatttatgagagctcagacgacaacggtgctggagaagtacaaggtccacaaccccacccccctcatcgtaggcagctccattgggggtctgttgctgctggcactcatcacagcggtactgtacaaagttggcttcttcaagcgtcagtacaaggaaatgatggaggaggcaaatggacaaattgccccagaaaacgggacacagacccccagcccgcccagtgagaaatgatcccctctttgccttggacttcttctcccccgcgagttttccccacttacttaccctcacctgtcaggcctgacggggaggaaccactgcaccaccgagagaggctgggatgggcctgcttcctgtctttgggagaaaacgtcttgcttgggaaggggcctttgtcttgtcaaggttccaactggaaacccttaggacagggtccctgctgtgttccccaaaggacttgacttgcaatttctacctagaaatacatggacaatacccccaggcctcagtctcccttctcccatgaggcacgaatgatctttctttcctttctttttttttttttttcttttcttttttttttttttgagacggagtctcgctctgtcacccaggctggagtgcaatggcgtgatctcggctcactgcaacctccgcctcccgggttcaagtaattctgctgtctcagcctcctgagtagctgggactacaggcacacgccacctcgcccggcccgatctttctaaaatacagttctgaatatgctgctcatccccacctgtcttcaacagctccccattaccctcaggacaatgtctgaactctccagcttcgcgtgagaagtccccttccatcccagagggtgggcttcagggcgcacagcatgagaggctctgtgcccccatcaccctcgtttccagtgaattagtgtcatgtcagcatcagctcagggcttcatcgtggggctctcagttccgatttcccaggctgaattgggagtgagatgcctgcatgctgggttctgcacagctggcctcccgcgttgggcaacattgctggctggaagggaggagcgccctctagggagggacatggccccggtgcggctgcagctcacccagccccaggggcagaagagacccaaccacttctattttttgaggctatgaatatagtacctgaaaaaatgccaagacatgattatttttttaaaaagcgtactttaaatgtttgtgttaataaattaaaacatgcacaaaaagatgcatctaccgctcttgggaaatatgtcaaaggtctaaaaataaaaaagccttctgtg

SEQ ID NO: 14532 - DNA, 5918 bp, Homo sapiens
  source 1..5918: mol_type = unassigned DNA
gcgctgcccgcctcgtccccacccccccaacccccgcgcccgccctcggacagtccctgctcgcccgcgcgctgcagccccatctcctagcggcagcccaggcgcggagggagcgagtccgccccgaggtaggtccaggacgggcgcacagcagcagccgaggctggccgggagagggaggaagaggatggcagggccacgccccagcccatgggccaggctgctcctggcagccttgatcagcgtcagcctctctgggaccttggcaaaccgctgcaagaaggccccagtgaagagctgcacggagtgtgtccgtgtggataaggactgcgcctactgcacagacgagatgttcagggaccggcgctgcaacacccaggcggagctgctggccgcgggctgccagcgggagagcatcgtggtcatggagagcagcttccaaatcacagaggagacccagattgacaccaccctgcggcgcagccagatgtccccccaaggcctgcgggtccgtctgcggcccggtgaggagcggcattttgagctggaggtgtttgagccactggagagccccgtggacctgtacatcctcatggacttctccaactccatgtccgatgatctggacaacctcaagaagatggggcagaacctggctcgggtcctgagccagctcaccagcgactacactattggatttggcaagtttgtggacaaagtcagcgtcccgcagacggacatgaggcctgagaagctgaaggagccctggcccaacagtgacccccccttctccttcaagaacgtcatcagcctgacagaagatgtggatgagttccggaataaactgcagggagagcggatctcaggcaacctggatgctcctgagggcggcttcgatgccatcctgcagacagctgtgtgcacgagggacattggctggcgcccggacagcacccacctgctggtcttctccaccgagtcagccttccactatgaggctgatggcgccaacgtgctggctggcatcatgagccgcaacgatgaacggtgccacctggacaccacgggcacctacacccagtacaggacacaggactacccgtcggtgcccaccctggtgcgcctgctcgccaagcacaacatcatccccatctttgctgtcaccaactactcctatagctactacgagaagcttcacacctatttccctgtctcctcactgggggtgctgcaggaggactcgtccaacatcgtggagctgctggaggaggccttcaatcggatccgctccaacctggacatccgggccctagacagcccccgaggccttcggacagaggtcacctccaagatgttccagaagacgaggactgggtcctttcacatccggcggggggaagtgggtatataccaggtgcagctgcgggcccttgagcacgtggatgggacgcacgtgtgccagctgccggaggaccagaagggcaacatccatctgaaaccttccttctccgacggcctcaagatggacgcgggcatcatctgtgatgtgtgcacctgcgagctgcaaaaagaggtgcggtcagctcgctgcagcttcaacggagacttcgtgtgcggacagtgtgtgtgcagcgagggctggagtggccagacctgcaactgctccaccggctctctgagtgacattcagccctgcctgcgggagggcgaggacaagccgtgctccggccgtggggagtgccagtgcgggcactgtgtgtgctacggcgaaggccgctacgagggtcagttctgcgagtatgacaacttccagtgtccccgcacttccgggttcctctgcaatgaccgaggacgctgctccatgggccagtgtgtgtgtgagcctggttggacaggcccaagctgtgactgtcccctcagcaatgccacctgcatcgacagcaatgggggcatctgtaatggacgtggccactgtgagtgtggccgctgccactgccaccagcagtcgctctacacggacaccatctgcgagatcaactactcggcgatccacccgggcctctgcgaggacctacgctcctgcgtgcagtgccaggcgtggggcaccggcgagaagaaggggcgcacgtgtgaggaatgcaacttcaaggtcaagatggtggacgagcttaagagagccgaggaggtggtggtgcgctgctccttccgggacgaggatgacgactgcacctacagctacaccatggaaggtgacggcgcccctgggcccaacagcactgtcctggtgcacaagaagaaggactgccctccgggctccttctggtggctcatccccctgctcctcctcctcctgccgctcctggccctgctactgctgctatgctggaagtactgtgcctgctgcaaggcctgcctggcacttctcccgtgctgcaaccgaggtcacatggtgggctttaaggaagaccactacatgctgcgggagaacctgatggcctctgaccacttggacacgcccatgctgcgcagcgggaacctcaagggccgtgacgtggtccgctggaaggtcaccaacaacatgcagcggcctggctttgccactcatgccgccagcatcaaccccacagagctggtgccctacgggctgtccttgcgcctggcccgcctttgcaccgagaacctgctgaagcctgacactcgggagtgcgcccagctgcgccaggaggtggaggagaacctgaacgaggtctacaggcagatctccggtgtacacaagctccagcagaccaagttccggcagcagcccaatgccgggaaaaagcaagaccacaccattgtggacacagtgctgatggcgccccgctcggccaagccggccctgctgaagcttacagagaagcaggtggaacagagggccttccacgacctcaaggtggcccccggctactacaccctcactgcagaccaggacgcccggggcatggtggagttccaggagggcgtggagctggtggacgtacgggtgcccctctttatccggcctgaggatgacgacgagaagcagctgctggtggaggccatcgacgtgcccgcaggcactgccaccctcggccgccgcctggtaaacatcaccatcatcaaggagcaagccagagacgtggtgtcctttgagcagcctgagttctcggtcagccgcggggaccaggtggcccgcatccctgtcatccggcgtgtcctggacggcgggaagtcccaggtctcctaccgcacacaggatggcaccgcgcagggcaaccgggactacatccccgtggagggtgagctgctgttccagcctggggaggcctggaaagagctgcaggtgaagctcctggagctgcaagaagttgactccctcctgcggggccgccaggtccgccgtttccacgtccagctcagcaaccctaagtttggggcccacctgggccagccccactccaccaccatcatcatcagggacccagatgaactggaccggagcttcacgagtcagatgttgtcatcacagccaccccctcacggcgacctgggcgccccgcagaaccccaatgctaaggccgctgggtccaggaagatccatttcaactggctgcccccttctggcaagccaatggggtacagggtaaagtactggattcagggtgactccgaatccgaagcccacctgctcgacagcaaggtgccctcagtggagctcaccaacctgtacccgtattgcgactatgagatgaaggtgtgcgcctacggggctcagggcgagggaccctacagctccctggtgtcctgccgcacccaccaggaagtgcccagcgagccagggcgtctggccttcaatgtcgtctcctccacggtgacccagctgagctgggctgagccggctgagaccaacggtgagatcacagcctacgaggtctgctatggcctggtcaacgatgacaaccgacctattgggcccatgaagaaagtgctggttgacaaccctaagaaccggatgctgcttattgagaaccttcgggagtcccagccctaccgctacacggtgaaggcgcgcaacggggccggctgggggcctgagcgggaggccatcatcaacctggccacccagcccaagaggcccatgtccatccccatcatccctgacatccctatcgtggacgcccagagcggggaggactacgacagcttccttatgtacagcgatgacgttctacgctctccatcgggcagccagaggcccagcgtctccgatgacactggctgcggctggaagttcgagcccctgctgggggaggagctggacctgcggcgcgtcacgtggcggctgcccccggagctcatcccgcgcctgtcggccagcagcgggcgctcctccgacgccgaggcgccccacgggcccccggacgacggcggcgcgggcgggaagggcggcagcctgccccgcagtgcgacacccgggccccccggagagcacctggtgaatggccggatggactttgccttcccgggcagcaccaactccctgcacaggatgaccacgaccagtgctgctgcctatggcacccacctgagcccacacgtgccccaccgcgtgctaagcacatcctccaccctcacacgggactacaactcactgacccgctcagaacactcacactcgaccacactgcccagggactactccaccctcacctccgtctcctcccacgactctcgcctgactgctggtgtgcccgacacgcccacccgcctggtgttctctgccctggggcccacatctctcagagtgagctggcaggagccgcggtgcgagcggccgctgcagggctacagtgtggagtaccagctgctgaacggcggtgagctgcatcggctcaacatccccaaccctgcccagacctcggtggtggtggaagacctcctgcccaaccactcctacgtgttccgcgtgcgggcccagagccaggaaggctggggccgagagcgtgagggtgtcatcaccattgaatcccaggtgcacccgcagagcccactgtgtcccctgccaggctccgccttcactttgagcactcccagtgccccaggcccgctggtgttcactgccctgagcccagactcgctgcagctgagctgggagcggccacggaggcccaatggggatatcgtcggctacctggtgacctgtgagatggcccaaggaggagggccagccaccgcattccgggtggatggagacagccccgagagccggctgaccgtgccgggcctcagcgagaacgtgccctacaagttcaaggtgcaggccaggaccactgagggcttcgggccagagcgcgagggcatcatcaccatagagtcccaggatggaggacccttcccgcagctgggcagccgtgccgggctcttccagcacccgctgcaaagcgagtacagcagcatcaccaccacccacaccagcgccaccgagcccttcctagtggatgggctgaccctgggggcccagcacctggaggcaggcggctccctcacccggcatgtgacccaggagtttgtgagccggacactgaccaccagcggaacccttagcacccacatggaccaacagttcttccaaacttgaccgcaccctgccccacccccgccacgtcccactaggcgtcctcccgactcctctcccggagcctcctcagctactccatccttgcacccctgggggcccagcccacccgcatgcacagagcaggggctaggtgtctcctgggaggcatgaagggggcaaggtccgtcctctgtgggcccaaacctatttgtaaccaaagagctgggagcagcacaaggacccagcctttgttctgcacttaataaatggttttgctactgct

SEQ ID NO: 14533 - DNA, 5867 bp, Homo sapiens
  source 1..5867: mol_type = unassigned DNA
gcgctgcccgcctcgtccccacccccccaacccccgcgcccgccctcggacagtccctgctcgcccgcgcgctgcagccccatctcctagcggcagcccaggcgcggagggagcgagtccgccccgaggtaggtccaggacgggcgcacagcagcagccgaggctggccgggagagggaggaagaggatggcagggccacgccccagcccatgggccaggctgctcctggcagccttgatcagcgtcagcctctctgggaccttggcaaaccgctgcaagaaggccccagtgaagagctgcacggagtgtgtccgtgtggataaggactgcgcctactgcacagacgagatgttcagggaccggcgctgcaacacccaggcggagctgctggccgcgggctgccagcgggagagcatcgtggtcatggagagcagcttccaaatcacagaggagacccagattgacaccaccctgcggcgcagccagatgtccccccaaggcctgcgggtccgtctgcggcccggtgaggagcggcattttgagctggaggtgtttgagccactggagagccccgtggacctgtacatcctcatggacttctccaactccatgtccgatgatctggacaacctcaagaagatggggcagaacctggctcgggtcctgagccagctcaccagcgactacactattggatttggcaagtttgtggacaaagtcagcgtcccgcagacggacatgaggcctgagaagctgaaggagccctggcccaacagtgacccccccttctccttcaagaacgtcatcagcctgacagaagatgtggatgagttccggaataaactgcagggagagcggatctcaggcaacctggatgctcctgagggcggcttcgatgccatcctgcagacagctgtgtgcacgagggacattggctggcgcccggacagcacccacctgctggtcttctccaccgagtcagccttccactatgaggctgatggcgccaacgtgctggctggcatcatgagccgcaacgatgaacggtgccacctggacaccacgggcacctacacccagtacaggacacaggactacccgtcggtgcccaccctggtgcgcctgctcgccaagcacaacatcatccccatctttgctgtcaccaactactcctatagctactacgagaagcttcacacctatttccctgtctcctcactgggggtgctgcaggaggactcgtccaacatcgtggagctgctggaggaggccttcaatcggatccgctccaacctggacatccgggccctagacagcccccgaggccttcggacagaggtcacctccaagatgttccagaagacgaggactgggtcctttcacatccggcggggggaagtgggtatataccaggtgcagctgcgggcccttgagcacgtggatgggacgcacgtgtgccagctgccggaggaccagaagggcaacatccatctgaaaccttccttctccgacggcctcaagatggacgcgggcatcatctgtgatgtgtgcacctgcgagctgcaaaaagaggtgcggtcagctcgctgcagcttcaacggagacttcgtgtgcggacagtgtgtgtgcagcgagggctggagtggccagacctgcaactgctccaccggctctctgagtgacattcagccctgcctgcgggagggcgaggacaagccgtgctccggccgtggggagtgccagtgcgggcactgtgtgtgctacggcgaaggccgctacgagggtcagttctgcgagtatgacaacttccagtgtccccgcacttccgggttcctctgcaatgaccgaggacgctgctccatgggccagtgtgtgtgtgagcctggttggacaggcccaagctgtgactgtcccctcagcaatgccacctgcatcgacagcaatgggggcatctgtaatggacgtggccactgtgagtgtggccgctgccactgccaccagcagtcgctctacacggacaccatctgcgagatcaactactcggcgatccacccgggcctctgcgaggacctacgctcctgcgtgcagtgccaggcgtggggcaccggcgagaagaaggggcgcacgtgtgaggaatgcaacttcaaggtcaagatggtggacgagcttaagagagccgaggaggtggtggtgcgctgctccttccgggacgaggatgacgactgcacctacagctacaccatggaaggtgacggcgcccctgggcccaacagcactgtcctggtgcacaagaagaaggactgccctccgggctccttctggtggctcatccccctgctcctcctcctcctgccgctcctggccctgctactgctgctatgctggaagtactgtgcctgctgcaaggcctgcctggcacttctcccgtgctgcaaccgaggtcacatggtgggctttaaggaagaccactacatgctgcgggagaacctgatggcctctgaccacttggacacgcccatgctgcgcagcgggaacctcaagggccgtgacgtggtccgctggaaggtcaccaacaacatgcagcggcctggctttgccactcatgccgccagcatcaaccccacagagctggtgccctacgggctgtccttgcgcctggcccgcctttgcaccgagaacctgctgaagcctgacactcgggagtgcgcccagctgcgccaggaggtggaggagaacctgaacgaggtctacaggcagatctccggtgtacacaagctccagcagaccaagttccggcagcagcccaatgccgggaaaaagcaagaccacaccattgtggacacagtgctgatggcgccccgctcggccaagccggccctgctgaagcttacagagaagcaggtggaacagagggccttccacgacctcaaggtggcccccggctactacaccctcactgcagaccaggacgcccggggcatggtggagttccaggagggcgtggagctggtggacgtacgggtgcccctctttatccggcctgaggatgacgacgagaagcagctgctggtggaggccatcgacgtgcccgcaggcactgccaccctcggccgccgcctggtaaacatcaccatcatcaaggagcaagccagagacgtggtgtcctttgagcagcctgagttctcggtcagccgcggggaccaggtggcccgcatccctgtcatccggcgtgtcctggacggcgggaagtcccaggtctcctaccgcacacaggatggcaccgcgcagggcaaccgggactacatccccgtggagggtgagctgctgttccagcctggggaggcctggaaagagctgcaggtgaagctcctggagctgcaagaagttgactccctcctgcggggccgccaggtccgccgtttccacgtccagctcagcaaccctaagtttggggcccacctgggccagccccactccaccaccatcatcatcagggacccagatgaactggaccggagcttcacgagtcagatgttgtcatcacagccaccccctcacggcgacctgggcgccccgcagaaccccaatgctaaggccgctgggtccaggaagatccatttcaactggctgcccccttctggcaagccaatggggtacagggtaaagtactggattcagggtgactccgaatccgaagcccacctgctcgacagcaaggtgccctcagtggagctcaccaacctgtacccgtattgcgactatgagatgaaggtgtgcgcctacggggctcagggcgagggaccctacagctccctggtgtcctgccgcacccaccaggaagtgcccagcgagccagggcgtctggccttcaatgtcgtctcctccacggtgacccagctgagctgggctgagccggctgagaccaacggtgagatcacagcctacgaggtctgctatggcctggtcaacgatgacaaccgacctattgggcccatgaagaaagtgctggttgacaaccctaagaaccggatgctgcttattgagaaccttcgggagtcccagccctaccgctacacggtgaaggcgcgcaacggggccggctgggggcctgagcgggaggccatcatcaacctggccacccagcccaagaggcccatgtccatccccatcatccctgacatccctatcgtggacgcccagagcggggaggactacgacagcttccttatgtacagcgatgacgttctacgctctccatcgggcagccagaggcccagcgtctccgatgacactgagcacctggtgaatggccggatggactttgccttcccgggcagcaccaactccctgcacaggatgaccacgaccagtgctgctgcctatggcacccacctgagcccacacgtgccccaccgcgtgctaagcacatcctccaccctcacacgggactacaactcactgacccgctcagaacactcacactcgaccacactgcccagggactactccaccctcacctccgtctcctcccacggcctccctcccatctgggaacacgggaggagcaggcttccgctgtcctgggccctggggtcccggagtcgggctcagatgaaagggttccccccttccaggggcccacgagactctataatcctggctgggaggccagcagcgccctcctggggcccagactctcgcctgactgctggtgtgcccgacacgcccacccgcctggtgttctctgccctggggcccacatctctcagagtgagctggcaggagccgcggtgcgagcggccgctgcagggctacagtgtggagtaccagctgctgaacggcggtgagctgcatcggctcaacatccccaaccctgcccagacctcggtggtggtggaagacctcctgcccaaccactcctacgtgttccgcgtgcgggcccagagccaggaaggctggggccgagagcgtgagggtgtcatcaccattgaatcccaggtgcacccgcagagcccactgtgtcccctgccaggctccgccttcactttgagcactcccagtgccccaggcccgctggtgttcactgccctgagcccagactcgctgcagctgagctgggagcggccacggaggcccaatggggatatcgtcggctacctggtgacctgtgagatggcccaaggaggagggccagccaccgcattccgggtggatggagacagccccgagagccggctgaccgtgccgggcctcagcgagaacgtgccctacaagttcaaggtgcaggccaggaccactgagggcttcgggccagagcgcgagggcatcatcaccatagagtcccaggatggaggacccttcccgcagctgggcagccgtgccgggctcttccagcacccgctgcaaagcgagtacagcagcatcaccaccacccacaccagcgccaccgagcccttcctagtggatgggctgaccctgggggcccagcacctggaggcaggcggctccctcacccggcatgtgacccaggagtttgtgagccggacactgaccaccagcggaacccttagcacccacatggaccaacagttcttccaaacttgaccgcaccctgccccacccccgccacgtcccactaggcgtcctcccgactcctctcccggagcctcctcagctactccatccttgcacccctgggggcccagcccacccgcatgcacagagcaggggctaggtgtctcctgggaggcatgaagggggcaaggtccgtcctctgtgggcccaaacctatttgtaaccaaagagctgggagcagcacaaggacccagcctttgttctgcacttaataaatggttttgctactgct

SEQ ID NO: 14534 - DNA, 5688 bp, Homo sapiens
  source 1..5688: mol_type = unassigned DNA
ggaagaggatggcagggccacgccccagcccatgggccaggctgctcctggcagccttgatcagcgtcagcctctctgggaccttggcaaaccgctgcaagaaggccccagtgaagagctgcacggagtgtgtccgtgtggataaggactgcgcctactgcacagacgagatgttcagggaccggcgctgcaacacccaggcggagctgctggccgcgggctgccagcgggagagcatcgtggtcatggagagcagcttccaaatcacagaggagacccagattgacaccaccctgcggcgcagccagatgtccccccaaggcctgcgggtccgtctgcggcccggtgaggagcggcattttgagctggaggtgtttgagccactggagagccccgtggacctgtacatcctcatggacttctccaactccatgtccgatgatctggacaacctcaagaagatggggcagaacctggctcgggtcctgagccagctcaccagcgactacactattggatttggcaagtttgtggacaaagtcagcgtcccgcagacggacatgaggcctgagaagctgaaggagccctggcccaacagtgacccccccttctccttcaagaacgtcatcagcctgacagaagatgtggatgagttccggaataaactgcagggagagcggatctcaggcaacctggatgctcctgagggcggcttcgatgccatcctgcagacagctgtgtgcacgagggacattggctggcgcccggacagcacccacctgctggtcttctccaccgagtcagccttccactatgaggctgatggcgccaacgtgctggctggcatcatgagccgcaacgatgaacggtgccacctggacaccacgggcacctacacccagtacaggacacaggactacccgtcggtgcccaccctggtgcgcctgctcgccaagcacaacatcatccccatctttgctgtcaccaactactcctatagctactacgagaagcttcacacctatttccctgtctcctcactgggggtgctgcaggaggactcgtccaacatcgtggagctgctggaggaggccttcaatcggatccgctccaacctggacatccgggccctagacagcccccgaggccttcggacagaggtcacctccaagatgttccagaagacgaggactgggtcctttcacatccggcggggggaagtgggtatataccaggtgcagctgcgggcccttgagcacgtggatgggacgcacgtgtgccagctgccggaggaccagaagggcaacatccatctgaaaccttccttctccgacggcctcaagatggacgcgggcatcatctgtgatgtgtgcacctgcgagctgcaaaaagaggtgcggtcagctcgctgcagcttcaacggagacttcgtgtgcggacagtgtgtgtgcagcgagggctggagtggccagacctgcaactgctccaccggctctctgagtgacattcagccctgcctgcgggagggcgaggacaagccgtgctccggccgtggggagtgccagtgcgggcactgtgtgtgctacggcgaaggccgctacgagggtcagttctgcgagtatgacaacttccagtgtccccgcacttccgggttcctctgcaatgaccgaggacgctgctccatgggccagtgtgtgtgtgagcctggttggacaggcccaagctgtgactgtcccctcagcaatgccacctgcatcgacagcaatgggggcatctgtaatggacgtggccactgtgagtgtggccgctgccactgccaccagcagtcgctctacacggacaccatctgcgagatcaactactcggcgatccacccgggcctctgcgaggacctacgctcctgcgtgcagtgccaggcgtggggcaccggcgagaagaaggggcgcacgtgtgaggaatgcaacttcaaggtcaagatggtggacgagcttaagagagccgaggaggtggtggtgcgctgctccttccgggacgaggatgacgactgcacctacagctacaccatggaaggtgacggcgcccctgggcccaacagcactgtcctggtgcacaagaagaaggactgccctccgggctccttctggtggctcatccccctgctcctcctcctcctgccgctcctggccctgctactgctgctatgctggaagtactgtgcctgctgcaaggcctgcctggcacttctcccgtgctgcaaccgaggtcacatggtgggctttaaggaagaccactacatgctgcgggagaacctgatggcctctgaccacttggacacgcccatgctgcgcagcgggaacctcaagggccgtgacgtggtccgctggaaggtcaccaacaacatgcagcggcctggctttgccactcatgccgccagcatcaaccccacagagctggtgccctacgggctgtccttgcgcctggcccgcctttgcaccgagaacctgctgaagcctgacactcgggagtgcgcccagctgcgccaggaggtggaggagaacctgaacgaggtctacaggcagatctccggtgtacacaagctccagcagaccaagttccggcagcagcccaatgccgggaaaaagcaagaccacaccattgtggacacagtgctgatggcgccccgctcggccaagccggccctgctgaagcttacagagaagcaggtggaacagagggccttccacgacctcaaggtggcccccggctactacaccctcactgcagaccaggacgcccggggcatggtggagttccaggagggcgtggagctggtggacgtacgggtgcccctctttatccggcctgaggatgacgacgagaagcagctgctggtggaggccatcgacgtgcccgcaggcactgccaccctcggccgccgcctggtaaacatcaccatcatcaaggagcaagccagagacgtggtgtcctttgagcagcctgagttctcggtcagccgcggggaccaggtggcccgcatccctgtcatccggcgtgtcctggacggcgggaagtcccaggtctcctaccgcacacaggatggcaccgcgcagggcaaccgggactacatccccgtggagggtgagctgctgttccagcctggggaggcctggaaagagctgcaggtgaagctcctggagctgcaagaagttgactccctcctgcggggccgccaggtccgccgtttccacgtccagctcagcaaccctaagtttggggcccacctgggccagccccactccaccaccatcatcatcagggacccagatgaactggaccggagcttcacgagtcagatgttgtcatcacagccaccccctcacggcgacctgggcgccccgcagaaccccaatgctaaggccgctgggtccaggaagatccatttcaactggctgcccccttctggcaagccaatggggtacagggtaaagtactggattcagggtgactccgaatccgaagcccacctgctcgacagcaaggtgccctcagtggagctcaccaacctgtacccgtattgcgactatgagatgaaggtgtgcgcctacggggctcagggcgagggaccctacagctccctggtgtcctgccgcacccaccaggaagtgcccagcgagccagggcgtctggccttcaatgtcgtctcctccacggtgacccagctgagctgggctgagccggctgagaccaacggtgagatcacagcctacgaggtctgctatggcctggtcaacgatgacaaccgacctattgggcccatgaagaaagtgctggttgacaaccctaagaaccggatgctgcttattgagaaccttcgggagtcccagccctaccgctacacggtgaaggcgcgcaacggggccggctgggggcctgagcgggaggccatcatcaacctggccacccagcccaagaggcccatgtccatccccatcatccctgacatccctatcgtggacgcccagagcggggaggactacgacagcttccttatgtacagcgatgacgttctacgctctccatcgggcagccagaggcccagcgtctccgatgacactgagcacctggtgaatggccggatggactttgccttcccgggcagcaccaactccctgcacaggatgaccacgaccagtgctgctgcctatggcacccacctgagcccacacgtgccccaccgcgtgctaagcacatcctccaccctcacacgggactacaactcactgacccgctcagaacactcacactcgaccacactgcccagggactactccaccctcacctccgtctcctcccacggcctccctcccatctgggaacacgggaggagcaggcttccgctgtcctgggccctggggtcccggagtcgggctcagatgaaagggttccccccttccaggggcccacgagactctataatcctggctgggaggccagcagcgccctcctggggcccagactctcgcctgactgctggtgtgcccgacacgcccacccgcctggtgttctctgccctggggcccacatctctcagagtgagctggcaggagccgcggtgcgagcggccgctgcagggctacagtgtggagtaccagctgctgaacggcggtgagctgcatcggctcaacatccccaaccctgcccagacctcggtggtggtggaagacctcctgcccaaccactcctacgtgttccgcgtgcgggcccagagccaggaaggctggggccgagagcgtgagggtgtcatcaccattgaatcccaggtgcacccgcagagcccactgtgtcccctgccaggctccgccttcactttgagcactcccagtgccccaggcccgctggtgttcactgccctgagcccagactcgctgcagctgagctgggagcggccacggaggcccaatggggatatcgtcggctacctggtgacctgtgagatggcccaaggaggagggccagccaccgcattccgggtggatggagacagccccgagagccggctgaccgtgccgggcctcagcgagaacgtgccctacaagttcaaggtgcaggccaggaccactgagggcttcgggccagagcgcgagggcatcatcaccatagagtcccaggatggaggacccttcccgcagctgggcagccgtgccgggctcttccagcacccgctgcaaagcgagtacagcagcatcaccaccacccacaccagcgccaccgagcccttcctagtggatgggctgaccctgggggcccagcacctggaggcaggcggctccctcacccggcatgtgacccaggagtttgtgagccggacactgaccaccagcggaacccttagcacccacatggaccaacagttcttccaaacttgaccgcaccctgccccacccccgccacgtcccactaggcgtcctcccgactcctctcccggagcctcctcagctactccatccttgcacccctgggggcccagcccacccgcatgcacagagcaggggctaggtgtctcctgggaggcatgaagggggcaaggtccgtcctctgtgggcccaaacctatttgtaaccaaagagctgggagcagcacaaggacccagcctttgttctgcacttaataaatggttttgctactgct

SEQ ID NO: 14535 - DNA, 5269 bp, Homo sapiens
  source 1..5269: mol_type = unassigned DNA
gggggtattgaggagacccagattgacaccaccctgcggcgcagccagatgtccccccaaggcctgcgggtccgtctgcggcccggtgaggagcggcattttgagctggaggtgtttgagccactggagagccccgtggacctgtacatcctcatggacttctccaactccatgtccgatgatctggacaacctcaagaagatggggcagaacctggctcgggtcctgagccagctcaccagcgactacactattggatttggcaagtttgtggacaaagtcagcgtcccgcagacggacatgaggcctgagaagctgaaggagccctggcccaacagtgacccccccttctccttcaagaacgtcatcagcctgacagaagatgtggatgagttccggaataaactgcagggagagcggatctcaggcaacctggatgctcctgagggcggcttcgatgccatcctgcagacagctgtgtgcacgagggacattggctggcgcccggacagcacccacctgctggtcttctccaccgagtcagccttccactatgaggctgatggcgccaacgtgctggctggcatcatgagccgcaacgatgaacggtgccacctggacaccacgggcacctacacccagtacaggacacaggactacccgtcggtgcccaccctggtgcgcctgctcgccaagcacaacatcatccccatctttgctgtcaccaactactcctatagctactacgagaagcttcacacctatttccctgtctcctcactgggggtgctgcaggaggactcgtccaacatcgtggagctgctggaggaggccttcaatcggatccgctccaacctggacatccgggccctagacagcccccgaggccttcggacagaggtcacctccaagatgttccagaagacgaggactgggtcctttcacatccggcggggggaagtgggtatataccaggtgcagctgcgggcccttgagcacgtggatgggacgcacgtgtgccagctgccggaggaccagaagggcaacatccatctgaaaccttccttctccgacggcctcaagatggacgcgggcatcatctgtgatgtgtgcacctgcgagctgcaaaaagaggtgcggtcagctcgctgcagcttcaacggagacttcgtgtgcggacagtgtgtgtgcagcgagggctggagtggccagacctgcaactgctccaccggctctctgagtgacattcagccctgcctgcgggagggcgaggacaagccgtgctccggccgtggggagtgccagtgcgggcactgtgtgtgctacggcgaaggccgctacgagggtcagttctgcgagtatgacaacttccagtgtccccgcacttccgggttcctctgcaatgaccgaggacgctgctccatgggccagtgtgtgtgtgagcctggttggacaggcccaagctgtgactgtcccctcagcaatgccacctgcatcgacagcaatgggggcatctgtaatggacgtggccactgtgagtgtggccgctgccactgccaccagcagtcgctctacacggacaccatctgcgagatcaactactcggcgatccacccgggcctctgcgaggacctacgctcctgcgtgcagtgccaggcgtggggcaccggcgagaagaaggggcgcacgtgtgaggaatgcaacttcaaggtcaagatggtggacgagcttaagagagccgaggaggtggtggtgcgctgctccttccgggacgaggatgacgactgcacctacagctacaccatggaaggtgacggcgcccctgggcccaacagcactgtcctggtgcacaagaagaaggactgccctccgggctccttctggtggctcatccccctgctcctcctcctcctgccgctcctggccctgctactgctgctatgctggaagtactgtgcctgctgcaaggcctgcctggcacttctcccgtgctgcaaccgaggtcacatggtgggctttaaggaagaccactacatgctgcgggagaacctgatggcctctgaccacttggacacgcccatgctgcgcagcgggaacctcaagggccgtgacgtggtccgctggaaggtcaccaacaacatgcagcggcctggctttgccactcatgccgccagcatcaaccccacagagctggtgccctacgggctgtccttgcgcctggcccgcctttgcaccgagaacctgctgaagcctgacactcgggagtgcgcccagctgcgccaggaggtggaggagaacctgaacgaggtctacaggcagatctccggtgtacacaagctccagcagaccaagttccggcagcagcccaatgccgggaaaaagcaagaccacaccattgtggacacagtgctgatggcgccccgctcggccaagccggccctgctgaagcttacagagaagcaggtggaacagagggccttccacgacctcaaggtggcccccggctactacaccctcactgcagaccaggacgcccggggcatggtggagttccaggagggcgtggagctggtggacgtacgggtgcccctctttatccggcctgaggatgacgacgagaagcagctgctggtggaggccatcgacgtgcccgcaggcactgccaccctcggccgccgcctggtaaacatcaccatcatcaaggagcaagccagagacgtggtgtcctttgagcagcctgagttctcggtcagccgcggggaccaggtggcccgcatccctgtcatccggcgtgtcctggacggcgggaagtcccaggtctcctaccgcacacaggatggcaccgcgcagggcaaccgggactacatccccgtggagggtgagctgctgttccagcctggggaggcctggaaagagctgcaggtgaagctcctggagctgcaagaagttgactccctcctgcggggccgccaggtccgccgtttccacgtccagctcagcaaccctaagtttggggcccacctgggccagccccactccaccaccatcatcatcagggacccagatgaactggaccggagcttcacgagtcagatgttgtcatcacagccaccccctcacggcgacctgggcgccccgcagaaccccaatgctaaggccgctgggtccaggaagatccatttcaactggctgcccccttctggcaagccaatggggtacagggtaaagtactggattcagggtgactccgaatccgaagcccacctgctcgacagcaaggtgccctcagtggagctcaccaacctgtacccgtattgcgactatgagatgaaggtgtgcgcctacggggctcagggcgagggaccctacagctccctggtgtcctgccgcacccaccaggaagtgcccagcgagccagggcgtctggccttcaatgtcgtctcctccacggtgacccagctgagctgggctgagccggctgagaccaacggtgagatcacagcctacgaggtctgctatggcctggtcaacgatgacaaccgacctattgggcccatgaagaaagtgctggttgacaaccctaagaaccggatgctgcttattgagaaccttcgggagtcccagccctaccgctacacggtgaaggcgcgcaacggggccggctgggggcctgagcgggaggccatcatcaacctggccacccagcccaagaggcccatgtccatccccatcatccctgacatccctatcgtggacgcccagagcggggaggactacgacagcttccttatgtacagcgatgacgttctacgctctccatcgggcagccagaggcccagcgtctccgatgacactgagcacctggtgaatggccggatggactttgccttcccgggcagcaccaactccctgcacaggatgaccacgaccagtgctgctgcctatggcacccacctgagcccacacgtgccccaccgcgtgctaagcacatcctccaccctcacacgggactacaactcactgacccgctcagaacactcacactcgaccacactgcccagggactactccaccctcacctccgtctcctcccacgactctcgcctgactgctggtgtgcccgacacgcccacccgcctggtgttctctgccctggggcccacatctctcagagtgagctggcaggagccgcggtgcgagcggccgctgcagggctacagtgtggagtaccagctgctgaacggcggtgagctgcatcggctcaacatccccaaccctgcccagacctcggtggtggtggaagacctcctgcccaaccactcctacgtgttccgcgtgcgggcccagagccaggaaggctggggccgagagcgtgagggtgtcatcaccattgaatcccaggtgcacccgcagagcccactgtgtcccctgccaggctccgccttcactttgagcactcccagtgccccaggcccgctggtgttcactgccctgagcccagactcgctgcagctgagctgggagcggccacggaggcccaatggggatatcgtcggctacctggtgacctgtgagatggcccaaggaggagggccagccaccgcattccgggtggatggagacagccccgagagccggctgaccgtgccgggcctcagcgagaacgtgccctacaagttcaaggtgcaggccaggaccactgagggcttcgggccagagcgcgagggcatcatcaccatagagtcccaggatggaggacccttcccgcagctgggcagccgtgccgggctcttccagcacccgctgcaaagcgagtacagcagcatcaccaccacccacaccagcgccaccgagcccttcctagtggatgggctgaccctgggggcccagcacctggaggcaggcggctccctcacccggcatgtgacccaggagtttgtgagccggacactgaccaccagcggaacccttagcacccacatggaccaacagttcttccaaacttgaccgcaccctgccccacccccgccacgtcccactaggcgtcctcccgactcctctcccggagcctcctcagctactccatccttgcacccctgggggcccagcccacccgcatgcacagagcaggggctaggtgtctcctgggaggcatgaagggggcaaggtccgtcctctgtgggcccaaacctatttgtaaccaaagagctgggagcagcacaaggacccagcctttgttctgcacttaataaatggttttgctactgct

SEQ ID NO: 14536 - DNA, 4675 bp, Homo sapiens
  source 1..4675: mol_type = unassigned DNA
ttgaagttgcttttaaacacagcttttctgctttacctgtccaggtagcctctgttttcatttcagtcttaatgaaaactttctaacttatatctcaagtttcttttcaaagcagtgtaagtagtatttaaaatgttatacttcaagaaagaaagactttaacgatattcagcgttggtcttgtaacgctgaaggtaattcattttttaatcggtctgcacagcaagaactgaaacgaatggggattgaactgctttgcctgttctttctatttctaggaaggaatgatcacgtacaaggtggctgtgccctgggaggtgcagaaacctgtgaagactgcctgcttattggacctcagtgtgcctggtgtgctcaggagaattttactcatccatctggagttggcgaaaggtgtgataccccagcaaaccttttagctaaaggatgtcaattaaacttcatcgaaaaccctgtctcccaagtagaaatacttaaaaataagcctctcagtgtaggcagacagaaaaatagttctgacattgttcagattgcgcctcaaagcttgatccttaagttgagaccaggtggtgcgcagactctgcaggtgcatgtccgccagactgaggactacccggtggatttgtattacctcatggacctctccgcctccatggatgacgacctcaacacaataaaggagctgggctcccggctttccaaagagatgtctaaattaaccagcaactttagactgggcttcggatcttttgtggaaaaacctgtatccccttttgtgaaaacaacaccagaagaaattgccaacccttgcagtagtattccatacttctgtttacctacatttggattcaagcacattttgccattgacaaatgatgctgaaagattcaatgaaattgtgaagaatcagaaaatttctgctaatattgacacacccgaaggtggatttgatgcaattatgcaagctgctgtgtgtaaggaaaaaattggctggcggaatgactccctccacctcctggtctttgtgagtgatgctgattctcattttggaatggacagcaaactagcaggcatcgtcattcctaatgacgggctctgtcacttggacagcaagaatgaatactccatgtcaactgtcttggaatatccaacaattggacaactcattgataaactggtacaaaacaacgtgttattgatcttcgctgtaacccaagaacaagttcatttatatgagaattacgcaaaacttattcctggagctacagtaggtctacttcagaaggactccggaaacattctccagctgatcatctcagcttatgaagaactgcggtctgaggtggaactggaagtattaggagacactgaaggactcaacttgtcatttacagccatctgtaacaacggtaccctcttccaacaccaaaagaaatgctctcacatgaaagtgggagacacagcttccttcagcgtgactgtgaatatcccacactgcgagagaagaagcaggcacattatcataaagcctgtggggctgggggatgccctggaattacttgtcagcccagaatgcaactgcgactgtcagaaagaagtggaagtgaacagctccaaatgtcaccacgggaacggctctttccagtgtggggtgtgtgcctgccaccctggccacatggggcctcgctgtgagtgtggcgaggacatgctgagcacagattcctgcaaggaggccccagatcatccctcctgcagcggaaggggtgactgctactgtgggcagtgtatctgccacttgtctccctatggaaacatttatgggccttattgccagtgtgacaatttctcctgcgtgagacacaaagggctgctctgcggaggtaacggcgactgtgactgtggtgaatgtgtgtgcaggagcggctggactggcgagtactgcaactgcaccaccagcacggactcctgcgtctctgaagatggagtgctctgcagcgggcgcggggactgtgtttgtggcaagtgtgtttgcacaaaccctggagcctcaggaccaacctgtgaacgatgtcctacctgtggtgacccctgtaactctaaacggagctgcattgagtgccacctgtcagcagctggccaagcccgagaagaatgtgtggacaagtgcaaactagctggtgcgaccatcagtgaagaagaagatttctcaaaggatggttctgtttcctgctctctgcaaggagaaaatgaatgtcttattacattcctaataactacagataatgaggggaaaaccatcattcacagcatcaatgaaaaagattgtccgaagcctccaaacattcccatgatcatgttaggggtttccctggctattcttctcatcggggttgtcctactgtgcatctggaagctactggtgtcatttcatgatcgtaaagaagttgccaaatttgaagcagaacgatcaaaagccaagtggcaaacgggaaccaatccactctacagaggatccacaagtacttttaaaaatgtaacttataaacacagggaaaaacaaaaggtagacctttccacagattgctagaactactttatgcatgaaaaaagtctgtttcactgatatgaaatgttaatgcactatttaatttttttctctttgttgcttcaaaatgaggttggtttaagataataataggacatctgcagataagtcatcctctacatgaaggtgacagactgttggcagtttcaaaataatcaagaagagaaatatccttagcaaagagatgactttggggatcatttgaggaatactaactctgttgcattaatgcttcaaaaaatcatcaaatgattcatgggggcctgatttgcatttgaaaaatgtttgaaattagagtctcatttgtttcaggaatgcagctacctgagttttttgtctcggcaaagtcacaaagcccatatactcacattgtgtgtctatacttgccaattaattctaaacttgtaggaaatatgccctctcttaaaggagaattttttttaaatctctgagaaatgagattctgagtttatttcagctaaaaggttgcaattcttctgaagatatctcaaatataaggttgaaagttaagtgttaataatttttgtgaatttatacacacctaaacgttaagtacacaaatattttatttgttttacaaataaggaataagtaatttataaattaagaagttacctataaaaataaaaagataacaaccctatcatatagcttatttttaaattacctgaaaaacgatattctacactgtttcctttttgactctgagttttcaaactgttacttctcccatatttctcaatccatttcactcagttgcacagtcttttaaaccctgtaattgtcataccaaagtttctttttaaaaaaaaattactttaaatgcttagtttattcaaagagcgatccaataatataaaaggaacatgtgttaaacacaataaaattttaaatggctctaaatcaagcacatcaagagtatacaagtcttaaaggctttttaatacatactcttttcccatctatgtaacccaacttgcacatttcagctgcatgtggtgaatatgcatcatatatttactttaagaggtaagattttacttgcaaaatacatgtgcaaattagggatccatcagttgatggaagagatggactctagaatattatttcttgtggttattactcctttacaaagcactttcgtctcacttgatcctcataaggaaactaaggctcagaatgagtagagctgggttcagaatctagctcttctaactccaagccatctcctctttccactgcaggaaactgcctcttttgtcagtgaaataatagaaagattgtgttagttaagtgataactgtcatttgtttgaaaatgttcgagactgaacaaatagcatttaaactgctggcatatagatgagatattgtacttttgtgcaatgtttattacctttgattaaattgtaatgtgaagcttttactaggtgaatagttcattatgtagtggaggcttcgtggttgtccattgaattgtcacagcaaaatctataagtttcttcaattctacaagatagatccatatacctttgatcacttggagactctttttttgctggtttctagataactcaggtaaatcagacctttacagagtacagggctaggtgaaagaattactgaaaaatcaccttgaaaatccgaagggctgatataccctttatgttcctgactgatgcgcagaacctgggggaaatctacagcaatatacaggttgcaatgctgataacacaacagcaatcctctcctctacgtggacttactgttgtttttttaattattattggaatgggattttagaaaatagaagttacctttgtgtgtgttttagggaaggtagagaagaatctgctctttctctgaatactgttttgaccccaggcaggaccttggaaaggccaaaacattaacagtagtacttctgttcactgaagagttatgttacatgaagataaaatggttttgtcgtgtttattattgtattttgtgttgatataaataaacatggtaatttaaacaatgaacctta

SEQ ID NO: 14537 - DNA, 2501 bp, Homo sapiens
  source 1..2501: mol_type = unassigned DNA
atgttgaagttgcttttaaacacagcttttctgctttacctgtccaggtagcctctgttttcatttcagtcttaatgaaaactttctaacttatatctcaagtttcttttcaaagcagtcaagaactgaaacgaatggggattgaactgctttgcctgttctttctatttctaggaaggaatgatcacgtacaaggtggctgtgccctgggaggtgcagaaacctgtgaagactgcctgcttattggacctcagtgtgcctggtgtgctcaggagaattttactcatccatctggagttggcgaaaggtgtgataccccagcaaaccttttagctaaaggatgtcaattaaacttcatcgaaaaccctgtctcccaagtagaaatacttaaaaataagcctctcagtgtaggcagacagaaaaatagttctgacattgttcagattgcgcctcaaagcttgatccttaagttgagaccaggtggtgcgcagactctgcaggtgcatgtccgccagactgaggactacccggtggatttgtattacctcatggacctctccgcctccatggatgacgacctcaacacaataaaggagctgggctcccggctttccaaagagatgtctaaattaaccagcaactttagactgggcttcggatcttttgtggaaaaacctgtatccccttttgtgaaaacaacaccagaagaaattgccaacccttgcagtagtattccatacttctgtttacctacatttggattcaagcacattttgccattgacaaatgatgctgaaagattcaatgaaattgtgaagaatcagaaaatttctgctaatattgacacacccgaaggtggatttgatgcaattatgcaagctgctgtgtgtaaggaaaaaattggctggcggaatgactccctccacctcctggtctttgtgagtgatgctgattctcattttggaatggacagcaaactagcaggcatcgtcattcctaatgacgggctctgtcacttggacagcaagaatgaatactccatgtcaactgtcttggaatatccaacaattggacaactcattgataaactggtacaaaacaacgtgttattgatcttcgctgtaacccaagaacaagttcatttatatgagaattacgcaaaacttattcctggagctacagtaggtctacttcagaaggactccggaaacattctccagctgatcatctcagcttatgaagaactgcggtctgaggtggaactggaagtattaggagacactgaaggactcaacttgtcatttacagccatctgtaacaacggtaccctcttccaacaccaaaagaaatgctctcacatgaaagtgggagacacagcttccttcagcgtgactgtgaatatcccacactgcgagagaagaagcaggcacattatcataaagcctgtggggctgggggatgccctggaattacttgtcagcccagaatgcaactgcgactgtcagaaagaagtggaagtgaacagctccaaatgtcaccacgggaacggctctttccagtgtggggtgtgtgcctgccaccctggccacatggggcctcgctgtgagtgtggcgaggacatgctgagcacagattcctgcaaggaggccccagatcatccctcctgcagcggaaggggtgactgctactgtgggcagtgtatctgccacttgtctccctatggaaacatttatgggccttattgccagtgtgacaatttctcctgcgtgagacacaaagggctgctctgcggaggtaacggcgactgtgactgtggtgaatgtgtgtgcaggagcggctggactggcgagtactgcaactgcaccaccagcacggactcctgcgtctctgaagatggagtgctctgcagcgggcgcggggactgtgtttgtggcaagtgtgtttgcacaaaccctggagcctcaggaccaacctgtgaacgatgtcctacctgtggtgacccctgtaactctaaacggagctgcattgagtgccacctgtcagcagctggccaagcccgagaagaatgtgtggacaagtgcaaactagctggtgcgaccatcagtgaagaagaagatttctcaaaggatggttctgtttcctgctctctgcaaggagaaaatgaatgtcttattacattcctaataactacagataatgaggggaaaaccatcattcacagcatcaatgaaaaagattgtccgaagcctccaaacattcccatgatcatgttaggggtttccctggctattcttctcatcggggttgtcctactgtgcatctggaagctactggtgtcatttcatgatcgtaaagaagttgccaaatttgaagcagaacgatcaaaagccaagtggcaaacgggaaccaatccactctacagaggatccacaagtacttttaaaaatgtaacttataaacacagggaaaaacaaaaggtagacctttccacagattgctag

SEQ ID NO: 14538 - DNA, 2861 bp, Homo sapiens
  source 1..2861: mol_type = unassigned DNA
aaatcttccccaccctggggagtgtcacttcctcctctgccgtctcccagatcagtacacaaaggctgctgctgccgccagaggaaggactgctctgcacgcacctatgtggaaactaaagcccagagagaaagtctgacttgccccacagccagtgagtgactgcagcagcaccagaatctggtctgtttcctgtttggctcttctaccactacggcttgggatctcgggcatggtggctttgccaatggtccttgttttgctgctggtcctgagcagaggtgagagtgaattggacgccaagatcccatccacaggggatgccacagaatggcggaatcctcacctgtccatgctggggtcctgccagccagccccctcctgccagaagtgcatcctctcacaccccagctgtgcatggtgcaagcaactgaacttcaccgcgtcgggagaggcggaggcgcggcgctgcgcccgacgagaggagctgctggctcgaggctgcccgctggaggagctggaggagccccgcggccagcaggaggtgctgcaggaccagccgctcagccagggcgcccgcggagagggtgccacccagctggcgccgcagcgggtccgggtcacgctgcggcctggggagccccagcagctccaggtccgcttccttcgtgctgagggatacccggtggacctgtactaccttatggacctgagctactccatgaaggacgacctggaacgcgtgcgccagctcgggcacgctctgctggtccggctgcaggaagtcacccattctgtgcgcattggttttggttcctttgtggacaaaacggtgctgccctttgtgagcacagtaccctccaaactgcgccacccctgccccacccggctggagcgctgccagtcaccattcagctttcaccatgtgctgtccctgacgggggacgcacaagccttcgagcgggaggtggggcgccagagtgtgtccggcaatctggactcgcctgaaggtggcttcgatgccattctgcaggctgcactctgccaggagcagattggctggagaaatgtgtcccggctgctggtgttcacttcagacgacacattccatacagctggggacgggaagttgggcggcattttcatgcccagtgatgggcactgccacttggacagcaatggcctctacagtcgcagcacagagtttgactacccttctgtgggtcaggtagcccaggccctctctgcagcaaatatccagcccatctttgctgtcaccagtgccgcactgcctgtctaccaggagctgagtaaactgattcctaagtctgcagttggggagctgagtgaggactccagcaacgtggtacagctcatcatggatgcttataatagcctgtcttccaccgtgacccttgaacactcttcactccctcctggggtccacatttcttacgaatcccagtgtgagggtcctgagaagagggagggtaaggctgaggatcgaggacagtgcaaccacgtccgaatcaaccagacggtgactttctgggtttctctccaagccacccactgcctcccagagccccatctcctgaggctccgggcccttggcttctcagaggagctgattgtggagttgcacacgctgtgtgactgtaattgcagtgacacccagccccaggctccccactgcagtgatggccagggacacctacaatgtggtgtatgcagctgtgcccctggccgcctaggtcggctctgtgagtgctctgtggcagagctgtcctccccagacctggaatctgggtgccgggctcccaatggcacagggcccctgtgcagtggaaagggtcactgtcaatgtggacgctgcagctgcagtggacagagctctgggcatctgtgcgagtgtgacgatgccagctgtgagcgacatgagggcatcctctgcggaggctttggtcgctgccaatgtggagtatgtcactgtcatgccaaccgcacgggcagagcatgcgaatgcagtggggacatggacagttgcatcagtcccgagggagggctctgcagtgggcatggacgctgcaaatgcaaccgctgccagtgcttggacggctactatggtgctctatgcgaccaatgcccaggctgcaagacaccatgcgagagacaccgggactgtgcagagtgtggggccttcaggactggcccactggccaccaactgcagtacagcttgtgcccataccaatgtgaccctggccttggcccctatcttggatgatggctggtgcaaagagcggaccctggacaaccagctgttcttcttcttggtggaggatgacgccagaggcacggtcgtgctcagagtgagaccccaagaaaagggagcagaccacacgcaggccattgtgctgggctgcgtagggggcatcgtggcagtggggctggggctggtcctggcttaccggctctcggtggaaatctatgaccgccgggaatacagtcgctttgagaaggagcagcaacaactcaactggaagcaggacagtaatcctctctacaaaagtgccatcacgaccaccatcaatcctcgctttcaagaggcagacagtcccactctctgaaggagggagggacacttacccaaggctcttctccttggaggacagtgggaactggagggtgagaggaagggtgggtctgtaagaccttggtaggggactaattcactggcgaggtgcggccaccaccctacttcattttcagagtgacacccaagagggctgcttcccatgcctgcaaccttgcatccatctgggctaccccacccaagtatacaataaagtcttacctcag

SEQ ID NO: 14539 - DNA, 2324 bp, Homo sapiens
  source 1..2324: mol_type = unassigned DNA
gctctgcacgcacctatgtggaaactaaagcccagagagaaagtctgacttgccccacagccagtgagtgactgcagcagcaccagaatctggtctgtttcctgtttggctcttctaccactacggcttgggatctcgggcatggtggctttgccaatggtccttgttttgctgctggtcctgagcagaggtgagagtgaattggacgccaagatcccatccacaggggatgccacagaatggcggaatcctcacctgtccatgctggggtcctgccagccagccccctcctgccagaagtgcatcctctcacaccccagctgtgcatggtgcaagcaactgaacttcaccgcgtcgggagaggcggaggcgcggcgctgcgcccgacgagaggagctgctggctcgaggctgcccgctggaggagctggaggagccccgcggccagcaggaggtgctgcaggaccagccgctcagccagggcgcccgcggagagggtgccacccagctggcgccgcagcgggtccgggtcacgctgcggcctggggagccccagcagctccaggtccgcttccttcgtgctgagggatacccggtggacctgtactaccttatggacctgagctactccatgaaggacgacctggaacgcgtgcgccagctcgggcacgctctgctggtccggctgcaggaagtcacccattctgtgcgcattggttttggttcctttgtggacaaaacggtgctgccctttgtgagcacagtaccctccaaactgcgccacccctgccccacccggctggagcgctgccagtcaccattcagctttcaccatgtgctgtccctgacgggggacgcacaagccttcgagcgggaggtggggcgccagagtgtgtccggcaatctggactcgcctgaaggtggcttcgatgccattctgcaggctgcactctgccaggagcagattggctggagaaatgtgtcccggctgctggtgttcacttcagacgacacattccatacagctggggacgggaagttgggcggcattttcatgcccagtgatgggcactgccacttggacagcaatggcctctacagtcgcagcacagagtttgactacccttctgtgggtcaggtagcccaggccctctctgcagcaaatatccagcccatctttgctgtcaccagtgccgcactgcctgtctaccaggagctgagtaaactgattcctaagtctgcagttggggagctgagtgaggactccagcaacgtggtacagctcatcatggatgcttataatagcctgtcttccaccgtgacccttgaacactcttcactccctcctggggtccacatttcttacgaatcccagtgtgagggtcctgagaagagggagggtaaggctgaggatcgaggacagtgcaaccacgtccgaatcaaccagacggtgactttctgggtttctctccaagccacccactgcctcccagagccccatctcctgaggctccgggcccttggcttctcagaggagctgattgtggagttgcacacgctgtgtgactgtaattgcagtgacacccagccccaggctccccactgcagtgatggccagggacacctacaatgtggtgtatgcagggactgtgcagagtgtggggccttcaggactggcccactggccaccaactgcagtacagcttgtgcccataccaatgtgaccctggccttggcccctatcttggatgatggctggtgcaaagagcggaccctggacaaccagctgttcttcttcttggtggaggatgacgccagaggcacggtcgtgctcagagtgagaccccaagaaaagggagcagaccacacgcaggccattgtgctgggctgcgtagggggcatcgtggcagtggggctggggctggtcctggcttaccggctctcggtggaaatctatgaccgccgggaatacagtcgctttgagaaggagcagcaacaactcaactggaagcaggacagtaatcctctctacaaaagtgccatcacgaccaccatcaatcctcgctttcaagaggcagacagtcccactctctgaaggagggagggacacttacccaaggctcttctccttggaggacagtgggaactggagggtgagaggaagggtgggtctgtaagaccttggtaggggactaattcactggcgaggtgcggccaccaccctacttcattttcagagtgacacccaagagggctgcttcccatgcctgcaaccttgcatccatctgggctaccccacccaagtatacaataaagtcttacctc

SEQ ID NO: 14540 - DNA, 2791 bp, Homo sapiens
  source 1..2791: mol_type = unassigned DNA
cacttcctcctctgccgtctcccagatcagtacacaaaggctgctgctgccgccagaggaaggactgctctgcacgcacctatgtggaaactaaagcccagagagaaagtctgacttgccccacagccagtgagtgactgcagcagcaccagaatctgggcatggtggctttgccaatggtccttgttttgctgctggtcctgagcagaggtgagagtgaattggacgccaagatcccatccacaggggatgccacagaatggcggaatcctcacctgtccatgctggggtcctgccagccagccccctcctgccagaagtgcatcctctcacaccccagctgtgcatggtgcaagcaactgaacttcaccgcgtcgggagaggcggaggcgcggcgctgcgcccgacgagaggagctgctggctcgaggctgcccgctggaggagctggaggagccccgcggccagcaggaggtgctgcaggaccagccgctcagccagggcgcccgcggagagggtgccacccagctggcgccgcagcgggtccgggtcacgctgcggcctggggagccccagcagctccaggtccgcttccttcgtgctgagggatacccggtggacctgtactaccttatggacctgagctactccatgaaggacgacctggaacgcgtgcgccagctcgggcacgctctgctggtccggctgcaggaagtcacccattctgtgcgcattggttttggttcctttgtggacaaaacggtgctgccctttgtgagcacagtaccctccaaactgcgccacccctgccccacccggctggagcgctgccagtcaccattcagctttcaccatgtgctgtccctgacgggggacgcacaagccttcgagcgggaggtggggcgccagagtgtgtccggcaatctggactcgcctgaaggtggcttcgatgccattctgcaggctgcactctgccaggagcagattggctggagaaatgtgtcccggctgctggtgttcacttcagacgacacattccatacagctggggacgggaagttgggcggcattttcatgcccagtgatgggcactgccacttggacagcaatggcctctacagtcgcagcacagagtttgactacccttctgtgggtcaggtagcccaggccctctctgcagcaaatatccagcccatctttgctgtcaccagtgccgcactgcctgtctaccaggagctgagtaaactgattcctaagtctgcagttggggagctgagtgaggactccagcaacgtggtacagctcatcatggatgcttataatagcctgtcttccaccgtgacccttgaacactcttcactccctcctggggtccacatttcttacgaatcccagtgtgagggtcctgagaagagggagggtaaggctgaggatcgaggacagtgcaaccacgtccgaatcaaccagacggtgactttctgggtttctctccaagccacccactgcctcccagagccccatctcctgaggctccgggcccttggcttctcagaggagctgattgtggagttgcacacgctgtgtgactgtaattgcagtgacacccagccccaggctccccactgcagtgatggccagggacacctacaatgtggtgtatgcagctgtgcccctggccgcctaggtcggctctgtgagtgctctgtggcagagctgtcctccccagacctggaatctgggtgccgggctcccaatggcacagggcccctgtgcagtggaaagggtcactgtcaatgtggacgctgcagctgcagtggacagagctctgggcatctgtgcgagtgtgacgatgccagctgtgagcgacatgagggcatcctctgcggaggctttggtcgctgccaatgtggagtatgtcactgtcatgccaaccgcacgggcagagcatgcgaatgcagtggggacatggacagttgcatcagtcccgagggagggctctgcagtgggcatggacgctgcaaatgcaaccgctgccagtgcttggacggctactatggtgctctatgcgaccaatgcccaggctgcaagacaccatgcgagagacaccgggactgtgcagagtgtggggccttcaggactggcccactggccaccaactgcagtacagcttgtgcccataccaatgtgaccctggccttggcccctatcttggatgatggctggtgcaaagagcggaccctggacaaccagctgttcttcttcttggtggaggatgacgccagaggcacggtcgtgctcagagtgagaccccaagaaaagggagcagaccacacgcaggccattgtgctgggctgcgtagggggcatcgtggcagtggggctggggctggtcctggcttaccggctctcggtggaaatctatgaccgccgggaatacagtcgctttgagaaggagcagcaacaactcaactggaagcaggacagtaatcctctctacaaaagtgccatcacgaccaccatcaatcctcgctttcaagaggcagacagtcccactctctgaaggagggagggacacttacccaaggctcttctccttggaggacagtgggaactggagggtgagaggaagggtgggtctgtaagaccttggtaggggactaattcactggcgaggtgcggccaccaccctacttcattttcagagtgacacccaagagggctgcttcccatgcctgcaaccttgcatccatctgggctaccccacccaagtatacaataaagtcttacctcaga

SEQ ID NO: 14541 - DNA, 1523 bp, Homo sapiens
  source 1..1523: mol_type = unassigned DNA
aaactttgtctcatgaacttagttgcagtgatgggagcatttaataaaggccatggtaagtgtgactgtggcaagtgcaagtgtgaccagggatggtatggggatgcttgccagtacccaactaactgtgacttgacaaagaagaaaagtaaccaaatgtgcaagaattcacaagacatcatctgctctaatgcaggtacatgtcactgtggcaggtgtaagtgtgataattcagatggaagtggacttgtgtatggtaaattttgtgagtgtgacgatagagaatgcatagacgatgaaacagaagaaatatgtggaggccatgggaagtgttactgtggaaactgctactgcaaggctggttggcatggagataaatgtgaattccagtgcgatatcaccccctgggaaagcaagcgaagatgcacgtctccagatggcaaaatctgcagtaacagagggacttgtgtatgtggtgaatgtacctgtcacgatgttgatccgactggggactggggagatattcatggggacacctgtgaatgtgatgagagggactgtagagctgtctatgaccgatattctgatgacttctgttcaggtcatggacagtgtaattgcggaagatgtgactgcaaagcaggctggtatgggaagaagtgtgagcacccacagtcctgcacgctgtcagctgaggagagcatcaggaagtgccagggaagctcggatctgccttgctctgggaggggtaaatgtgaatgtggcaaatgcacctgctatcctccaggagatcgccgggtgtatggcaagacttgtgagtgtgatgatcgccgctgtgaagacctcgatggtgtggtctgtggaggccacggcacatgttcctgtggtcgctgtgtttgtgagagaggatggtttggaaagctctgccaacatccgcggaagtgtaacatgacggaagaacaaagcaagaatctgtgtgaatcagcagatggcatattgtgctcggggaagggttcttgtcattgtgggaagtgcatttgttctgctgaagagtggtatatttctggggagttctgtgactgtgatgacagagactgcgacaaacatgatggtctcatttgtacagggaatggaatatgtagctgtggaaactgtgaatgctgggatggatggaatggaaatgcatgtgaaatctggcttggctcagaatatccttaacaattacatgagagaggtctggattcttattttttctgggccattagaacagataaatgcgaaggaaaccatgtatattcaccactaggacaggttaaaaagaccattgtatgtttttctatttctgaattacgaatgaaatccgagtacctattagaaatgagttatgcaaatttagatgcaaataacattagaaaaaaaagattcttccataattaacataagtggttcctaacgagagcaatttttccacccaaaagtcatttggcaacatctacagacaattttgattgtcacactgggtc

SEQ ID NO: 14542 - DNA, 2494 bp, Homo sapiens
  source 1..2494: mol_type = unassigned DNA
accagcaccccgcccagagcagtgccgctgcccaaatcctcgcaggcagctcatcaacgcaattgcaactccggctggagccccggacctgcaagcctgggtgtccgtgggtccgtctgcccagccatctgctggtggcacctctccctcctgccgcctccctcggtgaaccccaccttgcagaagtgcagctcgcccggagcagcccaggagctcagcatgcgtcccccaggcttcaggaacttcttgctgctggcgtcctcccttctctttgctgggttgtcagctgttcctcaaagcttctcgccatctctgaggagctggccgggcgccgcctgcaggctgtcccgggccgagtcggagcgacgctgccgcgcacctgggcagcccccgggggccgcgctgtgccacggccggggccgctgcgactgcggcgtctgcatctgccacgtgactgagccgggcatgttcttcgggcccctgtgtgagtgccatgagtgggtgtgcgagacctacgacgggagcacctgtgcaggccatggtaagtgtgactgtggcaagtgcaagtgtgaccagggatggtatggggatgcttgccagtacccaactaactgtgacttgacaaagaagaaaagtaaccaaatgtgcaagaattcacaagacatcatctgctctaatgcaggtacatgtcactgtggcaggtgtaagtgtgataattcagatggaagtggacttgtgtatggtaaattttgtgagtgtgacgatagagaatgcatagacgatgaaacagaagaaatatgtggaggccatgggaagtgttactgtggaaactgctactgcaaggctggttggcatggagataaatgtgaattccagtgcgatatcaccccctgggaaagcaagcgaagatgcacgtctccagatggcaaaatctgcagtaacagagggacttgtgtatgtggtgaatgtacctgtcacgatgttgatccgactggggactggggagatattcatggggacacctgtgaatgtgatgagagggactgtagagctgtctatgaccgatattctgatgacttctgttcaggtcatggacagtgtaattgcggaagatgtgactgcaaagcaggctggtatgggaagaagtgtgagcacccacagtcctgcacgctgtcagctgaggagagcatcaggaagtgccagggaagctcggatctgccttgctctgggaggggtaaatgtgaatgtggcaaatgcacctgctatcctccaggagatcgccgggtgtatggcaagacttgtgagtgtgatgatcgccgctgtgaagacctcgatggtgtggtctgtggaggccacggcacatgttcctgtggtcgctgtgtttgtgagagaggatggtttggaaagctctgccaacatccgcggaagtgtaacatgacggaagaacaaagcaagaatctgtgtgaatcagcagatggcatattgtgctcggggaagggttcttgtcattgtgggaagtgcatttgttctgctgaagagtggtatatttctggggagttctgtgactgtgatgacagagactgcgacaaacatgatggtctcatttgtacagggaatggaatatgtagctgtggaaactgtgaatgctgggatggatggaatggaaatgcatgtgaaatctggcttggctcagaatatccttaacaattacatgagagaggtctggattcttattttttctgggccattagaacagataaatgcgaaggaaaccatgtatattcaccactaggacaggttaaaaagaccattgtatgtttttctatttctgaattacgaatgaaatccgagtacctattagaaatgagttatgcaaatttagatgcaaataacattagaaaaaaaagattcttccataattaacataagtggttcctaacgagagcaatttttccacccaaaagtcatttggcaacatctacagacaattttgattgtcacactgggtcgggtaggaaggtatgctgcagacatttggtgggtagaggccagggatgctgctgagcatcccgcagtgtacaggacagcccccaaacaaggaattatccagccccaaatgccaatagggctcaaactgagaaacattgagttatatggctattagaaatccacattcttacacaagaaagaccatattagaatctaaggaaaacatgcatattcacattaattaatcgatcagatttttccagaattccgtatcagtcaccattttaatatggggacaatgaagacaagcacacaggaggtagaatatcagagtggggctggatcaagggcaaaaactggtcattaagtcatctgacattaaatcatttagccactaagttatttgtctactctcactttaaactcaccaaagaagattctcttaaagaaattatgaaaaatgtacaatttaacattttaaataaatagtgacagaagttgttta

SEQ ID NO: 14543 - DNA, 2491 bp, Homo sapiens
  source 1..2491: mol_type = unassigned DNA
accagcaccccgcccagagcagtgccgctgcccaaatcctcgcaggcagctcatcaacgcaattgcaactccggctggagccccggacctgcaagcctgggtgtccgtgggtccgtctgcccagccatctgctggtggcacctctccctcctgccgcctccctcggtgaaccccaccttgcagaagtgcagctcgcccggagcagcccaggagctcagcatgcgtcccccaggcttcaggaacttcttgctgctggcgtcctcccttctctttgctgggttgtcagctgttcctcaaagcttctcgccatctctgaggagctggccgggcgccgcctgcaggctgtcccgggccgagtcggagcgacgctgccgcgcacctgggcagcccccgggggccgcgctgtgccacggccggggccgctgcgactgcggcgtctgcatctgccacgtgactgagccgggcatgttcttcgggcccctgtgtgagtgccatgagtgggtgtgcgagacctacgacgggagcacctgtgcaggccatggtaagtgtgactggcaagtgcaagtgtgaccagggatggtatggggatgcttgccagtacccaactaactgtgacttgacaaagaagaaaagtaaccaaatgtgcaagaattcacaagacatcatctgctctaatgcaggtacatgtcactgtggcaggtgtaagtgtgataattcagatggaagtggacttgtgtatggtaaattttgtgagtgtgacgatagagaatgcatagacgatgaaacagaagaaatatgtggaggccatgggaagtgttactgtggaaactgctactgcaaggctggttggcatggagataaatgtgaattccagtgcgatatcaccccctgggaaagcaagcgaagatgcacgtctccagatggcaaaatctgcagtaacagagggacttgtgtatgtggtgaatgtacctgtcacgatgttgatccgactggggactggggagatattcatggggacacctgtgaatgtgatgagagggactgtagagctgtctatgaccgatattctgatgacttctgttcaggtcatggacagtgtaattgcggaagatgtgactgcaaagcaggctggtatgggaagaagtgtgagcacccacagtcctgcacgctgtcagctgaggagagcatcaggaagtgccagggaagctcggatctgccttgctctgggaggggtaaatgtgaatgtggcaaatgcacctgctatcctccaggagatcgccgggtgtatggcaagacttgtgagtgtgatgatcgccgctgtgaagacctcgatggtgtggtctgtggaggccacggcacatgttcctgtggtcgctgtgtttgtgagagaggatggtttggaaagctctgccaacatccgcggaagtgtaacatgacggaagaacaaagcaagaatctgtgtgaatcagcagatggcatattgtgctcggggaagggttcttgtcattgtgggaagtgcatttgttctgctgaagagtggtatatttctggggagttctgtgactgtgatgacagagactgcgacaaacatgatggtctcatttgtacagggaatggaatatgtagctgtggaaactgtgaatgctgggatggatggaatggaaatgcatgtgaaatctggcttggctcagaatatccttaacaattacatgagagaggtctggattcttattttttctgggccattagaacagataaatgcgaaggaaaccatgtatattcaccactaggacaggttaaaaagaccattgtatgtttttctatttctgaattacgaatgaaatccgagtacctattagaaatgagttatgcaaatttagatgcaaataacattagaaaaaaaagattcttccataattaacataagtggttcctaacgagagcaatttttccacccaaaagtcatttggcaacatctacagacaattttgattgtcacactgggtcgggtaggaaggtatgctgcagacatttggtgggtagaggccagggatgctgctgagcatcccgcagtgtacaggacagcccccaaacaaggaattatccagccccaaatgccaatagggctcaaactgagaaacattgagttatatggctattagaaatccacattcttacacaagaaagaccatattagaatctaaggaaaacatgcatattcacattaattaatcgatcagatttttccagaattccgtatcagtcaccattttaatatggggacaatgaagacaagcacacaggaggtagaatatcagagtggggctggatcaagggcaaaaactggtcattaagtcatctgacattaaatcatttagccactaagttatttgtctactctcactttaaactcaccaaagaagattctcttaaagaaattatgaaaaatgtacaatttaacattttaaataaatagtgacagaagttgttt

SEQ ID NO: 14544 - DNA, 2155 bp, Homo sapiens
  source 1..2155: mol_type = unassigned DNA
agagcagtgccgctgcccaaatcctcgcaggcagctcatcaacgcaattgcaactccggctggagccccggacctgcaagcctgggtgtccgtgggtccgtctgcccagccatctgctggtggcacctctccctcctgccacgtgactgagtgccatgagtgggtgtgcgagacctacgacgggagcacctgtgcaggccatggtaagtgtgactgtggcaagtgcaagtgtgaccagggatggtatggggatgcttgccagtacccaactaactgtgacttgacaaagaagaaaagtaaccaaatgtgcaagaattcacaagacatcatctgctctaatgcaggtacatgtcactgtggcaggtgtaagtgtgataattcagatggaagtggacttgtgtatggtaaattttgtgagtgtgacgatagagaatgcatagacgatgaaacagaagaaatatgtggaggccatgggaagtgttactgtggaaactgctactgcaaggctggttggcatggagataaatgtgaattccagtgcgatatcaccccctgggaaagcaagcgaagatgcacgtctccagatggcaaaatctgcagtaacagagggacttgtgtatgtggtgaatgtacctgtcacgatgttgatccgactggggactggggagatattcatggggacacctgtgaatgtgatgagagggactgtagagctgtctatgaccgatattctgatgacttctgttcaggtcatggacagtgtaattgcggaagatgtgactgcaaagcaggctggtatgggaagaagtgtgagcacccacagtcctgcacgctgtcagctgaggagagcatcaggaagtgccagggaagctcggatctgccttgctctgggaggggtaaatgtgaatgtggcaaatgcacctgctatcctccaggagatcgccgggtgtatggcaagacttgtgagtgtgatgatcgccgctgtgaagacctcgatggtgtggtctgtggaggccacggcacatgttcctgtggtcgctgtgtttgtgagagaggatggtttggaaagctctgccaacatccgcggaagtgtaacatgacggaagaacaaagcaagaatctgtgtgaatcagcagatggcatattgtgctcggggaagggttcttgtcattgtgggaagtgcatttgttctgctgaagagtggtatatttctggggagttctgtgactgtgatgacagagactgcgacaaacatgatggtctcatttgtacagggaatggaatatgtagctgtggaaactgtgaatgctgggatggatggaatggaaatgcatgtgaaatctggcttggctcagaatatccttaacaattacatgagagaggtctggattcttattttttctgggccattagaacagataaatgcgaaggaaaccatgtatattcaccactaggacaggttaaaaagaccattgtatgtttttctatttctgaattacgaatgaaatccgagtacctattagaaatgagttatgcaaatttagatgcaaataacattagaaaaaaaagattcttccataattaacataagtggttcctaacgagagcaatttttccacccaaaagtcatttggcaacatctacagacaattttgattgtcacactgggtcgggtaggaaggtatgctgcagacatttggtgggtagaggccagggatgctgctgagcatcccgcagtgtacaggacagcccccaaacaaggaattatccagccccaaatgccaatagggctcaaactgagaaacattgagttatatggctattagaaatccacattcttacacaagaaagaccatattagaatctaaggaaaacatgcatattcacattaattaatcgatcagatttttccagaattccgtatcagtcaccattttaatatggggacaatgaagacaagcacacaggaggtagaatatcagagtggggctggatcaagggcaaaaactggtcattaagtcatctgacattaaatcatttagccactaagttatttgtctactctcactttaaactcaccaaagaagattctcttaaagaaattatgaaaaatgtacaatttaacattttaaataaatagtgacagaagttgttt

SEQ ID NO: 14545 - DNA, 1863 bp, Homo sapiens
  source 1..1863: mol_type = unassigned DNA
atcaacgcaattgcaactccggctggagccccggacctgcaagcctgggtgtccgtgggtccgtctgcccagccatctgctggtggcacctctccctcctgccgcctccctcggtgaaccccaccttgcagaagtgcagctcgcccggagcagcccaggagctcagcatgcgtcccccaggcttcaggaacttcttgctgctggcgtcctcccttctctttgctgggttgtcagctgttcctcaaagcttctcgccatctctgaggccatggtaagtgtgactgtggcaagtgcaagtgtgaccagggatggtatggggatgcttgccagtacccaactaactgtgacttgacaaagaagaaaagtaaccaaatgtgcaagaattcacaagacatcatctgctctaatgcaggtacatgtcactgtggcaggtgtaagtgtgataattcagatggaagtggacttgtgtatggtaaattttgtgagtgtgacgatagagaatgcatagacgatgaaacagaagaaatatgtggaggccatgggaagtgttactgtggaaactgctactgcaaggctggttggcatggagataaatgtgaattccagtgcgatatcaccccctgggaaagcaagcgaagatgcacgtctccagatggcaaaatctgcagtaacagagggacttgtgtatgtggtgaatgtacctgtcacgatgttgatccgactggggactggggagatattcatggggacacctgtgaatgtgatgagagggactgtagagctgtctatgaccgatattctgatgacttctgttcaggtcatggacagtgtaattgcggaagatgtgactgcaaagcaggctggtatgggaagaagtgtgagcacccacagtcctgcacgctgtcagctgaggagagcatcaggaagtgccagggaagctcggatctgccttgctctgggaggggtaaatgtgaatgtggcaaatgcacctgctatcctccaggagatcgccgggtgtatggcaagacttgtgagtgtgatgatcgccgctgtgaagacctcgatggtgtggtctgtggaggccacggcacatgttcctgtggtcgctgtgtttgtgagagaggatggtttggaaagctctgccaacatccgcggaagtgtaacatgacggaagaacaaagcaagaatctgtgtgaatcagcagatggcatattgtgctcggggaagggttcttgtcattgtgggaagtgcatttgttctgctgaagagtggtatatttctggggagttctgtgactgtgatgacagagactgcgacaaacatgatggtctcatttgtacagggaatggaatatgtagctgtggaaactgtgaatgctgggatggatggaatggaaatgcatgtgaaatctggcttggctcagaatatccttaacaattacatgagagagcaattttgatgacgtattcgctgatgcacagacattggaattcattacattatctagccatcgtaatacaaatgacctttggatttctctatcacggcgcttatcctcctattaaggatcagaaagttaaactttacggaccacgtacgtccctgtctcatattcttctttgttggtttctgtttaatactttaaagctgtaaaaaaaatttaaaaaattccttctgagctcccaggccatacaaaagcaacttaagggtggatttggctggcagctgggcagtactttgtcagcctcagctccactggaactgcccttgattctctatagctcatcacaaaacctcaggtatgtcttatttttcttataatcctctgtatgttattatcctttttattaacaacaacaacta

SEQ ID NO: 14546 - DNA, 1033 bp, Homo sapiens
  source 1..1033: mol_type = unassigned DNA
tctgtgccactcactgccttgagcctgcttcctcactccaggactgccagaggaagcaatcaccaaaatgaagactgctttaattttgctcagcattttgggaatggcctgtgctttctcaatgaaaaatttgcatcgaagagtcaaaatagaggattctgaagaaaatggggtctttaagtacaggccacgatattatctttacaagcatgcctacttttatcctcatttaaaacgatttccagttcagggcagtagtgactcatccgaagaaaatggagatgacagttcagaagaggaggaggaagaagaggagacttcaaatgaaggagaaaacaatgaagaatcgaatgaagatgaagactctgaggctgagaataccacactttctgctacaacactgggctatggagaggacgccacgcctggcacagggtatacagggttagctgcaatccagcttcccaagaaggctggggatataacaaataaagctacaaaagagaaggaaagtgatgaagaagaagaggaggaagaggaaggaaatgaaaacgaagaaagcgaagcagaagtggatgaaaacgaacaaggcataaacggcaccagtaccaacagcacagaggcagaaaacggcaacggcagcagcggaggagacaatggagaagaaggggaagaagaaagtgtcactggagccaatgcagaagacaccacagagaccggaaggcagggcaagggcacctcgaagacaacaacctctccaaatggtgggtttgaacctacaaccccaccacaagtctatagaaccacttccccaccttttgggaaaaccaccaccgttgaatacgagggggagtacgaatacacgggcgccaatgaatacgacaatggatatgaaatctatgaaagtgagaacggggaacctcgtggggacaattaccgagcctatgaagatgagtacagctactttaaaggacaaggctacgatggctatgatggtcagaattactaccaccaccagtgaagctccagcctg

SEQ ID NO: 14547 - DNA, 1183 bp, Homo sapiens
  source 1..1183: mol_type = unassigned DNA
aggagcgtttttggagaaagctgcactctgttgagctccagggcgcagtggagggagggagtgaaggagctctctgtacccaaggaaagtgcagctgagactcagacaagattacaatgaaccaactcagcttcctgctgtttctcatagcgaccaccagaggatggagtacagatgaggctaatacttacttcaaggaatggacctgttcttcgtctccatctctgcccagaagctgcaaggaaatcaaagacgaatgtcctagtgcatttgatggcctgtattttctccgcactgagaatggtgttatctaccagaccttctgtgacatgacctctgggggtggcggctggaccctggtggccagcgtgcacgagaatgacatgcgtgggaagtgcacggtgggcgatcgctggtccagtcagcagggcagcaaagcagtctacccagagggggacggcaactgggccaactacaacacctttggatctgcagaggcggccacgagcgatgactacaagaaccctggctactacgacatccaggccaaggacctgggcatctggcacgtgcccaataagtcccccatgcagcactggagaaacagctccctgctgaggtaccgcacggacactggcttcctccagacactgggacataatctgtttggcatctaccagaaatatccagtgaaatatggagaaggaaagtgttggactgacaacggcccggtgatccctgtggtctatgattttggcgacgcccagaaaacagcatcttattactcaccctatggccagcgggaattcactgcgggatttgttcagttcagggtatttaataacgagagagcagccaacgccttgtgtgctggaatgagggtcaccggatgtaacactgagcaccactgcattggtggaggaggatactttccagaggccagtccccagcagtgtggagatttttctggttttgattggagtggatatggaactcatgttggttacagcagcagccgtgagataactgaggcagctgtgcttctattctatcgttgagagttttgtgggagggaacccagacctctcctcccaaccatgagatcccaaggatggagaacaacttacccagtagctagaatgttaatggcagaagagaaaacaataaatcatattgactcaag

SEQ ID NO: 14548 - DNA, 1151 bp, Homo sapiens
  source 1..1151: mol_type = unassigned DNA
gcaggggagctccgagtgtccacaggaagggaactatcagctcctggcatctgtaaggatgctgtccatgctgaggacaatgaccagactctgcttcctgttattcttctctgtggccaccagtgggtgcagtgcagcagcagcctcttctcttgagatgctctcgagggaattcgaaacctgtgccttctccttttcttccctgcctagaagctgcaaagaaatcaaggaacgctgccatagtgcaggtgatggcctgtattttctccgcaccaagaatggtgttgtctaccagaccttctgtgacatgacttctgggggtggcggctggaccctggtggccagcgtgcacgagaatgacatgcgtgggaagtgcacggtgggtgatcgctggtccagtcagcagggcaacaaagcagactacccagagggggatggcaactgggccaactacaacacctttggatctgcagaggcggccacgagcgatgactacaagaaccctggctactacgacatccaggccaaggacctgggcatctggcatgtgcccaacaagtcccccatgcagcattggagaaacagcgccctgctgaggtaccgcaccaacactggcttcctccagagactgggacataatctgtttggcatctaccagaaatacccagtgaaatacagatcagggaaatgttggaatgacaatggcccagccatacctgtggtctatgactttggtgatgctaagaagactgcatcttattactcaccgtatggtcaacgggaatttgttgcaggattcgttcagttccgggtgtttaataacgagagagcagccaacgccctttgtgctgggataaaagttactggctgtaacactgagcatcactgcatcggtggaggagggttcttcccacagggcaaaccccgtcagtgtggggacttctccgcctttgactgggatggatatggaactcacgttaagagcagctgcagtcgggagataacggaggcggctgtactcttgttctatagatgagacagagctctgcggtgtcagggcgagaacccatcttccaaccccggctatttggagacggaaaaactggaattctaacaaggaggagaggagactaaatcacatcaatttgcaa

SEQ ID NO: 14549 - DNA, 2911 bp, Homo sapiens
  source 1..2911: mol_type = unassigned DNA
acagggcagcaggagccttagagcatggacggtgccatggggcctcgggggctgctgttgtgcatgtacctggtatctctcctcatcctgcaggccatgcctgccctgggctcggctacaggcaggtccaagagcagcgagaagcgacaggctgtggacaccgctgtcgatggcgtgttcatccggagtttgaaagtcaactgcaaagtcacctctcgcttcgcccactatgttgtcaccagccaagtggtcaacactgccaatgaagccagggaagtggccttcgacctggaaatccccaagacagcattcatcagtgactttgccgttacagcagatggaaacgcatttatcggagacataaaggacaaggtgactgcatggaagcagtaccggaaagcagctatctcaggagagaatgccggccttgtcagggcctcggggagaactatggagcaattcaccatccacctcaccgtcaatccccagagcaaggtcacgtttcagctgacttatgaggaagtgctgaagagaaaccatatgcagtatgaaattgtcatcaaagtcaagcccaagcagctggtgcatcattttgagattgatgtggacatcttcgagccccaggggatcagcaagctggatgcccaggcctctttcctgccgaaggaactggcagcccaaactatcaagaagtccttctcaggaaaaaagggtcatgtgctgttccgtcccaccgtgagccagcagcagtcctgccccacatgctctacatccttactgaacgggcacttcaaggtgacctacgatgtcagtcgagacaagatctgcgacctcctggtggccaataaccactttgcccacttctttgccccccaaaacctgacaaacatgaacaagaacgtggtttttgtgattgacatcagtggctccatgagaggccagaaagtgaagcagaccaaggaggcactccttaaaattctgggggacatgcagccaggggactactttgacctggttctttttgggactcgagtacaatcgtggaagggctcgctggtgcaagcatctgaggccaacctacaagcagctcaagactttgtgcggggcttttccctggatgaggccacaaacctgaatggaggtttgctccggggaattgagatcttgaaccaagttcaggaaagcctcccagaactcagcaaccatgcctcaatactcatcatgttgacagatggcgatcccacagagggggtgacggaccgttcccaaatcctcaagaacgtccgcaacgccatccggggcaggttcccgctctacaacctgggtttcggccacaatgtggactttaactttctggaggtcatgtccatggagaacaacggacgggcccagagaatctacgaggaccatgatgccacccagcagctgcagggtttctacagccaggtagccaaacccctgctggtggatgtggatttgcagtacccccaggatgctgtcttggccctgacccagaaccaccataaacagtactacgaaggctcagagattgtggtggccgggcgcattgctgacaacaaacagagcagcttcaaggctgatgtgcaggcccatggggagggacaagaattcagtataacctgcctagtggatgaggaggagatgaagaaactgctccgagagcgtggccacatgctggagaaccacgtcgagcgcctctgggcctacctcaccatccaggagctgctggccaagcggatgaaggtggacagggaggagagggccaacctgtcatcccaggccctgcagatgtcgctggactatgggtttgtgaccccactgacctccatgagcatcaggggcatggcggaccaggacggcctgaagcccaccatcgacaagccctcagaggattctccgcctttggagatgctgggacccagaaggacgttcgtgctgtcagccttgcagccttctcctactcattccagctccaatacccagcggctgccagaccgagtgaccggcgtggacacagaccctcacttcatcatccacgtgccccagaaagaggacaccctgtgcttcaacatcaatgaggagcctggtgttatcctgagcctggtacaggaccccaacacaggcttctcagtgaatggacagctcattggcaacaaggccaggagccctgggcagcatgacggcacgtacttcgggcggctgggaatcgcaaaccctgccacggactttcagttggaagtgactcctcagaacattacgctgaaccccggctttggtgggcctgtgttttcctggagggaccaagctgtgctgcggcaggacggggtggtggtgaccatcaacaagaagaggaacctggtggtgtctgtggacgacggtggcacctttgaggttgttttgcaccgagtgtggaaggggagctcggtccaccaggacttcctgggcttctatgtgctggacagtcatcggatgtcagcccggacgcacgggctgctggggcaatttttccaccccatcggttttgaagtgtctgacatccacccaggctctgaccccacaaagccagatgccacgatggtggtgaggaaccgccggctcacggtcaccaggggtttgcaaaaagactacagcaaggacccgtggcatggggccgaggtgtcctgctggttcattcacaacaatggggctggactcatcgatggtgcctacactgattatatcgtccccgacatcttctgagccctctggccagcacgcctgtcctcccccggggccaaggcagaggaggaggacgacatcctgacctgctgctgaggctgtacctccttgactaagctggttccttgtgtcaaagcacctcatgccttccattaaagagaggccgtgtcca

SEQ ID NO: 14550 - DNA, 2486 bp, Homo sapiens
  source 1..2486: mol_type = unassigned DNA
gaattattgctggcacctaagtggtggctgagttgagggatgcaggcatgtacaccttcatttggtcagtatttttggagtgcctactgagtaccaggccctgtgatcagggctgggtgggtgctgcacacagtaggtggccaggacacatgctggctcttggctgagacttgattgatgtggacatcttcgagccccaggggatcagcaagctggatgcccaggcctctttcctgccgaaggaactggcagcccaaactatcaagaagtccttctcaggaaaaaagggtcatgtgctgttccgtcccaccgtgagccagcagcagtcctgccccacatgctctacatccttactgaacgggcacttcaaggtgacctacgatgtcagtcgagacaagatctgcgacctcctggtggccaataaccactttgcccacttctttgccccccaaaacctgacaaacatgaacaagaacgtggtttttgtgattgacatcagtggctccatgagaggccagaaagtgaagcagaccaaggaggcactccttaaaattctgggggacatgcagccaggggactactttgacctggttctttttgggactcgagtacaatcgtggaagggctcgctggtgcaagcatctgaggccaacctacaagcagctcaagactttgtgcggggcttttccctggatgaggccacaaacctgaatggaggtttgctccggggaattgagatcttgaaccaagttcaggaaagcctcccagaactcagcaaccatgcctcaatactcatcatgttgacagatggcgatcccacagagggggtgacggaccgttcccaaatcctcaagaacgtccgcaacgccatccggggcaggttcccgctctacaacctgggtttcggccacaatgtggactttaactttctggaggtcatgtccatggagaacaacggacgggcccagagaatctacgaggaccatgatgccacccagcagctgcagggtttctacagccaggtagccaaacccctgctggtggatgtggatttgcagtacccccaggatgctgtcttggccctgacccagaaccaccataaacagtactacgaaggctcagagattgtggtggccgggcgcattgctgacaacaaacagagcagcttcaaggctgatgtgcaggcccatggggagggacaagaattcagtataacctgcctagtggatgaggaggagatgaagaaactgctccgagagcgtggccacatgctggagaaccacgtcgagcgcctctgggcctacctcaccatccaggagctgctggccaagcggatgaaggtggacagggaggagagggccaacctgtcatcccaggccctgcagatgtcgctggactatgggtttgtgaccccactgacctccatgagcatcaggggcatggcggaccaggacggcctgaagcccaccatcgacaagccctcagaggattctccgcctttggagatgctgggacccagaaggacgttcgtgctgtcagccttgcagccttctcctactcattccagctccaatacccagcggctgccagaccgagtgaccggcgtggacacagaccctcacttcatcatccacgtgccccagaaagaggacaccctgtgcttcaacatcaatgaggagcctggtgttatcctgagcctggtacaggaccccaacacaggcttctcagtgaatggacagctcattggcaacaaggccaggagccctgggcagcatgacggcacgtacttcgggcggctgggaatcgcaaaccctgccacggactttcagttggaagtgactcctcagaacattacgctgaaccccggctttggtgggcctgtgttttcctggagggaccaagctgtgctgcggcaggacggggtggtggtgaccatcaacaagaagaggaacctggtggtgtctgtggacgacggtggcacctttgaggttgttttgcaccgagtgtggaaggggagctcggtccaccaggacttcctgggcttctatgtgctggacagtcatcggatgtcagcccggacgcacgggctgctggggcaatttttccaccccatcggttttgaagtgtctgacatccacccaggctctgaccccacaaagccagatgccacgatggtggtgaggaaccgccggctcacggtcaccaggggtttgcaaaaagactacagcaaggacccgtggcatggggccgaggtgtcctgctggttcattcacaacaatggggctggactcatcgatggtgcctacactgattatatcgtccccgacatcttctgagccctctggccagcacgcctgtcctcccccggggccaaggcagaggaggaggacgacatcctgacctgctgctgaggctgtacctccttgactaagctggttccttgtgtcaaagcacctcatgccttccattaaagagaggccgtgtcc

SEQ ID NO: 14551 - DNA, 2741 bp, Homo sapiens
  source 1..2741: mol_type = unassigned DNA
gtgcgtgcctgcccaactcccatgccttctcccaggggtgccgcttactagtcccagcttaagaacaaggatcggagtggccagataacgcagagcatctcctcattctagaagggccacagaccagccctggctttgaggggaggaagaagccctttagtacagcagatggaaacgcatttatcggagacataaaggacaaggtgactgcatggaagcagtaccggaaagcagctatctcaggagagaatgccggccttgtcagggcctcggggagaactatggagcaattcaccatccacctcaccgtcaatccccagagcaaggtcacgtttcagctgacttatgaggaagtgctgaagagaaaccatatgcagtatgaaattgtcatcaaagtcaagcccaagcagctggtgcatcattttgagattgatgtggacatcttcgagccccaggggatcagcaagctggatgcccaggcctctttcctgccgaaggaactggcagcccaaactatcaagaagtccttctcaggaaaaaagggtcatgtgctgttccgtcccaccgtgagccagcagcagtcctgccccacatgctctacatccttactgaacgggcacttcaaggtgacctacgatgtcagtcgagacaagatctgcgacctcctggtggccaataaccactttgcccacttctttgccccccaaaacctgacaaacatgaacaagaacgtggtttttgtgattgacatcagtggctccatgagaggccagaaagtgaagcagaccaaggaggcactccttaaaattctgggggacatgcagccaggggactactttgacctggttctttttgggactcgagtacaatcgtggaagggctcgctggtgcaagcatctgaggccaacctacaagcagctcaagactttgtgcggggcttttccctggatgaggccacaaacctgaatggaggtttgctccggggaattgagatcttgaaccaagttcaggaaagcctcccagaactcagcaaccatgcctcaatactcatcatgttgacagatggcgatcccacagagggggtgacggaccgttcccaaatcctcaagaacgtccgcaacgccatccggggcaggttcccgctctacaacctgggtttcggccacaatgtggactttaactttctggaggtcatgtccatggagaacaacggacgggcccagagaatctacgaggaccatgatgccacccagcagctgcagggtttctacagccaggtagccaaacccctgctggtggatgtggatttgcagtacccccaggatgctgtcttggccctgacccagaaccaccataaacagtactacgaaggctcagagattgtggtggccgggcgcattgctgacaacaaacagagcagcttcaaggctgatgtgcaggcccatggggagggacaagaattcagtataacctgcctagtggatgaggaggagatgaagaaactgctccgagagcgtggccacatgctggagaaccacgtcgagcgcctctgggcctacctcaccatccaggagctgctggccaagcggatgaaggtggacagggaggagagggccaacctgtcatcccaggccctgcagatgtcgctggactatgggtttgtgaccccactgacctccatgagcatcaggggcatggcggaccaggacggcctgaagcccaccatcgacaagccctcagaggattctccgcctttggagatgctgggacccagaaggacgttcgtgctgtcagccttgcagccttctcctactcattccagctccaatacccagcggctgccagaccgagtgaccggcgtggacacagaccctcacttcatcatccacgtgccccagaaagaggacaccctgtgcttcaacatcaatgaggagcctggtgttatcctgagcctggtacaggaccccaacacaggcttctcagtgaatggacagctcattggcaacaaggccaggagccctgggcagcatgacggcacgtacttcgggcggctgggaatcgcaaaccctgccacggactttcagttggaagtgactcctcagaacattacgctgaaccccggctttggtgggcctgtgttttcctggagggaccaagctgtgctgcggcaggacggggtggtggtgaccatcaacaagaagaggaacctggtggtgtctgtggacgacggtggcacctttgaggttgttttgcaccgagtgtggaaggggagctcggtccaccaggacttcctgggcttctatgtgctggacagtcatcggatgtcagcccggacgcacgggctgctggggcaatttttccaccccatcggttttgaagtgtctgacatccacccaggctctgaccccacaaagccagatgccacgatggtggtgaggaaccgccggctcacggtcaccaggggtttgcaaaaagactacagcaaggacccgtggcatggggccgaggtgtcctgctggttcattcacaacaatggggctggactcatcgatggtgcctacactgattatatcgtccccgacatcttctgagccctctggccagcacgcctgtcctcccccggggccaaggcagaggaggaggacgacatcctgacctgctgctgaggctgtacctccttgactaagctggttccttgtgtcaaagcacctcatgccttccattaaagagaggccgtgtcc

SEQ ID NO: 14552 - DNA, 2778 bp, Homo sapiens
  source 1..2778: mol_type = unassigned DNA
aggtgacagggcagcaggagccttagagcatggacggtgccatggggcctcgggggctgctgttgtgcatgtacctggtatctctcctcatcctgcaggccatgcctgccctgggctcggctacaggcaggtccaagagcagcgagaagcgacaggctgtggacaccgctgtcgatggcgtgttcatccggagtttgaaagtcaactgcaaagtcacctctcgcttcgcccactatgttgtcaccagccaagtggtcaacactgccaatgaagccagggaagtggccttcgacctggaaatccccaagacagcattcatcagtgactttgccgttacagcagatggaaacgcatttatcggagacataaaggacaaggtgactgcatggaagcagtaccggaaagcagctatctcaggagagaatgccggccttgtcagggcctcggggagaactatggagcaattcaccatccacctcaccgtcaatccccagagcaaggtcacgtttcagctgacttatgaggaagtgctgaagagaaaccatatgcagtatgaaattgtcatcaaagtcaagcccaagcagctggtgcatcattttgagattgatgtggacatcttcgagccccaggggatcagcaagctggatgcccaggcctctttcctgccgaaggaactggcagcccaaactatcaagaagtccttctcaggaaaaaagggtcatgtgctgttccgtcccaccgtgagccagcagcagtcctgccccacatgctctacatccttactgaacgggcacttcaaggtgacctacgatgtcagtcgagacaagatctgcgacctcctggtggccaataaccactttgcccacttctttgccccccaaaacctgacaaacatgaacaagaacgtggtttttgtgattgacatcagtggctccatgagaggccagaaagtgaagcagaccaaggaggcactccttaaaattctgggggacatgcagccaggggactactttgacctggttctttttgggactcgagtacaatcgtggaagggctcgctggtgcaagcatctgaggccaacctacaagcagctcaagactttgtgcggggcttttccctggatgaggccacaaacctgaatggaggtttgctccggggaattgagatcttgaaccaagttcaggaaagcctcccagaactcagcaaccatgcctcaatactcatcatgttgacagatggcgatcccacagagggggtgacggaccgttcccaaatcctcaagaacgtccgcaacgccatccggggcaggttcccgctctacaacctgggtttcggccacaatgtggactttaactttctggaggtcatgtccatggagaacaacggacgggcccagagaatctacgaggaccatgatgccacccagcagctgcagggtttctacagccaggtagccaaacccctgctggtggatgtggatttgcagtacccccaggatgctgtcttggccctgacccagaaccaccataaacagtactacgaaggctcagagattgtggtggccgggcgcattgctgacaacaaacagagcagcttcaaggctgatgtgcaggcccatggggagggacaagaattcagtataacctgcctagtggatgaggaggagatgaagaaactgctccgagagcgtggccacatgctggagaaccacgtcgagcgcctctgggcctacctcaccatccaggagctgctggccaagcggatgaaggtggacagggaggagagggccaacctgtcatcccaggccctgcagatgtcgctggactatgggtttgtgaccccactgacctccatgagcatcaggggcatggcggaccaggacggcctgaagcccaccatcgacaaaccctcacttcatcatccacgtgccccagaaagaggacaccctgtgcttcaacatcaatgaggagcctggtgttatcctgagcctggtacaggaccccaacacaggcttctcagtgaatggacagctcattggcaacaaggccaggagccctgggcagcatgacggcacgtacttcgggcggctgggaatcgcaaaccctgccacggactttcagttggaagtgactcctcagaacattacgctgaaccccggctttggtgggcctgtgttttcctggagggaccaagctgtgctgcggcaggacggggtggtggtgaccatcaacaagaagaggaacctggtggtgtctgtggacgacggtggcacctttgaggttgttttgcaccgagtgtggaaggggagctcggtccaccaggacttcctgggcttctatgtgctggacagtcatcggatgtcagcccggacgcacgggctgctggggcaatttttccaccccatcggttttgaagtgtctgacatccacccaggctctgaccccacaaagccagatgccacgatggtggtgaggaaccgccggctcacggtcaccaggggtttgcaaaaagactacagcaaggacccgtggcatggggccgaggtgtcctgctggttcattcacaacaatggggctggactcatcgatggtgcctacactgattatatcgtccccgacatcttctgagccctctggccagcacgcctgtcctcccccggggccaaggcagaggaggaggacgacatcctgacctgctgctgaggctgtacctccttgactaagctggttccttgtgtcaaagcacctcatgccttccattaaagagaggccgtgtcc

SEQ ID NO: 14553 - DNA, 3193 bp, Homo sapiens
  source 1..3193: mol_type = unassigned DNA
atttgtcccaattttgaacaaagttagagagttttttcttcttttttcttctttcttaaagcgaactgtactcctctgctgttcctttgaacttggttcagtaggaagaagtgatatcctccccagaccatctgctttggggagcttggcaaaactgtccagcaaaatgaaaagactcacgtgctttttcatctgcttctttctttctgaagtatcaggcttcgaaatccccataaatggactttctgaatttgtagactatgaagatcttgtggaactggccccaggcaaatttcaattggtggcagagaaccggagatatcagagaagccttccaggagaatcggaagaaatgatggaagaggttgatcaagtaactctttatagctataaagtccagtctactattacttctcggatggccaccaccatgatccagagcaaagtggtgaacaattccccgcagcctcagaatgtcgtgtttgatgttcagatccccaaaggagcattcatttccaacttctccatgactgtggacggcaagacatttaggagctctattaaggagaaaactgtgggccgagctctttatgcacaggccagagcaaaaggcaagacggctggcttggtgaggagcagcgctcttgatatggaaaacttcagaacggaagtaaatgtcctcccaggagcaaaggtgcagttcgaacttcactaccaggaggtgaagtggaggaagctgggctcctatgagcacaggatctatctgcaacctggacggctggccaaacacttagaggtagatgtgtgggttatcgaaccacagggactgagatttcttcatgttcccgacacatttgaaggccatttcgatggtgttccggtcatttctaaaggacaacagaaggcgcacgtctccttcaagcccacggtagcacagcagagaatatgccctaactgccgggagactgcggtagatggggaactggtggtgctgtatgacgtgaaaagagaagagaaggctggtgaactggaggtgtttaatggatattttgtccacttctttgctcctgacaacctggacccaattcccaaaaacatcctctttgtcatcgatgtgagtggctccatgtggggagttaaaatgaaacaaactgtggaagcaatgaagaccatattggatgacctcagagcagaagaccatttctctgtgattgatttcaaccagaacattcgaacttggagaaatgatttaatttcagctacaaaaacacaggttgcagatgccaagaggtatattgagaaaatccagcccagtggaggcacaaacatcaacgaagcactcctacgggcaatcttcattttgaatgaagccaataacttgggactgttagaccccaactccgtctcgctgatcattttggtttctgatggagatccaacagtgggcgaactaaaactgtcaaaaattcagaaaaacgttaaggagaacatccaagacaatatctccttgttcagtttgggcatgggatttgatgtggactatgattttttgaagagactgtccaatgaaaaccatggaattgcacaaaggatttatggaaaccaggacacgtcttcccagcttaagaaattctacaaccaggtctccactccattgctccggaatgttcagttcaactatccccatacatcagtcacggacgtcactcaaaacaatttccataactactttggaggctcagagattgtggtggcaggaaaatttgaccctgctaaattggatcaaatagagagcgttatcacggcgacttcggctaacacgcagttagtcttggagaccctggcccagatggacgacttgcaggattttctatcgaaagacaagcatgcagatcccgatttcaccaggaaactgtgggcctatctaaccatcaaccaactgctagctgaacgaagcctggctcctacagctgccgccaagagaagaattacaagatcgatcctgcagatgtctctagaccaccacattgtgactccgctgacctcgctggtgatcgagaacgaggctggggatgagcgcatgctggcggatgccccaccgcaggatccctcctgctgctcaggggccctgtattacggcagcaaagtggttccagattccaccccgtcttgggccaatccttcaccaacgcccgtgatctccatgctggcacaaggatctcaggtgctagagtccacgccacccccacatgtgatgagagttgaaaatgacccacatttcatcatttatctaccaaaaagccaaaagaacatttgtttcaatattgactcagaacctggaaaaatcctcaacctggtttctgacccagaatcaggaattgtagtcaacggtcagcttgttggtgccaagaagcccaacaatggaaaactaagcacctattttggaaaactgggattttatttccaaagtgaagacataaaaatagaaatcagcactgagaccatcaccctgagccatggttctagcacattctccttgtcctggtccgacacggctcaagtcacgaatcagagggtgcagatctcagtgaagaaagaaaaagtggtaactatcaccctggataaagagatgtccttttctgttttacttcatcgtgtttggaagaagcatcccgtcaatgttgactttctgggaatctacataccccctacaaacaagttctcacctaaagcccacggactaataggccagttcatgcaggaaccaaagatacacatcttcaatgagagaccaggaaaggaccctgagaagccagaggccagcatggaagtgaaggggcagaagctgatcatcaccaggggcttacagaaagactacagaacggatctagtgtttggaacggacgttacctgctggtttgtgcacaacagtggaaaaggattcattgacgggcattacaaggattacttcgtgcctcagctctacagctttctcaaacggccttaaaggtttatagtttgggaaattatatatattaatatacatctttcccctgtcacttttgcagatattcttcggtttgaataattaaaatgaaccagatatcagggtggttaattaaaatgaaccagatatcagggtggtttataaagcctgtaaacacacctaagaaaataaacattttacaaatga

SEQ ID NO: 14554 - DNA, 3033 bp, Homo sapiens
  source 1..3033: mol_type = unassigned DNA
atataaggagcgtgggccaggcctgagtattcagcgatggcatttgcatggtggccctgtctcatcttggctctgctctccagcttggcagcctcttcccgagaagcccctttcggctgcttgggaaacggagcctcccggaaggggtggccaatggcatcgaggtctacagtaccaaaatcaactccaaggtgacctcccgttttgctcacaatgttgtcaccatgagagccgtcaaccgtgcagacacggccaaggaggtttcctttgatgtggagctgcccaagacggccttcatcaccaacttcaccttgaccatcgacggtgttacctaccctgggaatgtcaaggagaaggaagttgccaagaagcagtatgaaaaggctgtgtcccagggcaagacggccggcttggtcaaggcctctgggaggaagttggagaagttcacagtctcggtcaacgtggctgcaggcagcaaagtcaccttcgagctaacctacgaggagctgctgaagaggcacaagggcaagtacgagatgtacctcaaggtccagcctaagcaactggtcaaacactttgagatcgaggtagacatcttcgagcctcagggaatcagcatgctggatgctgaggcctctttcatcaccaacgacctcctgggaagcgccctcaccaagtccttctcagggaaaaagggccatgtgtccttcaagcccagcttagaccaacagcgttcatgcccaacctgtacagactccctcctcaatggagatttcactatcacctatgacgtgaacagagaatctcctggcaacgtgcagatagtcaatggctacttcgtgcacttctttgcacctcaaggccttccagtggtgcctaagaacgtggcctttgtgattgacatcagcggctccatggctggtcggaaattagagcagacaaaggaggcccttctcagaatcctggaagatatgcaagaggaagactatctgaatttcatcctgttcagtggagatgtgtccacatggaaagagcacttagtccaggccacgcccgagaacctccaggaggccaggacgtttgtgaagagcatggaggataaaggaatgaccaacatcaatgacgggctgctgaggggcatcagtatgctgaacaaggcccgagaggagcacagaatcccagagaggagcacctccattgtcatcatgctgactgatggggatgccaatgttggtgagagcagacccgaaaaaatccaagagaatgtgcggaatgccatcgggggcaagttccccttgtataacctgggctttggcaacaatctgaattataacttcctggagaacatggccctggagaaccatgggtttgcccggcgcatttatgaggactctgatgccgatttgcagttgcagggcttctatgaggaggtggccaacccactgctgacgggtgtggagatggagtaccccgagaacgctatcctggacctcacccagaacacttaccagcacttctacgatggctctgagatcgtggtggccgggcgcctggtggacgaggacatgaacagctttaaggcagatgtgaagggccatggggccaccaacgacctgaccttcacagaggaggtggacatgaaggagatggagaaggccctgcaggagcgggactacatcttcgggaattacattgagcggctctgggcctacctcaccattgagcagctgctggagaagcgcaagaacgcccatggcgaggagaaggagaacctcacggcccgggccctggacctgtccctcaagtatcactttgtgactccactgacctcaatggtggtgaccaagcctgaggacaacgaggatgagagggccattgccgacaagcctggggaaggcttttcagccacaccggtgagccccgccatgtcctacctgaccagctaccagcctcctcaaaacccctactactatgtggacggggatccccacttcatcatccaaattccggagaaagacgatgccctctgcttcaacatcgatgaagccccaggcacagtgctgcgccttattcaggatgcagtcacaggcctcacagttaatgggcagatcactggcgacaagagaggcagccctgactccaagaccagaaagacttactttggaaaactgggcatcgccaatgctcagatggacttccaggtggaggtgacaacggagaagatcaccctgtggaacagggccgtgccgagcactttcagctggctggacacagtcacagtcacgcaggatgggctgtccatgatgatcaacaggaagaacatggtggtctcctttggagatggggttaccttcgtggtcgtcctacaccaggtgtggaagaaacatcctgtccaccgtgactttctaggcttctacgtggtggacagtcaccggatgtcagcacagacgcatgggctgctggggcaattcttccaaccctttgactttaaagtgtctgacatccggccaggctctgaccccacaaagccagatgccacattggtggtgaagaaccatcagctgattgtcaccaggggctcccagaaagactacagaaaggatgccagcatcggcacgaaggttgtctgctggttcgtccacaacaacggagaagggctgattgatggtgtccacactgactacattgtccccaacctgttttgagtagacacaccagctcctgttgggatggatggcccggattttatggcatctggaacatgggcacagagaggggcctgtgggaggggctgggaaaataaagtccaaggtcgagaccagacagctgccagcctctacatgccttcatgagcctctgctccagggaacaggcaactgggacccacagcagctcaaaagaggggatggctagcaggaaggcaacttcttgggcctctccactgacacagctgagagacagagttggttggactagaactttagggattcaaatgtatgacagcttgggggaaaaaataaagaactgactctg

SEQ ID NO: 14555 - DNA, 3038 bp, Homo sapiens
  source 1..3038: mol_type = unassigned DNA
atataaggagcgtgggccaggcctgagtattcagcgatggcatttgcatggtggccctgtctcatcttggctctgctctccagcttggcagcctctggcttcccgagaagcccctttcggctgcttgggaaacggagcctcccggaaggggtggccaatggcatcgaggtctacagtaccaaaatcaactccaaggtgacctcccgttttgctcacaatgttgtcaccatgagagccgtcaaccgtgcagacacggccaaggaggtttcctttgatgtggagctgcccaagacggccttcatcaccaacttcaccttgaccatcgacggtgttacctaccctgggaatgtcaaggagaaggaagttgccaagaagcagtatgaaaaggctgtgtcccagggcaagacggccggcttggtcaaggcctctgggaggaagttggagaagttcacagtctcggtcaacgtggctgcaggcagcaaagtcaccttcgagctaacctacgaggagctgctgaagaggcacaagggcaagtacgagatgtacctcaaggtccagcctaagcaactggtcaaacactttgagatcgaggtagacatcttcgagcctcagggaatcagcatgctggatgctgaggcctctttcatcaccaacgacctcctgggaagcgccctcaccaagtccttctcagggaaaaagggccatgtgtccttcaagcccagcttagaccaacagcgttcatgcccaacctgtacagactccctcctcaatggagatttcactatcacctatgacgtgaacagagaatctcctggcaacgtgcagatagtcaatggctacttcgtgcacttctttgcacctcaaggccttccagtggtgcctaagaacgtggcctttgtgattgacatcagcggctccatggctggtcggaaattagagcagacaaaggaggcccttctcagaatcctggaagatatgcaagaggaagactatctgaatttcatcctgttcagtggagatgtgtccacatggaaagagcacttagtccaggccacgcccgagaacctccaggaggccaggacgtttgtgaagagcatggaggataaaggaatgaccaacatcaatgacgggctgctgaggggcatcagtatgctgaacaaggcccgagaggagcacagaatcccagagaggagcacctccattgtcatcatgctgactgatggggatgccaatgttggtgagagcagacccgaaaaaatccaagagaatgtgcggaatgccatcgggggcaagttccccttgtataacctgggctttggcaacaatctgaattataacttcctggagaacatggccctggagaaccatgggtttgcccggcgcatttatgaggactctgatgccgatttgcagttgcagggcttctatgaggaggtggccaacccactgctgacgggtgtggagatggagtaccccgagaacgctatcctggacctcacccagaacacttaccagcacttctacgatggctctgagatcgtggtggccgggcgcctggtggacgaggacatgaacagctttaaggcagatgtgaagggccatggggccaccaacgacctgaccttcacagaggaggtggacatgaaggagatggagaaggccctgcaggagcgggactacatcttcgggaattacattgagcggctctgggcctacctcaccattgagcagctgctggagaagcgcaagaacgcccatggcgaggagaaggagaacctcacggcccgggccctggacctgtccctcaagtatcactttgtgactccactgacctcaatggtggtgaccaagcctgaggacaacgaggatgagagggccattgccgacaagcctggggaaggtggggatagccacaccggtgagccccgccatgtcctacctgaccagctaccagcctcctcaaaacccctactactatgtggacggggatccccacttcatcatccaaattccggagaaagacgatgccctctgcttcaacatcgatgaagccccaggcacagtgctgcgccttattcaggatgcagtcacaggcctcacagttaatgggcagatcactggcgacaagagaggcagccctgactccaagaccagaaagacttactttggaaaactgggcatcgccaatgctcagatggacttccaggtggaggtgacaacggagaagatcaccctgtggaacagggccgtgccgagcactttcagctggctggacacagtcacagtcacgcaggatgggctgtccatgatgatcaacaggaagaacatggtggtctcctttggagatggggttaccttcgtggtcgtcctacaccaggtgtggaagaaacatcctgtccaccgtgactttctaggcttctacgtggtggacagtcaccggatgtcagcacagacgcatgggctgctggggcaattcttccaaccctttgactttaaagtgtctgacatccggccaggctctgaccccacaaagccagatgccacattggtggtgaagaaccatcagctgattgtcaccaggggctcccagaaagactacagaaaggatgccagcatcggcacgaaggttgtctgctggttcgtccacaacaacggagaagggctgattgatggtgtccacactgactacattgtccccaacctgttttgagtagacacaccagctcctgttgggatggatggcccggattttatggcatctggaacatgggcacagagaggggcctgtgggaggggctgggaaaataaagtccaaggtcgagaccagacagctgccagcctctacatgccttcatgagcctctgctccagggaacaggcaactgggacccacagcagctcaaaagaggggatggctagcaggaaggcaacttcttgggcctctccactgacacagctgagagacagagttggttggactagaactttagggattcaaatgtatgacagcttgggggaaaaaataaagaactgactctg

SEQ ID NO: 14556 - DNA, 3007 bp, Homo sapiens
  source 1..3007: mol_type = unassigned DNA
tcagcgatggcatttgcatggtggccctgtctcatcttggctctgctctccagcttggcagcctctggcttcccgagaagcccctttcggctgcttgggaaacggagcctcccggaaggggtggccaatggcatcgaggtctacagtaccaaaatcaactccaaggtgacctcccgttttgctcacaatgttgtcaccatgagagccgtcaaccgtgcagacacggccaaggaggtttcctttgatgtggagctgcccaagacggccttcatcaccaacttcaccttgaccatcgacggtgttacctaccctgggaatgtcaaggagaaggaagttgccaagaagcagtatgaaaaggctgtgtcccagggcaagacggccggcttggtcaaggcctctgggaggaagttggagaagttcacagtctcggtcaacgtggctgcaggcagcaaagtcaccttcgagctaacctacgaggagctgctgaagaggcacaagggcaagtacgagatgtacctcaaggtccagcctaagcaactggtcaaacactttgagatcgaggtagacatcttcgagcctcagggaatcagcatgctggatgctgaggcctctttcatcaccaacgacctcctgggaagcgccctcaccaagtccttctcagggaaaaagggccatgtgtccttcaagcccagcttagaccaacagcgttcatgcccaacctgtacagactccctcctcaatggagatttcactatcacctatgacgtgaacagagaatctcctggcaacgtgcagatagtcaatggctacttcgtgcacttctttgcacctcaaggccttccagtggtgcctaagaacgtggcctttgtgattgacatcagcggctccatggctggtcggaaattagagcagacaaaggaggcccttctcagaatcctggaagatatgcaagaggaagactatctgaatttcatcctgttcagtggagatgtgtccacatggaaagagcacttagtccaggccacgcccgagaacctccaggaggccaggacgtttgtgaagagcatggaggataaaggaatgaccaacatcaatgacgggctgctgaggggcatcagtatgctgaacaaggcccgagaggagcacagaatcccagagaggagcacctccattgtcatcatgctgactgatggggatgccaatgttggtgagagcagacccgaaaaaatccaagagaatgtgcggaatgccatcgggggcaagttccccttgtataacctgggctttggcaacaatctgaattataacttcctggagaacatggccctggagaaccatgggtttgcccggcgcatttatgaggactctgatgccgatttgcagttgcagggcttctatgaggaggtggccaacccactgctgacgggtgtggagatggagtaccccgagaacgctatcctggacctcacccagaacacttaccagcacttctacgatggctctgagatcgtggtggccgggcgcctggtggacgaggacatgaacagctttaaggcagatgtgaagggccatggggccaccaacgacctgaccttcacagaggaggtggacatgaaggagatggagaaggccctgcaggagcgggactacatcttcgggaattacattgagcggctctgggcctacctcaccattgagcagctgctggagaagcgcaagaacgcccatggcgaggagaaggagaacctcacggcccgggccctggacctgtccctcaagtatcactttgtgactccactgacctcaatggtggtgaccaagcctgaggacaacgaggatgagagggccattgccgacaagcctggggaagatgcagaagccacaccggtgagccccgccatgtcctacctgaccagctaccagcctcctcaaaacccctactactatgtggacggggatccccacttcatcatccaaattccggagaaagacgatgccctctgcttcaacatcgatgaagccccaggcacagtgctgcgccttattcaggatgcagtcacaggcctcacagttaatgggcagatcactggcgacaagagaggcagccctgactccaagaccagaaagacttactttggaaaactgggcatcgccaatgctcagatggacttccaggtggaggtgacaacggagaagatcaccctgtggaacagggccgtgccgagcactttcagctggctggacacagtcacagtcacgcaggatgggctgtccatgatgatcaacaggaagaacatggtggtctcctttggagatggggttaccttcgtggtcgtcctacaccaggtgtggaagaaacatcctgtccaccgtgactttctaggcttctacgtggtggacagtcaccggatgtcagcacagacgcatgggctgctggggcaattcttccaaccctttgactttaaagtgtctgacatccggccaggctctgaccccacaaagccagatgccacattggtggtgaagaaccatcagctgattgtcaccaggggctcccagaaagactacagaaaggatgccagcatcggcacgaaggttgtctgctggttcgtccacaacaacggagaagggctgattgatggtgtccacactgactacattgtccccaacctgttttgagtagacacaccagctcctgttgggatggatggcccggattttatggcatctggaacatgggcacagagaggggcctgtgggaggggctgggaaaataaagtccaaggtcgagaccagacagctgccagcctctacatgccttcatgagcctctgctccagggaacaggcaactgggacccacagcagctcaaaagaggggatggctagcaggaaggcaacttcttgggcctctccactgacacagctgagagacagagttggttggactagaactttagggattcaaatgtatgacagcttgggggaaaaaataaagaactgactctg

SEQ ID NO: 14557 - DNA, 3002 bp, Homo sapiens
  source 1..3002: mol_type = unassigned DNA
atataaggagcgtgggccaggcctgagtattcagcgatggcatttgcatggtggccctgtctcatcttggctctgctctccagcttggcagcctctggcttcccgagaagcccctttcggctgcttgggaaacggagcctcccggaaggggtggccaatggcatcgaggtctacagtaccaaaatcaactccaaggtgacctcccgttttgctcacaatgttgtcaccatgagagccgtcaaccgtgcagacacggccaaggaggtttcctttgatgtggagctgcccaagacggccttcatcaccaacttcaccttgaccatcgacggtgttacctaccctgggaatgtcaaggagaaggaagttgccaagaagcagtatgaaaaggctgtgtcccagggcaagacggccggcttggtcaaggcctctgggaggaagttggagaagttcacagtctcggtcaacgtggctgcaggcagcaaaaggcacaagggcaagtacgagatgtacctcaaggtccagcctaagcaactggtcaaacactttgagatcgaggtagacatcttcgagcctcagggaatcagcatgctggatgctgaggcctctttcatcaccaacgacctcctgggaagcgccctcaccaagtccttctcagggaaaaagggccatgtgtccttcaagcccagcttagaccaacagcgttcatgcccaacctgtacagactccctcctcaatggagatttcactatcacctatgacgtgaacagagaatctcctggcaacgtgcagatagtcaatggctacttcgtgcacttctttgcacctcaaggccttccagtggtgcctaagaacgtggcctttgtgattgacatcagcggctccatggctggtcggaaattagagcagacaaaggaggcccttctcagaatcctggaagatatgcaagaggaagactatctgaatttcatcctgttcagtggagatgtgtccacatggaaagagcacttagtccaggccacgcccgagaacctccaggaggccaggacgtttgtgaagagcatggaggataaaggaatgaccaacatcaatgacgggctgctgaggggcatcagtatgctgaacaaggcccgagaggagcacagaatcccagagaggagcacctccattgtcatcatgctgactgatggggatgccaatgttggtgagagcagacccgaaaaaatccaagagaatgtgcggaatgccatcgggggcaagttccccttgtataacctgggctttggcaacaatctgaattataacttcctggagaacatggccctggagaaccatgggtttgcccggcgcatttatgaggactctgatgccgatttgcagttgcagggcttctatgaggaggtggccaacccactgctgacgggtgtggagatggagtaccccgagaacgctatcctggacctcacccagaacacttaccagcacttctacgatggctctgagatcgtggtggccgggcgcctggtggacgaggacatgaacagctttaaggcagatgtgaagggccatggggccaccaacgacctgaccttcacagaggaggtggacatgaaggagatggagaaggccctgcaggagcgggactacatcttcgggaattacattgagcggctctgggcctacctcaccattgagcagctgctggagaagcgcaagaacgcccatggcgaggagaaggagaacctcacggcccgggccctggacctgtccctcaagtatcactttgtgactccactgacctcaatggtggtgaccaagcctgaggacaacgaggatgagagggccattgccgacaagcctggggaaggtggggatagccacaccggtgagccccgccatgtcctacctgaccagctaccagcctcctcaaaacccctactactatgtggacggggatccccacttcatcatccaaattccggagaaagacgatgccctctgcttcaacatcgatgaagccccaggcacagtgctgcgccttattcaggatgcagtcacaggcctcacagttaatgggcagatcactggcgacaagagaggcagccctgactccaagaccagaaagacttactttggaaaactgggcatcgccaatgctcagatggacttccaggtggaggtgacaacggagaagatcaccctgtggaacagggccgtgccgagcactttcagctggctggacacagtcacagtcacgcaggatgggctgtccatgatgatcaacaggaagaacatggtggtctcctttggagatggggttaccttcgtggtcgtcctacaccaggtgtggaagaaacatcctgtccaccgtgactttctaggcttctacgtggtggacagtcaccggatgtcagcacagacgcatgggctgctggggcaattcttccaaccctttgactttaaagtgtctgacatccggccaggctctgaccccacaaagccagatgccacattggtggtgaagaaccatcagctgattgtcaccaggggctcccagaaagactacagaaaggatgccagcatcggcacgaaggttgtctgctggttcgtccacaacaacggagaagggctgattgatggtgtccacactgactacattgtccccaacctgttttgagtagacacaccagctcctgttgggatggatggcccggattttatggcatctggaacatgggcacagagaggggcctgtgggaggggctgggaaaataaagtccaaggtcgagaccagacagctgccagcctctacatgccttcatgagcctctgctccagggaacaggcaactgggacccacagcagctcaaaagaggggatggctagcaggaaggcaacttcttgggcctctccactgacacagctgagagacagagttggttggactagaactttagggattcaaatgtatgacagcttgggggaaaaaataaagaactgactctg

SEQ ID NO: 14558 - DNA, 3336 bp, Homo sapiens
  source 1..3336: mol_type = unassigned DNA
aacctgcccccatgtgggtggggcagcaaacaagttactaatccattccccacttgctgtcgagttcagaagcctcctggcagacactggagccacgatgaagcccccaaggcctgtccgtacctgcagcaaagttctcgtcctgctttcactgctggccatccaccagactactactgccgaaaagaatggcatcgacatctacagcctcaccgtggactccagggtctcatcccgatttgcccacacggtcgtcaccagccgagtggtcaatagggccaatactgtgcaggaggccaccttccagatggagctgcccaagaaagccttcatcaccaacttctccatgatcatcgatggcatgacctacccagggatcatcaaggagaaggctgaagcccaggcacagtacagcgcagcagtggccaagggaaagagcgctggcctcgtcaaggccaccgggagaaacatggagcagttccaggtgtcggtcagtgtggctcccaatgccaagatcacctttgagctggtctatgaggagctgctcaagcggcgtttgggggtgtacgagctgctgctgaaagtgcggccccagcagctggtcaagcacctgcagatggacattcacatcttcgagccccagggcatcagctttctggagacagagagcaccttcatgaccaaccagctggtagacgccctcaccacctggcagaataagaccaaggctcacatccggttcaagccaacactttcccagcagcaaaagtccccagagcagcaagaaacagtcctggacggcaacctcattatccgctatgatgtggaccgggccatctccgggggctccattcagatcgagaacggctactttgtacactactttgcccccgagggcctaaccacaatgcccaagaatgtggtctttgtcattgacaagagcggctccatgagtggcaggaaaatccagcagacccgggaagccctaatcaagatcctggatgacctcagccccagagaccagttcaacctcatcgtcttcagtacagaagcaactcagtggaggccatcactggtgccagcctcagccgagaacgtgaacaaggccaggagctttgctgcgggcatccaggccctgggagggaccaacatcaatgatgcaatgctgatggctgtgcagttgctggacagcagcaaccaggaggagcggctgcccgaagggagtgtctcactcatcatcctgctcaccgatggcgaccccactgtgggggagactaaccccaggagcatccagaataacgtgcgggaagctgtaagtggccggtacagcctcttctgcctgggcttcggtttcgacgtcagctatgccttcctggagaagctggcactggacaatggcggcctggcccggcgcatccatgaggactcagactctgccctgcagctccaggacttctaccaggaagtggccaacccactgctgacagcagtgaccttcgagtacccaagcaatgccgtggaggaggtcactcagaacaacttccggctcctcttcaagggctcagagatggtggtggctgggaagctccaggaccgggggcctgatgtgctcacagccacagtcagtgggaagctgcctacacagaacatcactttccaaacggagtccagtgtggcagagcaggaggcggagttccagagccccaagtatatcttccacaacttcatggagaggctctgggcatacctgactatccagcagctgctggagcaaactgtctccgcatccgatgctgatcagcaggccctccggaaccaagcgctgaatttatcacttgcctacagctttgtcacgcctctcacatctatggtagtcaccaaacccgatgaccaagagcagtctcaagttgctgagaagcccatggaaggcgaaagtagaaacaggaatgtccactcaggttccactttcttcaaatattatctccagggagcaaaaataccaaaaccagaggcttccttttctccaagaagaggatggaatagacaagctggagctgctggctcccggatgaatttcagacctggggttctcagctccaggcaacttggactcccaggacctcctgatgttcctgaccatgctgcttaccaccccttccgccgtctggccatcttgcctgcttcagcaccaccagccacctcaaatcctgatccagctgtgtctcgtgtcatgaatatgaaaatcgaagaaacaaccatgacaacccaaaccccagcccccatacaggctccctctgccatcctgccactgcctgggcagagtgtggagcggctctgtgtggaccccagacaccgccaggggccagtgaacctgctctcagaccctgagcaaggggttgaggtgactggccagtatgagagggagaaggctgggttctcatggatcgaagtgaccttcaagaaccccctggtatgggttcacgcatcccctgaacacgtggtggtgactcggaaccgaagaagctctgcgtacaagtggaaggagacgctattctcagtgatgcccggcctgaagatgaccatggacaagacgggtctcctgctgctcagtgacccagacaaagtgaccatcggcctgttgttctgggatggccgtggggaggggctccggctccttctgcgtgacactgaccgcttctccagccacgttggagggacccttggccagttttaccaggaggtgctctggggatctccagcagcatcagatgacggcagacgcacgctgagggttcagggcaatgaccactctgccaccagagagcgcaggctggattaccaggaggggcccccgggagtggagatttcctgctggtctgtggagctgtagttctgatggaaggagctgtgcccaccctgtacacttggcttccccctgcaactgcagggccgcttctggggcctggaccaccatggggaggaagagtcccactcattacaaataaagaaaggtggtgtgagcctgggaagtgggtgtctccagttccatgtggccaaatcctagggcctcaacctcgcatcctgaaccttagcatcgtggaacacagaagcttccactgtcagctctcaagagcccatggccaggaaggcccatgctgagctttcagtccagccccttcattttacaaacaaggaaactgagctcgaaccacccatttgagatgtcactgtggcccccagctagaggcccagggctgggagcattctccaggagcagaggttcagtctgcttcatggtctcttggaccagttttgactacaaaaaaaaaaaaaaaa

SEQ ID NO: 14559 - DNA, 3235 bp, Homo sapiens
  source 1..3235: mol_type = unassigned DNA
taatccattccccacttgctgtcgagttcagaagcctcctggcagacactggagccacgatgaagcccccaaggcctgtccgtacctgcagcaaagttctcgtcctgctttcactgctggccatccaccagactactactgccgaaaagaatggcatcgacatctacagcctcaccgtggactccagggtctcatcccgatttgcccacacggtcgtcaccagccgagtggtcaatagggccaatactgtgcaggaggccaccttccagatggagctgcccaagaaagccttcatcaccaacttctccatgatcatcgatggcatgacctacccagggatcatcaaggagaaggctgaagcccaggcacagtacagcgcagcagtggccaagggaaagagcgctggcctcgtcaaggccaccgggagaaacatggagcagttccaggtgtcggtcagtgtggctcccaatgccaagatcacctttgagctggtctatgaggagctgctcaagcggcgtttgggggtgtacgagctgctgctgaaagtgcggccccagcagctggtcaagcacctgcagatggacattcacatcttcgagccccagggcatcagctttctggagacagagagcaccttcatgaccaaccagctggtagacgccctcaccacctggcagaataagaccaaggctcacatccggttcaagccaacactttcccagcagcaaaagtccccagagcagcaagaaacagtcctggacggcaacctcattatccgctatgatgtggaccgggccatctccgggggctccattcagatcgagaacggctactttgtacactactttgcccccgagggcctaaccacaatgcccaagaatgtggtctttgtcattgacaagagcggctccatgagtggcaggaaaatccagcagacccgggaagccctaatcaagatcctggatgacctcagccccagagaccagttcaacctcatcgtcttcagtacagaagcaactcagtggaggccatcactggtgccagcctcagccgagaacgtgaacaaggccaggagctttgctgcgggcatccaggccctgggagggaccaacatcaatgatgcaatgctgatggctgtgcagttgctggacagcagcaaccaggaggagcggctgcccgaagggagtgtctcactcatcatcctgctcaccgatggcgaccccactgtgggggagactaaccccaggagcatccagaataacgtgcgggaagctgtaagtggccggtacagcctcttctgcctgggcttcggtttcgacgtcagctatgccttcctggagaagctggcactggacaatggcggcctggcccggcgcatccatgaggactcagactctgccctgcagctccaggacttctaccaggaagtggccaacccactgctgacagcagtgaccttcgagtacccaagcaatgccgtggaggaggtcactcagaacaacttccggctcctcttcaagggctcagagatggtggtggctgggaagctccaggaccgggggcctgatgtgctcacagccacagtcagtgggaagctgcctacacagaacatcactttccaaacggagtccagtgtggcagagcaggaggcggagttccagagccccaagtatatcttccacaacttcatggagaggctctgggcatacctgactatccagcagctgctggagcaaactgtctccgcatccgatgctgatcagcaggccctccggaaccaagcgctgaatttatcacttgcctacagctttgtcacgcctctcacatctatggtagtcaccaaacccgatgaccaagagcagtctcaagttgctgagaagcccatggaaggcgaaagtagaaacaggaatgtccactcagctggagctgctggctcccggatgaatttcagacctggggttctcagctccaggcaacttggactcccaggacctcctgatgttcctgaccatgctgcttaccaccccttccgccgtctggccatcttgcctgcttcagcaccaccagccacctcaaatcctgatccagctgtgtctcgtgtcatgaatatgaaaatcgaagaaacaaccatgacaacccaaaccccagcctgcccttcctgctccaggagccgtgccccggctgtcccagcccccatacaggctccctctgccatcctgccactgcctgggcagagtgtggagcggctctgtgtggaccccagacaccgccaggggccagtgaacctgctctcagaccctgagcaaggggttgaggtgactggccagtatgagagggagaaggctgggttctcatggatcgaagtgaccttcaagaaccccctggtatgggttcacgcatcccctgaacacgtggtggtgactcggaaccgaagaagctctgcgtacaagtggaaggagacgctattctcagtgatgcccggcctgaagatgaccatggacaagacgggtctcctgctgctcagtgacccagacaaagtgaccatcggcctgttgttctgggatggccgtggggaggggctccggctccttctgcgtgacactgaccgcttctccagccacgttggagggacccttggccagttttaccaggaggtgctctggggatctccagcagcatcagatgacggcagacgcacgctgagggttcagggcaatgaccactctgccaccagagagcgcaggctggattaccaggaggggcccccgggagtggagatttcctgctggtctgtggagctgtagttctgatggaaggagctgtgcccaccctgtacacttggcttccccctgcaactgcagggccgcttctggggcctggaccaccatggggaggaagagtcccactcattacaaataaagaaaggtggtgtgagcctgggaagtgggtgtctccagttccatgtggccaaatcctagggcctcaacctcgcatcctgaaccttagcatcgtggaacacagaagcttccactgtcagctctcaagagcccatggccaggaaggcccatgctgagctttcagtccagccccttcattttacaaacaaggaaactgagctcgaaccacccatttgagatgtcactgtggcccccagctagaggcccagggctgggagcattctccaggagcagaggttcagtctgcttcatggtctcttggaccagttttgactaca

SEQ ID NO: 14560 - DNA, 2872 bp, Homo sapiens
  source 1..2872: mol_type = unassigned DNA
agaagcctcctggcagacactggagccacgatgaagcccccaaggcctgtccgtacctgcagcaaagttctcgtcctgctttcactgctggccatccaccagactactactgccgaaaagaatggcatcgacatctacagcctcaccgtggactccagggtctcatcccgatttgcccacacggtcgtcaccagccgagtggtcaatagggccaatactgtgcaggaggccaccttccagatggagctgcccaagaaagccttcatcaccaacttctccatgatcatcgatggcatgacctacccagggatcatcaaggagaaggctgaagcccaggcacagtacagcgcagcagtggccaagggaaagagcgctggcctcgtcaaggccaccgggagaaacatggagcagttccaggtgtcggtcagtgtggctcccaatgccaagatcacctttgagctggtctatgaggagctgctcaagcggcgtttgggggtgtacgagctgctgctgaaagtgcggccccagcagctggtcaagcacctgcagatggacattcacatcttcgagccccagggcatcagctttctggagacagagagcaccttcatgaccaaccagctggtagacgccctcaccacctggcagaataagaccaaggctcacatccggttcaagccaacactttcccagcagcaaaagtccccagagcagcaagaaacagtcctggacggcaacctcattatccgctatgatgtggaccgggccatctccgggggctccattcagatcgagaacggctactttgtacactactttgcccccgagggcctaaccacaatgcccaagaatgtggtctttgtcattgacaagagcggctccatgagtggcaggaaaatccagcagacccgggaagccctaatcaagatcctggatgacctcagccccagagaccagttcaacctcatcgtcttcagtacagaagcaactcagtggaggccatcactggtgccagcctcagccgagaacgtgaacaaggccaggagctttgctgcgggcatccaggccctgggagggaccaacatcaatgatgcaatgctgatggctgtgcagttgctggacagcagcaaccaggaggagcggctgcccgaagggagtgtctcactcatcatcctgctcaccgatggcgaccccactgtgggggagactaaccccaggagcatccagaataacgtgcgggaagctgtaagtggccggtacagcctcttctgcctgggcttcggtttcgacgtcagctatgccttcctggagaagctggcactggacaatggcggcctggcccggcgcatccatgaggactcagactctgccctgcagctccaggacttctaccaggaagtggccaacccactgctgacagcagtgaccttcgagtacccaagcaatgccgtggaggaggtcactcagaacaacttccggctcctcttcaagggctcagagatggtggtggctgggaagctccaggaccgggggcctgatgtgctcacagccacagtcagtgggaagctgcctacacagaacatcactttccaaacggagtccagtgtggcagagcaggaggcggagttccagagccccaagtatatcttccacaacttcatggagaggctctgggcatacctgactatccagcagctgctggagcaaactgtctccgcatccgatgctgatcagcaggccctccggaaccaagcgctgaatttatcacttgcctacagctttgtcacgcctctcacatctatggtagtcaccaaacccgatgaccaagagcagtctcaagttgctgagaagcccatggaaggcgaaagtagaaacaggaatgtccactcagctggagctgctggctcccggatgaatttcagacctggggttctcagctccaggcaacttggactcccaggacctcctgatgttcctgaccatgctgcttaccaccccttccgccgtctggccatcttgcctgcttcagcaccaccagccacctcaaatcctgatccagctgtgtctcgtgtcatgaatatgaaaatcgaagaaacaaccatgacaacccaaaccccagcccccatacaggctccctctgccatcctgccactgcctgggcagagtgtggagcggctctgtgtggaccccagacaccgccaggggccagtgaacctgctctcagaccctgagcaaggggttgaggtgactggccagtatgagagggagaaggctgggttctcatggatcgaagtgaccttcaagaaccccctggtatgggttcacgcatcccctgaacacgtggtggtgactcggaaccgaagaagctctgcgtacaagtggaaggagacgctattctcagtgatgcccggcctgaagatgaccatggacaagacgggtctcctgctgctcagtgacccagacaaagtgaccatcggcctgttgttctgggatggccgtggggaggggctccggctccttctgcgtgacactgaccgcttctccagccacgttggagggacccttggccagttttaccaggaggtgctctggggatctccagcagcatcagatgacggcagacgcacgctgagggttcagggcaatgaccactctgccaccagagagcgcaggctggattaccaggaggggcccccgggagtggagatttcctgctggtctgtggagctgtagttctgatggaaggagctgtgcccaccctgtacacttggcttccccctgcaactgcagggccgcttctggggcctggaccaccatggggaggaagagtcccactcattacaaataaagaaaggtggtgtgagcctgggaa

SEQ ID NO: 14561 - DNA, 2109 bp, Homo sapiens
  source 1..2109: mol_type = unassigned DNA
acttgctgtcgagttcagaagcctcctggcagacactggagccacgatgaagcccccaaggcctgtccgtacctgcagcaaagttctcgtcctgctttcactgctggccatccaccagactactactgccgaaaaggatcatcgatggcatgacctacccagggatcatcaaggagaaggctgaagcccaggcacagtacagcgcagcagtggccaagggaaagagcgctggcctcgtcaaggccaccgggagaaacatggagcagttccaggtgtcggtcagtgtggctcccaatgccaagatcacctttgagctggtctatgaggagctgctcaagcggcgtttgggggtgtacgagctgctgctgaaagtgcggccccagcagctggtcaagcacctgcagatggacattcacatcttcgagccccagggcatcagctttctggagacagagagcaccttcatgaccaaccagctggtagacgccctcaccacctggcagaataagaccaaggctcacatccggttcaagccaacactttcccagcagcaaaagtccccagagcagcaagaaacagtcctggacggcaacctcattatccgctatgatgtggaccgggccatctccgggggctccattcagatcgagaacggctactttgtacactactttgcccccgagggcctaaccacaatgcccaagaatgtggtctttgtcattgacaagagcggctccatgagtggcaggaaaatccagcagacccgggaagccctaatcaagatcctggatgacctcagccccagagaccagttcaacctcatcgtcttcagtacagaagcaactcagtggaggccatcactggtgccagcctcagccgagaacgtgaacaaggccaggagctttgctgcgggcatccaggccctgggagggaccaacatcaatgatgcaatgctgatggctgtgcagttgctggacagcagcaaccaggaggagcggctgcccgaagggagtgtctcactcatcatcctgctcaccgatggcgaccccactgtgggggagactaaccccaggagcatccagaataacgtgcgggaagctgtaagtggccggtacagcctcttctgcctgggcttcggtttcgacgtcagctatgccttcctggagaagctggcactggacaatggcggcctggcccggcgcatccatgaggactcagactctgccctgcagctccaggacttctaccaggaagtggccaacccactgctgacagcagtgaccttcgagtacccaagcaatgccgtggaggaggtcactcagaacaacttccggctcctcttcaagggctcagagatggtggtggctgggaagctccaggaccgggggcctgatgtgctcacagccacagtcagtgggaagctgcctacacagaacatcactttccaaacggagtccagtgtggcagagcaggaggcggagttccagagccccaagtatatcttccacaacttcatggagaggctctgggcatacctgactatccagcagctgctggagcaaactgtctccgcatccgatgctgatcagcaggccctccggaaccaagcgctgaatttatcacttgcctacagctttgtcacgcctctcacatctatggtagtcaccaaacccgatgaccaagagcagtctcaagttgctgagaagcccatggaaggcgaaagtagaaacaggaatgtccactcaggttccactttcttcaaatattatctccagggagcaaaaataccaaaaccaggtgacaaagtaggaggtggggggaggggagattgacagattgggctcagtcctggctgtggagggtagtgccttgcccagctcctctggctggtgacagccctcgggcctcagttcagttgtatctgatcaggacttgaccacacagaggcttccttttctccaagaagaggatggaatagacaagctggagctgctggctcccggatgaatttcagacctggggttctcagctccaggcaacttggactcccaggacctcctgatgttcctgaccatgctgcttaccaccccttccgccgtctggccatct

SEQ ID NO: 14562 - DNA, 2834 bp, Homo sapiens
  source 1..2834: mol_type = unassigned DNA
agaagcctcctggcagacactggagccacgatgaagcccccaaggcctgtccgtacctgcagcaaagttctcgtcctgctttcactgctggccatccaccagactactactgccgaaaagaatggcatcgacatctacagcctcaccgtggactccagggtctcatcccgatttgcccacacggtcgtcaccagccgagtggtcaatagggccaatactgtgcaggaggccaccttccagatggagctgcccaagaaagccttcatcaccaacttctccatgatcatcgatggcatgacctacccagggatcatcaaggagaaggctgaagcccaggcacagtacagcgcagcagtggccaagggaaagagcgctggcctcgtcaaggccaccgggagaaacatggagcagttccaggtgtcggtcagtgtggctcccaatgccaagcggcgtttgggggtgtacgagctgctgctgaaagtgcggccccagcagctggtcaagcacctgcagatggacattcacatcttcgagccccagggcatcagctttctggagacagagagcaccttcatgaccaaccagctggtagacgccctcaccacctggcagaataagaccaaggctcacatccggttcaagccaacactttcccagcagcaaaagtccccagagcagcaagaaacagtcctggacggcaacctcattatccgctatgatgtggaccgggccatctccgggggctccattcagatcgagaacggctactttgtacactactttgcccccgagggcctaaccacaatgcccaagaatgtggtctttgtcattgacaagagcggctccatgagtggcaggaaaatccagcagacccgggaagccctaatcaagatcctggatgacctcagccccagagaccagttcaacctcatcgtcttcagtacagaagcaactcagtggaggccatcactggtgccagcctcagccgagaacgtgaacaaggccaggagctttgctgcgggcatccaggccctgggagggaccaacatcaatgatgcaatgctgatggctgtgcagttgctggacagcagcaaccaggaggagcggctgcccgaagggagtgtctcactcatcatcctgctcaccgatggcgaccccactgtgggggagactaaccccaggagcatccagaataacgtgcgggaagctgtaagtggccggtacagcctcttctgcctgggcttcggtttcgacgtcagctatgccttcctggagaagctggcactggacaatggcggcctggcccggcgcatccatgaggactcagactctgccctgcagctccaggacttctaccaggaagtggccaacccactgctgacagcagtgaccttcgagtacccaagcaatgccgtggaggaggtcactcagaacaacttccggctcctcttcaagggctcagagatggtggtggctgggaagctccaggaccgggggcctgatgtgctcacagccacagtcagtgggaagctgcctacacagaacatcactttccaaacggagtccagtgtggcagagcaggaggcggagttccagagccccaagtatatcttccacaacttcatggagaggctctgggcatacctgactatccagcagctgctggagcaaactgtctccgcatccgatgctgatcagcaggccctccggaaccaagcgctgaatttatcacttgcctacagctttgtcacgcctctcacatctatggtagtcaccaaacccgatgaccaagagcagtctcaagttgctgagaagcccatggaaggcgaaagtagaaacaggaatgtccactcagctggagctgctggctcccggatgaatttcagacctggggttctcagctccaggcaacttggactcccaggacctcctgatgttcctgaccatgctgcttaccaccccttccgccgtctggccatcttgcctgcttcagcaccaccagccacctcaaatcctgatccagctgtgtctcgtgtcatgaatatgaaaatcgaagaaacaaccatgacaacccaaaccccagcccccatacaggctccctctgccatcctgccactgcctgggcagagtgtggagcggctctgtgtggaccccagacaccgccaggggccagtgaacctgctctcagaccctgagcaaggggttgaggtgactggccagtatgagagggagaaggctgggttctcatggatcgaagtgaccttcaagaaccccctggtatgggttcacgcatcccctgaacacgtggtggtgactcggaaccgaagaagctctgcgtacaagtggaaggagacgctattctcagtgatgcccggcctgaagatgaccatggacaagacgggtctcctgctgctcagtgacccagacaaagtgaccatcggcctgttgttctgggatggccgtggggaggggctccggctccttctgcgtgacactgaccgcttctccagccacgttggagggacccttggccagttttaccaggaggtgctctggggatctccagcagcatcagatgacggcagacgcacgctgagggttcagggcaatgaccactctgccaccagagagcgcaggctggattaccaggaggggcccccgggagtggagatttcctgctggtctgtggagctgtagttctgatggaaggagctgtgcccaccctgtacacttggcttccccctgcaactgcagggccgcttctggggcctggaccaccatggggaggaagagtcccactcattacaaataaagaaaggtggtgtgagcctggg

SEQ ID NO: 14563 - DNA, 6722 bp, Homo sapiens
  source 1..6722: mol_type = unassigned DNA
gtcccgcagtggctggagccctgggcgctgcaaagcgtgtcccgccgggtccccgagcgtcccgcgccctcgccccgccatgctcctgctgctggggctgtgcctggggctgtccctgtgtgtggggtcgcaggaagaggcgcagagctggggccactcttcggagcaggatggactcagggtcccgaggcaagtcagactgttgcagaggctgaaaaccaaacctttgatgacagaattctcagtgaagtctaccatcatttcccgttatgccttcactacggtttcctgcagaatgctgaacagagcttctgaagaccaggacattgagttccagatgcagattccagctgcagctttcatcaccaacttcactatgcttattggagacaaggtgtatcagggcgaaattacagagagagaaaagaagagtggtgatagggtaaaagagaaaaggaataaaaccacagaagaaaatggagagaaggggactgaaatattcagagcttctgcagtgattcccagcaaggacaaagccgcctttttcctgagttatgaggagcttctgcagaggcgcctgggcaagtacgagcacagcatcagcgtgcggccccagcagctgtccgggaggctgagcgtggacgtgaatatcctggagagcgcgggcatcgcatccctggaggtgctgccgcttcacaacagcaggcagaggggcagtgggcgcggggaagatgattctgggcctcccccatctactgtcattaaccaaaatgaaacatttgccaacataatttttaaacctactgtagtacaacaagccaggattgcccagaatggaattttgggagactttatcattagatatgacgtcaatagagaacagagcattggggacatccaggttctaaatggctattttgtgcactactttgctcctaaagaccttcctcctttacccaagaatgtggtattcgtgcttgacagcagtgcttctatggtgggaaccaaactccggcagaccaaggatgccctcttcacaattctccatgacctccgaccccaggaccgtttcagtatcattggattttccaaccggatcaaagtatggaaggaccacttgatatcagtcactccagacagcatcagggatgggaaagtgtacattcaccatatgtcacccactggaggcacagacatcaacggggccctgcagagggccatcaggctcctcaacaagtacgtggcccacagtggcattggagaccggagcgtgtccctcatcgtcttcctgacggatgggaagcccacggtcggggagacgcacaccctcaagatcctcaacaacacccgagaggccgcccgaggccaagtctgcatcttcaccattggcatcggcaacgacgtggacttcaggctgctggagaaactgtcgctggagaactgtggcctcacacggcgcgtgcacgaggaggaggacgcaggctcgcagctcatcgggttctacgatgaaatcaggaccccgctcctctctgacatccgcatcgattatccccccagctcagtggtgcaggccaccaagaccctgttccccaactacttcaacggctcggagatcatcattgcggggaagctggtggacaggaagctggatcacctgcacgtggaggtcaccgccagcaacagtaagaaattcatcatcctgaagacagatgtgcctgtgcggcctcagaaggcagggaaagatgtcacaggaagccccaggcctggaggcgatggagagggggacaccaaccacatcgagcgtctctggagctacctcaccacaaaggagctgctgagctcctggctgcaaagtgacgatgaaccggagaaggagcggctgcggcagcgggcccaggccctggctgtgagctaccgcttcctcactcccttcacctccatgaagctgagggggccggtcccacgcatggatggcctggaggaggcccacggcatgtcggctgccatgggacccgaaccggtggtgcagagcgtgcgaggagctggcacgcagccaggacctttgctcaagaagccataccagccaagaattaaaatctctaaaacatcagtggatggtgatccccactttgttgtggatttccccctgagcagactcaccgtgtgcttcaacattgatgggcagcccggggacatcctcaggctggtctctgatcacagggactctggtgtcacagtgaacggagagttaattggggcacccgcccctccaaatggccacaagaaacagcgcacttacttgcgcactatcaccatcctcatcaacaagccagagagatcttatctcgagatcacaccgagcagagtcatcttggatggtggggacagactggtgctcccctgcaaccagagtgtggtggtggggagctgggggctggaggtgtccgtgtctgccaacgccaatgtcaccgtcaccatccagggctccatagcctttgtcatcctcatccacctctacaaaaagccggcgcccttccagcgacaccacctgggtttctacattgccaacagcgagggcctttccagcaactgccacggactgctgggtcagttcctgaatcaggatgccagactcacagaagaccctgcagggcccagccagaacctcactcaccctctgctccttcaggtgggagaggggcctgaggccgtcctaacagtgaaaggccaccaagtcccagtggtctggaagcaaaggaagatttacaacggggaagagcagatagactgctggtttgccaggaacaatgccgccaaactgattgacggggagtacaaggattacctggcattccatccatttgacacagggatggacacttggccggggaatgtccagggagctctgaagctggcagccttaaagatgcaagtgcatgaaggacagtgatgtggggaggccgtggggcagctcttttcatggcttgtacacgcctcagctcctggcaattagctggactccatgacccacccctggtgcagcatagatccgacgtctgtctgggcgaagggtaggggtgggtaggggcgggaagcctgagtgcaaatgtcatttccctctactgcctcttcctgcctctccccaccctgcccacatccacagaggggagagaagggtcatagctaaatgcaacaaagtctgtatcttgtcccaacctgcttttctgttctgttagcatatcataaagtaagcctttctggtgaaggaaggttgctatgaaactttttttcttggtggaaatggacaagtttaggcactctgctttttgccttacactaatgcttagaaagctgtcttttcagtggtgttgcagcccccagatgtgtggccaacctctgctgcaaaggaatctcttgctgagtccaggccaccaatcaggcaaatagcccatacatttgatcgttgtaaaccatgaagtcttttcttgcaagacgtttttcttctgctgtggtatcttgcccttaaaaattagttttcattaaaaagaaatttgattgaaaatagaaacatctacagctcagatactgatctctttctaatgggctttgtaaaccacttgactttgctaatggctattctccaatttgttccaataagctaagggcttttcatacacaggacaactccatgtggttgattttactggcatgtcttggtgacgaagagttggccaagtgaatgatgcatcttttacttggagctctccagcctttgtcatagttcccagaccttttttccttgtggtcatccaggaggtgatcaattacatgtgcacagtgctaggacgggaggcagagccggctcagagcaggtccaccagcccacctatagcaggaagcgtgtcggtgcttaggaaatctaggacttccagcttccctcatgtcagatagaaaaaaagtcaggaaaccagctcgtggacaggggctttggttccaaaacttggacaaacctgatgccttaaggaaaaggttaagatgagaggggacttccagagtcaatgaacgtcacccttcagcggacggataccgggagcgcttgggcgaaacagcagagaaagaaagactgtggtcggggaagtggaatgcttcgatgcaggccagagttcaaggctctggggctggcctcacaagaggcttcttccacggggcttgacaccagagcagcccccgcgtgaaatgagaaggcatgcttagcactgggaggaaaagctgagttaagaaaattctttatcatgtttgccttccctggggaaacattcaggcagtaaaatgacatccacgtgttcctgtcggacgcagcggcttcgggaacaagttagcgctgggggactatctgggctcgtctctctctgcttcgtgaacccaccacaccagggcctgtctgctgtgctatttatttgccttccgtcttcccaacctcagctgcctgtattcatgccagaggtgcaaaggctgccagccagtgctgctgacagatgctttcagactgtagagctcagagaaagggagcggcagctagaggtagccagggagctggccaggctccccggggccttcctattatgtaaatcccagctggacagacagccctggagccaggtggccctgtcccctgtggagcacttggagcagtgatctgttgttccaggtgtaagtctcgacactgcagaaatgaggacgttattaggaaagaccagttcctactgcctgtgttgctactttaagagctgagaaaaacattccaatgagctatccatagctaacttgcttgctcagaaaaacataagtaacaaagttgagctttcatttttaaaaattatattttactttagaaaaatatcaccttttttcttcctcttctttacgtgtagatcttttttttttttttcaaatggggtcagtacctgaaagcccgaaaccccataccaagcttatagttaggacctttgcatttgataaaaaaaaaatatagtattttctgttgtccagaaaatcttcccagatagggaaactgaggcagagagtgccgtggagtggtttttgccaagtcatacaacatacttaatgcagggctacactgaacctccagaatcattttgtttgctttgaccctgtttcaccatctgggcaatcatttattttccttgagcatttataaaccagggcgagggttgttccaaaatgagtaattgaatgagatgaagaaatatgtcataattagaggagataaatctccttgttatcacaatagttaatgtgtcatgatcactgactaactgggaccttgaacaagtcagcatctctgcctttcaaaatgaaggaacattgttctctatcctcccctgacccccgacggccccatgctaggtgcaccatcttcctccatttgactttttaatgctttacaacttcaggctaaagggaggggatgttgggaggagaaaccatcacaagattccctcggtgccacagctgtgctgaggaggccggggactgggaatcggagtgggcacctctgtgtttctctagggagtaacattcaacatttaattgaatcgtgtgtcctgataggtggattaggaacaggattcattcctttaactttaacttttggctaaacgacatgccttggattgagtgtatatgtcttccccaaattcatatgttgaagcttaaatcctgaatgtgatggttcttggaattgggacctttggaaggttattgggtcttgagggcagagccctcacgaatgggattaaggcccttataagaagagacatggggccaggtgcagtggctcacacctgtaatcccaacattttgggaggccgagaagggtggatcatgaggtcaggagatggagaccatcctggccaacatggtgaaacctcgtctctactaaaaatacaaaaattagctgggcgtggtggtgcgtgcctgtagttccagctacttgggaggctgaggcaggagaatcgcttgaaccaggcagtcggaacttgtagtgagccaagatcacgccactgcactccagctggagtgacagagccaaactccgtcaaaaaaaaacaaaacaaaacaaaaaaaagacatgggagagatggtgtttttcctctccaccacctggggatacgatgagaagatggccacctgcaagccaggaagacggccctcaccagacaccatgtctgctggcaccttgatcttggacctcccagcctccagaactgtgagaaataaatgtgttttgtttaagctactcaagtctgtggtattcttgttaaggcagcccaagctgactaagacaccaaatcattcaaaacgttaattctttttctgttctttaagcttcccagaatgtacacaaacaatgctgttattaaaatttaaaggactcttggaactgtaggacatgatccagctaaaataaataacaaataacacagctaagcaaatacttataaatgtagctttaaatatttattttagttttaaataattagtggggtacgagacagttcacattcaagagacattttacttagacaaaaaatttataagagaacgatgcataaaaacaaacaacatattggtctgtttatttttctaagggaaaatggaattggagctgttgagaataaaacttgaagaatctaactgca

SEQ ID NO: 14564 - DNA, 2917 bp, Homo sapiens
  source 1..2917: mol_type = unassigned DNA
cgccttgtagacgtgttcgctttgcgtttgccttctgcgtgattgtaagtttcccgaggcttccccagccatgcggaactatgattctgggcctcccccatctactgtcattaaccaaaatgaaacatttgccaacataatttttaaacctactgtagtacaacaagccaggattgcccagaatggaattttgggagactttatcattagatatgacgtcaatagagaacagagcattggggacatccaggttctaaatggctattttgtgcactactttgctcctaaagaccttcctcctttacccaagaatgtggtattcgtgcttgacagcagtgcttctatggtgggaaccaaactccggcagaccaaggatgccctcttcacaattctccatgacctccgaccccaggaccgtttcagtatcattggattttccaaccggatcaaagtatggaaggaccacttgatatcagtcactccagacagcatcagggatgggaaagtgtacattcaccatatgtcacccactggaggcacagacatcaacggggccctgcagagggccatcaggctcctcaacaagtacgtggcccacagtggcattggagaccggagcgtgtccctcatcgtcttcctgacggatgggaagcccacggtcggggagacgcacaccctcaagatcctcaacaacacccgagaggccgcccgaggccaagtctgcatcttcaccattggcatcggcaacgacgtggacttcaggctgctggagaaactgtcgctggagaactgtggcctcacacggcgcgtgcacgaggaggaggacgcaggctcgcagctcatcgggttctacgatgaaatcaggaccccgctcctctctgacatccgcatcgattatccccccagctcagtggtgcaggccaccaagaccctgttccccaactacttcaacggctcggagatcatcattgcggggaagctggtggacaggaagctggatcacctgcacgtggaggtcaccgccagcaacagtaagaaattcatcatcctgaagacagatgtgcctgtgcggcctcagaaggcagggaaagatgtcacaggaagccccaggcctggaggcgatggagagggggacaccaaccacatcgagcgtctctggagctacctcaccacaaaggagctgctgagctcctggctgcaaagtgacgatgaaccggagaaggagcggctgcggcagcgggcccaggccctggctgtgagctaccgcttcctcactcccttcacctccatgaagctgagggggccggtcccacgcatggatggcctggaggaggcccacggcatgtcggctgccatgggacccgaaccggtggtgcagagcgtgcgaggagctggcacgcagccaggacctttgctcaagaagccataccagccaagaattaaaatctctaaaacatcagtggatggtgatccccactttgttgtggatttccccctgagcagactcaccgtgtgcttcaacattgatgggcagcccggggacatcctcaggctggtctctgatcacagggactctggtgtcacagtgaacggagagttaattggggcacccgcccctccaaatggccacaagaaacagcgcacttacttgcgcactatcaccatcctcatcaacaagccagagagatcttatctcgagatcacaccgagcagagtcatcttggatggtggggacagactggtgctcccctgcaaccagagtgtggtggtggggagctgggggctggaggtgtccgtgtctgccaacgccaatgtcaccgtcaccatccagggctccatagcctttgtcatcctcatccacctctacaaaaagccggcgcccttccagcgacaccacctgggtttctacattgccaacagcgagggcctttccagcaactgccacggactgctgggtcagttcctgaatcaggatgccagactcacagaagaccctgcagggcccagccagaacctcactcaccctctgctccttcaggtgggagaggggcctgaggccgtcctaacagtgaaaggccaccaagtcccagtggtctggaagcaaaggaagatttacaacggggaagagcagatagactgctggtttgccaggaacaatgccgccaaactgattgacggggagtacaaggattacctggcattccatccatttgacacagggatggacacttggccggggaatgtccagggagctctgaagctggcagccttaaagatgcaagtgcatgaaggacagtgatgtggggaggccgtggggcagctcttttcatggcttgtacacgcctcagctcctggcaattagctggactccatgacccacccctggtgcagcatagatccgacgtctgtctgggcgaagggtaggggtgggtaggggcgggaagcctgagtgcaaatgtcatttccctctactgcctcttcctgcctctccccaccctgcccacatccacagaggggagagaagggtcatagctaaatgcaacaaagtctgtatcttgtcccaacctgcttttctgttctgttagcatatcataaagtaagcctttctggtgaaggaaggttgctatgaaactttttttcttggtggaaatggacaagtttaggcactctgctttttgccttacactaatgcttagaaagctgtcttttcagtggtgttgcagcccccagatgtgtggccaacctctgctgcaaaggaatctcttgctgagtccaggccaccaatcaggcaaatagcccatacatttgatcgttgtaaaccatgaagtcttttcttgcaagacgtttttcttctgctgtggtatcttgcccttaaaaattagttttcattaaaaagaaatttgattgaaaatagaaa

SEQ ID NO: 14565 - DNA, 3132 bp, Homo sapiens
  source 1..3132: mol_type = unassigned DNA
gaccgcggggtgggcggccccgagagcgtcccgcagtggctggagccctgggcgctgcaaagcgtgtcccgccgggtccccgagcgtcccgcgccctcgccccgccatgctcctgctgctggggctgtgcctggggctgtccctgtgtgtggggtcgcaggaagaggcgcagagctggggccactcttcggagcaggatggactcagggtcccgaggcaagtcagactgttgcagaggctgaaaaccaaacctttgatgacagaattctcagtgaagtctaccatcatttcccgttatgccttcactacggtttcctgcagaatgctgaacagagcttctgaagaccaggacattgagttccagatgcagattccagctgcagctttcatcaccaacttcactatgcttattggagacaaggtgtatcagggcgaaattacagagagagaaaagaagagtggtgatagggtaaaagagaaaaggaataaaaccacagaagaaaatggagagaaggggactgaaatattcagagcttctgcagtgattcccagcaaggacaaagccgcctttttcctgagttatgaggagcttctgcagaggcgcctgggcaagtacgagcacagcatcagcgtgcggccccagcagctgtccgggaggctgagcgtggacgtgaatatcctggagagcgcgggcatcgcatccctggaggtgctgccgcttcacaacagcaggcagaggggcagtgggcgcggggaagatgattctgggcctcccccatctactgtcattaaccaaaatgaaacatttgccaacataatttttaaacctactgtagtacaacaagccaggattgcccagaatggaattttgggagactttatcattagatatgacgtcaatagagaacagagcattggggacatccaggttctaaatggctattttgtgcactactttgctcctaaagaccttcctcctttacccaagaatgtggtattcgtgcttgacagcagtgcttctatggtgggaaccaaactccggcagaccaaggatgccctcttcacaattctccatgacctccgaccccaggaccgtttcagtatcattggattttccaaccggatcaaagtatggaaggaccacttgatatcagtcactccagacagcatcagggatgggaaagtgtacattcaccatatgtcacccactggaggcacagacatcaacggggccctgcagagggccatcaggctcctcaacaagtacgtggcccacagtggcattggagaccggagcgtgtccctcatcgtcttcctgacggatgggaagcccacggtcggggagacgcacaccctcaagatcctcaacaacacccgagaggccgcccgaggccaagtctgcatcttcaccattggcatcggcaacgacgtggacttcaggctgctggagaaactgtcgctggagaactgtggcctcacacggcgcgtgcacgaggaggaggacgcaggctcgcagctcatcgggttctacgatgaaatcaggaccccgctcctctctgacatccgcatcgattatccccccagctcagtggtgcaggccaccaagaccctgttccccaactacttcaacggctcggagatcatcattgcggggaagctggtggacaggaagctggatcacctgcacgtggaggtcaccgccagcaacagtaagaaattcatcatcctgaagacagatgtgcctgtgcggcctcagaaggcagggaaagatgtcacaggaagccccaggcctggaggcgatggagagggggacaccaaccacatcgagcgtctctggagctacctcaccacaaaggagctgctgagctcctggctgcaaagtgacgatgaaccggagaaggagcggctgcggcagcgggcccaggccctggctgtgagctaccgcttcctcactcccttcacctccatgaagctgagggggccggtcccacgcatggatggcctggaggaggcccacggcatgtcggctgccatgggacccgaaccggtggtgcagagcgtgcgaggagctggcacgcagccaggacctttgctcaagaagccataccagccaagaattaaaatctctaaaacatcagttcgtggcttcagaagggaagaacagattttttcaaatgtcatgaaatttccttttgccagcatcctggaactataataaaaattcagaggaaagaacaacctatgactgggttttgttctgctgtgtccagatcatcctctggaagtcttgattgttgcctttctgctgctgtgctgtacgtgcaagttcctaaagccagggacatcccggagatgagctgtggatatagagtccgcacagcctgcgggagacagaatgtaattccttccaacacacacacacaggctttatggaatgccagaaaagcttcctcttggatgctgcctggagtaatgactttttgaccctcccctcttttttggagcaagcactatctttccttgtaaagaaatttggacaatttgagtagaaatggtgtggtatgtgcacatagaaactctcagaaaactgtcagatgagctagacagttgtcctctatctccatgggtcccgcatcccaaggatcgaaccaacaacagatcaaaaatacgtgaaaaaggaattgcatctgtattgaatgtgtacggactttttttcttgtctttgttccttaaacaatgtagtgtaacaactatttacatcgcatctcctttgcattcattattataagtaaactagagatgatttaaagtgtatagaaaggctgcgtgcagtggctaatgtctgtaatcccagcactttgagaggccgaggcaggtggatcacctgaggtcaggagttcgagaccagcctggccaacgtggtgaaaccccatctctactaaaaatacaataattagctgggcatggtggtgcacgcctgtaatcccagctattcgggaggctgaggcaggagaatcgcttgaacccaggaggcagagattgcagtgaaccgagattgcaccattgcactccagcctgggtgacagagtgaacctccgtctcaaaaacaaaataaataaataagaataaatt

SEQ ID NO: 14566 - DNA, 2194 bp, Homo sapiens
  source 1..2194: mol_type = unassigned DNA
gaccgcggggtgggcggccccgagagcgtcccgcagtggctggagccctgggcgctgcaaagcgtgtcccgccgggtccccgagcgtcccgcgccctcgccccgccatgctcctgctgctggggctgtgcctggggctgtccctgtgtgtggggtcgcaggaagaggcgcagagctggggccactcttcggagcaggatggactcagggtcccgaggcaagtcagactgttgcagaggctgaaaaccaaacctttgatgacagaattctcagtgaagtctaccatcatttcccgttatgccttcactacggtttcctgcagaatgctgaacagagcttctgaagaccaggacattgagttccagatgcagattccagctgcagctttcatcaccaacttcactatgcttattggagacaaggtgtatcagggcgaaattacagagagagaaaagaagagtggtgatagggtaaaagagaaaaggaataaaaccacagaagaaaatggagagaaggggactgaaatattcagagcttctgcagtgattcccagcaaggacaaagccgcctttttcctgagttatgaggagcttctgcagaggcgcctgggcaagtacgagcacagcatcagcgtgcggccccagcagctgtccgggaggctgagcgtggacgtgaatatcctggagagcgcgggcatcgcatccctggaggtgctgccgcttcacaacagcaggcagaggggcagtgggcgcggggaagatgattctgggcctcccccatctactgtcattaaccaaaatgaaacatttgccaacataatttttaaacctactgtagtacaacaagccaggattgcccagaatggaattttgggagactttatcattagatatgacgtcaatagagaacagagcattggggacatccaggttctaaatggctattttgtgcactactttgctcctaaagaccttcctcctttacccaagaatgtggtattcgtgcttgacagcagtgcttctatggtgggaaccaaactccggcagaccaaggatgccctcttcacaattctccatgacctccgaccccaggaccgtttcagtatcattggattttccaaccggatcaaagtatggaaggaccacttgatatcagtcactccagacagcatcagggatgggaaagtgtacattcaccatatgtcacccactggaggcacagacatcaacggggccctgcagagggccatcaggctcctcaacaagtacgtggcccacagtggcattggagaccggagcgtgtccctcatcgtcttcctgacggatgggaagcccacggtcggggagacgcacaccctcaagatcctcaacaacacccgagaggccgcccgaggccaagtctgcatcttcaccattggcatcggcaacgacgtggacttcaggctgctggagaaactgtcgctggagaactgtggcctcacacggcgcgtgcacgaggaggaggacgcaggctcgcagctcatcgggttctacgatgaaatcaggaccccgctcctctctgacatccgcatcgattatccccccagctcagtggtgcaggccaccaagaccctgttccccaactacttcaacggctcggagatcatcattgcggggaagctggtggacaggaagctggatcacctgcacgtggaggtcaccgccagcaacagtaagaaattcatcatcctgaagacagatgtgcctgtgcggcctcagaaggcagggaaagatgtcacaggaagccccaggcctggaggcgatggagagggggacaccaaccacatcgagcgtctctggagctacctcaccacaaaggagctgctgagctcctggctgcaaagtgacgatgaaccggagaaggagcggctgcggcagcgggcccaggccctggctgtgagctaccgcttcctcactcccttcacctccatgaagctgagggggccggtcccacgcatggatggcctggaggaggcccacggcatgtcggctgccatgggacccgaaccggtggtgcagagcgtgcgaggagctggcacgcagccaggacctttgctcaagaagccaccaaactccgtcaaaaaaaaacaaaacaaaacaaaaaaaagacatgggagagatggtgtttttcctctccaccacctggggatacgatga

SEQ ID NO: 14567 - DNA, 2932 bp, Homo sapiens
  source 1..2932: mol_type = unassigned DNA
gaccgcggggtgggcggccccgagagcgtcccgcagtggctggagccctgggcgctgcaaagcgtgtcccgccgggtccccgagcgtcccgcgccctcgccccgccatgctcctgctgctggggctgtgcctggggctgtccctgtgtgtggggtcgcaggaagaggcgcagagctggggccactcttcggagcaggatggactcagggtcccgaggcaagtcagactgttgcagaggctgaaaaccaaacctttgatgacagaattctcagtgaagtctaccatcatttcccgttatgccttcactacggtttcctgcagaatgctgaacagagcttctgaagaccaggacattgagttccagatgcagattccagctgcagctttcatcaccaacttcactatgcttattggagacaaggtgtatcagggcgaaattacagagagagaaaagaagagtggtgatagggtaaaagagaaaaggaataaaaccacagaagaaaatggagagaaggggactgaaatattcagagcttctgcagtgattcccagcaaggacaaagccgcctttttcctgagttatgaggagcttctgcagaggcgcctgggcaagtacgagcacagcatcagcgtgcggccccagcagctgtccgggaggctgagcgtggacgtgaatatcctggagagcgcgggcatcgcatccctggaggtgctgccgcttcacaacagcaggcagaggggcagtgggcgcggggaagatgattctgggcctcccccatctactgtcattaaccaaaatgaaacatttgccaacataatttttaaacctactgtagtacaacaagccaggattgcccagaatggaattttgggagactttatcattagatatgacgtcaatagagaacagagcattggggacatccaggttctaaatggctattttgtgcactactttgctcctaaagaccttcctcctttacccaagaatgtggtattcgtgcttgacagcagtgcttctatggtgggaaccaaactccggcagaccaaggatgccctcttcacaattctccatgacctccgaccccaggaccgtttcagtatcattggattttccaaccggatcaaagtatggaaggaccacttgatatcagtcactccagacagcatcagggatgggaaagtgtacattcaccatatgtcacccactggaggcacagacatcaacggggccctgcagagggccatcaggctcctcaacaagtacgtggcccacagtggcattggagaccggagcgtgtccctcatcgtcttcctgacggatgggaagcccacggtcggggagacgcacaccctcaagatcctcaacaacacccgagaggccgcccgaggccaagtctgcatcttcaccattggcatcggcaacgacgtggacttcaggctgctggagaaactgtcgctggagaactgtggcctcacacggcgcgtgcacgaggaggaggacgcaggctcgcagctcatcgggttctacgatgaaatcaggaccccgctcctctctgacatccgcatcgattatccccccagctcagtggtgcaggccaccaagaccctgttccccaactacttcaacggctcggagatcatcattgcggggaagctggtggacaggaagctggatcacctgcacgtggaggtcaccgccagcaacagtaagaaattcatcatcctgaagacagatgtgcctgtgcggcctcagaaggcagggaaagatgtcacaggaagccccaggcctggaggcgatggagagggggacaccaaccacatcgagcgtctctggagctacctcaccacaaaggagctgctgagctcctggctgcaaagtgacgatgaaccggagaaggagcggctgcggcagcgggcccaggccctggctgtgagctaccgcttcctcactcccttcacctccatgaagctgagggggccggtcccacgcatggatggcctggaggaggcccacggcatgtcggctgccatgggacccgaaccggtggtgcagagcgtgcgaggagctggcacgcagccaggacctttgctcaagaagccataccagccaagaattaaaatctctaaaacatcagtggatggtgatccccactttgttgtggatttccccctgagcagactcaccgtgtgcttcaacattgatgggcagcccggggacatcctcaggctggtctctgatcacagggactctggtgtcacagtgaacggagagttaattggggcacccgcccctccaaatggccacaagaaacagcgcacttacttgcgcactatcaccatcctcatcaacaagccagagagatcttatctcgagatcacaccgagcagagtcatcttggatggtggggacagactggtgctcccctgcaaccagagtgtggtggtggggagctgggggctggaggtgtccgtgtctgccaacgccaatgtcaccgtcaccatccagggctccatagcctttgtcatcctcatccacctctacaaaaagccggcgcccttccagcgacaccacctgggtttctacattgccaacagcgagggcctttccagcaactgccacggactgctgggtcagttcctgaatcaggatgccagactcacagaagaccctgcagggcccagccagaacctcactcaccctctgctccttcaggtgggagaggggcctgaggccgtcctaacagtgaaaggccaccaagtcccagtggtctggaagcaaaggaagatttacaacggggaagagcagatagactgctggtttgccaggaacaatgccgccaaactgattgacggggagtacaaggattacctggcattccatccatttgacacagggatgcttggccggggaatgtccagggagctctga

SEQ ID NO: 14568 - DNA, 3246 bp, Homo sapiens
  source 1..3246: mol_type = unassigned DNA
caagcttagcctggccgggaaacgggaggcgtggaggccgggagcagcccccggggtcatcgccctgccaccgccgcccgattgctttagcttggaaattccggagctgaagcggccagcgagggaggatgaccctctcggcccgggcaccctgtcagtccggaaataactgcagcatttgttccggaggggaaggcgcgaggtttccgggaaagcagcaccgccccttggcccccaggtggctagcgctataaaggatcacgcgccccagtcgacgctgagctcctctgctactcagagttgcaacctcagcctcgctatggctcccagcagcccccggcccgcgctgcccgcactcctggtcctgctcggggctctgttcccaggacctggcaatgcccagacatctgtgtccccctcaaaagtcatcctgccccggggaggctccgtgctggtgacatgcagcacctcctgtgaccagcccaagttgttgggcatagagaccccgttgcctaaaaaggagttgctcctgcctgggaacaaccggaaggtgtatgaactgagcaatgtgcaagaagatagccaaccaatgtgctattcaaactgccctgatgggcagtcaacagctaaaaccttcctcaccgtgtactggactccagaacgggtggaactggcacccctcccctcttggcagccagtgggcaagaaccttaccctacgctgccaggtggagggtggggcaccccgggccaacctcaccgtggtgctgctccgtggggagaaggagctgaaacgggagccagctgtgggggagcccgctgaggtcacgaccacggtgctggtgaggagagatcaccatggagccaatttctcgtgccgcactgaactggacctgcggccccaagggctggagctgtttgagaacacctcggccccctaccagctccagacctttgtcctgccagcgactcccccacaacttgtcagcccccgggtcctagaggtggacacgcaggggaccgtggtctgttccctggacgggctgttcccagtctcggaggcccaggtccacctggcactgggggaccagaggttgaaccccacagtcacctatggcaacgactccttctcggccaaggcctcagtcagtgtgaccgcagaggacgagggcacccagcggctgacgtgtgcagtaatactggggaaccagagccaggagacactgcagacagtgaccatctacagctttccggcgcccaacgtgattctgacgaagccagaggtctcagaagggaccgaggtgacagtgaagtgtgaggcccaccctagagccaaggtgacgctgaatggggttccagcccagccactgggcccgagggcccagctcctgctgaaggccaccccagaggacaacgggcgcagcttctcctgctctgcaaccctggaggtggccggccagcttatacacaagaaccagacccgggagcttcgtgtcctgtatggcccccgactggacgagagggattgtccgggaaactggacgtggccagaaaattcccagcagactccaatgtgccaggcttgggggaacccattgcccgagctcaagtgtctaaaggatggcactttcccactgcccatcggggaatcagtgactgtcactcgagatcttgagggcacctacctctgtcgggccaggagcactcaaggggaggtcacccgcaaggtgaccgtgaatgtgctctccccccggtatgagattgtcatcatcactgtggtagcagccgcagtcataatgggcactgcaggcctcagcacgtacctctataaccgccagcggaagatcaagaaatacagactacaacaggcccaaaaagggacccccatgaaaccgaacacacaagccacgcctccctgaacctatcccgggacagggcctcttcctcggccttcccatattggtggcagtggtgccacactgaacagagtggaagacatatgccatgcagctacacctaccggccctgggacgccggaggacagggcattgtcctcagtcagatacaacagcatttggggccatggtacctgcacacctaaaacactaggccacgcatctgatctgtagtcacatgactaagccaagaggaaggagcaagactcaagacatgattgatggatgttaaagtctagcctgatgagaggggaagtggtgggggagacatagccccaccatgaggacatacaactgggaaatactgaaacttgctgcctattgggtatgctgaggccccacagacttacagaagaagtggccctccatagacatgtgtagcatcaaaacacaaaggcccacacttcctgacggatgccagcttgggcactgctgtctactgaccccaacccttgatgatatgtatttattcatttgttattttaccagctatttattgagtgtcttttatgtaggctaaatgaacataggtctctggcctcacggagctcccagtcctaatcacattcaaggtcaccaggtacagttgtacaggttgtacactgcaggagagtgcctggcaaaaagatcaaatggggctgggacttctcattggccaacctgcctttccccagaaggagtgatttttctatcggcacaaaagcactatatggactggtaatggttacaggttcagagattacccagtgaggccttattcctcccttccccccaaaactgacacctttgttagccacctccccacccacatacatttctgccagtgttcacaatgacactcagcggtcatgtctggacatgagtgcccagggaatatgcccaagctatgccttgtcctcttgtcctgtttgcatttcactgggagcttgcactatgcagctccagtttcctgcagtgatcagggtcctgcaagcagtggggaagggggccaaggtattggaggactccctcccagctttggaagcctcatccgcgtgtgtgtgtgtgtgtatgtgtagacaagctctcgctctgtcacccaggctggagtgcagtggtgcaatcatggttcactgcagtcttgaccttttgggctcaagtgatcctcccacctcagcctcctgagtagctgggaccataggctcacaacaccacacctggcaaatttgattttttttttttttccagagacggggtctcgcaacattgcccagacttcctttgtgttagttaataaagctttctcaactgcc

SEQ ID NO: 14569 - DNA, 1296 bp, Homo sapiens
  source 1..1296: mol_type = unassigned DNA
aaaggatcacgcgccccagtcgacgctgagctcctctgctactcagagttgcaacctcagcctcgctatggctcccagcagcccccggcccgcgctgcccgcactcctggtcctgctcggggctctgttcccagtctcggaggcccaggtccacctggcactgggggaccagaggttgaaccccacagtcacctatggcaacgactccttctcggccaaggcctcagtcagtgtgaccgcagaggacgagggcacccagcggctgacgtgtgcagtaatactggggaaccagagccaggagacactgcagacagtgaccatctacagctttccggcgcccaacgtgattctgacgaagccagaggtctcagaagggaccgaggtgacagtgaagtgtgaggcccaccctagagccaaggtgacgctgaatggggttccagcccagccactgggcccgagggcccagctcctgctgaaggccaccccagaggacaacgggcgcagcttctcctgctctgcaaccctggaggtggccggccagcttatacacaagaaccagacccgggagcttcgtgtcctgtatggcccccgactggacgagagggattgtccgggaaactggacgtggccagaaaattcccagcagactccaatgtgccaggcttgggggaacccattgcccgagctcaagtgtctaaaggatggcactttcccactgcccatcggggaatcagtgactgtcactcgagatcttgagggcacctacctctgtcgggccaggagcactcaaggggaggtcacccgcaaggtgaccgtgaatgtgctctccccccggtatgagattgtcatcatcactgtggtagcagccgcagtcataatgggcactgcaggcctcagcacgtacctctataaccgccagcggaagatcaagaaatacagactacaacaggcccaaaaagggacccccatgaaaccgaacacacaagccacgcctccctgaacctatcccgggacagggcctcttcctcggccttcccatattggtggcagtggtgccacactgaacagagtggaagacatatgccatgcagctacacctaccggccctgggacgccggaggacagggcattgtcctcagtcagatacaacagcatttggggccatggtacctgcacacctaaaacactaggccacgcatctgatctgtagtcacatgactaagccaagaggaaggagcaagactcaagacatgattgatggatgttaaagtctagcctgatgagaggggaagtggt

SEQ ID NO: 14570 - DNA, 1334 bp, Homo sapiens
  source 1..1334: mol_type = unassigned DNA
ggagaagactgaataagccgtgaactgggcagctgtgacacgcgcaccttgtcaccttgtcaccaatttcctgcccgggatcccagagctacccttcttggagcccacaggggtaaggttgagcttctcactttccctccaatgaagcgtggcagcatgggaaggattttggcagtgtcgaggtctgagttttagtccgttcccctctctgggtctcagtttctcgctggaataaagtgaaacacctcaggctccaaccctcccaacccaaggctccctcctggagggagagagaggatggaggacatcaggcagcccttggctggtccctgcgagcccgtggagactgccagagatgtcctctttcggttacaggaccctgactgtggccctcttcaccctgatctgctgtccaggatcggatgagaaggtattcgaggtacacgtgaggccaaagaagctggcggttgagcccaaagggtccctcgaggtcaactgcagcaccacctgtaaccagcctgaagtgggtggtctggagacctctctagataagattctgctggacgaacaggctcagtggaaacattacttggtctcaaacatctcccatgacacggtcctccaatgccacttcacctgctccgggaagcaggagtcaatgaattccaacgtcagcgtgtaccagcctccaaggcaggtcatcctgacactgcaacccactttggtggctgtgggcaagtccttcaccattgagtgcagggtgcccaccgtggagcccctggacagcctcaccctcttcctgttccgtggcaatgagactctgcactatgagaccttcgggaaggcagcccctgctccgcaggaggccacagccacattcaacagcacggctgacagagaggatggccaccgcaacttctcctgcctggctgtgctggacttgatgtctcgcggtggcaacatctttcacaaacactcagccccgaagatgttggagatctatgagcctgtgtcggacagccagatggtcatcatagtcacggtggtgtcggtgttgctgtccctgttcgtgacatctgtcctgctctgcttcatcttcggccagcacttgcgccagcagcggatgggcacctacggggtgcgagcggcttggaggaggctgccccaggccttccggccatagcaaccatgagtggcatggccaccaccacggtggtcactggaactcagtgtgactcctcagggttgaggtccagccctggctgaaggactgtgacaggcagcagagacttgggacattgccttttctagcccgaatacaaacacctggactt

SEQ ID NO: 14571 - DNA, 1252 bp, Homo sapiens
  source 1..1252: mol_type = unassigned DNA
ggagaagactgaataagccgtgaactgggcagctgtgacacgcgcaccttgtcaccttgtcaccaatttcctgcccgggatcccagagctacccttcttggagcccacaggggtaaggttgagcttctcactttccctccaatgaagcgtggcagcatgggaaggattttggcagtgtcgaggtctgagttttagtccgttcccctctctgggtctcagtttctcgctggcagcccttggctggtccctgcgagcccgtggagactgccagagatgtcctctttcggttacaggaccctgactgtggccctcttcaccctgatctgctgtccaggatcggatgagaaggtattcgaggtacacgtgaggccaaagaagctggcggttgagcccaaagggtccctcgaggtcaactgcagcaccacctgtaaccagcctgaagtgggtggtctggagacctctctagataagattctgctggacgaacaggctcagtggaaacattacttggtctcaaacatctcccatgacacggtcctccaatgccacttcacctgctccgggaagcaggagtcaatgaattccaacgtcagcgtgtaccagcctccaaggcaggtcatcctgacactgcaacccactttggtggctgtgggcaagtccttcaccattgagtgcagggtgcccaccgtggagcccctggacagcctcaccctcttcctgttccgtggcaatgagactctgcactatgagaccttcgggaaggcagcccctgctccgcaggaggccacagccacattcaacagcacggctgacagagaggatggccaccgcaacttctcctgcctggctgtgctggacttgatgtctcgcggtggcaacatctttcacaaacactcagccccgaagatgttggagatctatgagcctgtgtcggacagccagatggtcatcatagtcacggtggtgtcggtgttgctgtccctgttcgtgacatctgtcctgctctgcttcatcttcggccagcacttgcgccagcagcggatgggcacctacggggtgcgagcggcttggaggaggctgccccaggccttccggccatagcaaccatgagtggcatggccaccaccacggtggtcactggaactcagtgtgactcctcagggttgaggtccagccctggctgaaggactgtgacaggcagcagagacttgggacattgccttttctagcccgaatacaaacacctggactt

SEQ ID NO: 14572 - DNA, 1211 bp, Homo sapiens
  source 1..1211: mol_type = unassigned DNA
gccctgcttatcagcagcttcccagcttcctctgcctggattcttagaggcctggggtcctagaacgagctggtgcacgtggcttcccaaagatctctcagataatgagaggaaatgcagtcatcagtttgcagaaggctagggattctgggccatagctcagacctgcgcccaccatctccctccaggcagcccttggctggtccctgcgagcccgtggagactgccagagatgtcctctttcggttacaggaccctgactgtggccctcttcaccctgatctgctgtccaggatcggatgagaaggtattcgaggtacacgtgaggccaaagaagctggcggttgagcccaaagggtccctcgaggtcaactgcagcaccacctgtaaccagcctgaagtgggtggtctggagacctctctagataagattctgctggacgaacaggctcagtggaaacattacttggtctcaaacatctcccatgacacggtcctccaatgccacttcacctgctccgggaagcaggagtcaatgaattccaacgtcagcgtgtaccagcctccaaggcaggtcatcctgacactgcaacccactttggtggctgtgggcaagtccttcaccattgagtgcagggtgcccaccgtggagcccctggacagcctcaccctcttcctgttccgtggcaatgagactctgcactatgagaccttcgggaaggcagcccctgctccgcaggaggccacagccacattcaacagcacggctgacagagaggatggccaccgcaacttctcctgcctggctgtgctggacttgatgtctcgcggtggcaacatctttcacaaacactcagccccgaagatgttggagatctatgagcctgtgtcggacagccagatggtcatcatagtcacggtggtgtcggtgttgctgtccctgttcgtgacatctgtcctgctctgcttcatcttcggccagcacttgcgccagcagcggatgggcacctacggggtgcgagcggcttggaggaggctgccccaggccttccggccatagcaaccatgagtggcatggccaccaccacggtggtcactggaactcagtgtgactcctcagggttgaggtccagccctggctgaaggactgtgacaggcagcagagacttgggacattgccttttctagcccgaatacaaacacctggactt

SEQ ID NO: 14573 - DNA, 1154 bp, Homo sapiens
  source 1..1154: mol_type = unassigned DNA
ggcagctgtgacacgcgcaccttgtcaccttgtcaccaatttcctgcccgggatcccagagctacccttcttggagcccacaggggaataaagtgaaacacctcaggctccaaccctcccaacccaaggctccctcctggagggagagagaggatggaggacatcaggcagcccttggctggtccctgcgagcccgtggagactgccagagatgtcctctttcggttacaggaccctgactgtggccctcttcaccctgatctgctgtccaggatcggatgagaaggtattcgaggtacacgtgaggccaaagaagctggcggttgagcccaaagggtccctcgaggtcaactgcagcaccacctgtaaccagcctgaagtgggtggtctggagacctctctagataagattctgctggacgaacaggctcagtggaaacattacttggtctcaaacatctcccatgacacggtcctccaatgccacttcacctgctccgggaagcaggagtcaatgaattccaacgtcagcgtgtaccagcctccaaggcaggtcatcctgacactgcaacccactttggtggctgtgggcaagtccttcaccattgagtgcagggtgcccaccgtggagcccctggacagcctcaccctcttcctgttccgtggcaatgagactctgcactatgagaccttcgggaaggcagcccctgctccgcaggaggccacagccacattcaacagcacggctgacagagaggatggccaccgcaacttctcctgcctggctgtgctggacttgatgtctcgcggtggcaacatctttcacaaacactcagccccgaagatgttggagatctatgagcctgtgtcggacagccagatggtcatcatagtcacggtggtgtcggtgttgctgtccctgttcgtgacatctgtcctgctctgcttcatcttcggccagcacttgcgccagcagcggatgggcacctacggggtgcgagcggcttggaggaggctgccccaggccttccggccatagcaaccatgagtggcatggccaccaccacggtggtcactggaactcagtgtgactcctcagggttgaggtccagccctggctgaaggactgtgacaggcagcagagacttgggaca

SEQ ID NO: 14574 - DNA, 1103 bp, Homo sapiens
  source 1..1103: mol_type = unassigned DNA
ctgtgacacgcgcaccttgtcaccttgtcaccaatttcctgcccgggatcccagagctacccttcttggagcccacaggggcagcccttggctggtccctgcgagcccgtggagactgccagagatgtcctctttcggttacaggaccctgactgtggccctcttcaccctgatctgctgtccaggatcggatgagaaggtattcgaggtacacgtgaggccaaagaagctggcggttgagcccaaagggtccctcgaggtcaactgcagcaccacctgtaaccagcctgaagtgggtggtctggagacctctctagataagattctgctggacgaacaggctcagtggaaacattacttggtctcaaacatctcccatgacacggtcctccaatgccacttcacctgctccgggaagcaggagtcaatgaattccaacgtcagcgtgtaccagcctccaaggcaggtcatcctgacactgcaacccactttggtggctgtgggcaagtccttcaccattgagtgcagggtgcccaccgtggagcccctggacagcctcaccctcttcctgttccgtggcaatgagactctgcactatgagaccttcgggaaggcagcccctgctccgcaggaggccacagccacattcaacagcacggctgacagagaggatggccaccgcaacttctcctgcctggctgtgctggacttgatgtctcgcggtggcaacatctttcacaaacactcagccccgaagatgttggagatctatgagcctgtgtcggacagccagatggtcatcatagtcacggtggtgtcggtgttgctgtccctgttcgtgacatctgtcctgctctgcttcatcttcggccagcacttgcgccagcagcggatgggcacctacggggtgcgagcggcttggaggaggctgccccaggccttccggccatagcaaccatgagtggcatggccaccaccacggtggtcactggaactcagtgtgactcctcagggttgaggtccagccctggctgaaggactgtgacaggcagcagagacttgggacattgccttttctagcccgaatacaaacacctggactt

SEQ ID NO: 14575 - DNA, 1778 bp, Homo sapiens
  source 1..1778: mol_type = unassigned DNA
ccttttcccctgcctgcccttcgggcacctcaggaaggcaccttcctctgtcagaatggccaccatggtaccatccgtgttgtggcccagggcctgctggactctgctggtctgctgtctgctgaccccaggtgtccaggggcaggagttccttttgcgggtggagccccagaaccctgtgctctctgctggagggtccctgtttgtgaactgcagtactgattgtcccagctctgagaaaatcgccttggagacgtccctatcaaaggagctggtggccagtggcatgggctgggcagccttcaatctcagcaacgtgactggcaacagtcggatcctctgctcagtgtactgcaatggctctcagataacaggctcctctaacatcaccgtgtacaggctcccggagcgtgtggagctggcacccctgcctccttggcagccggtgggccagaacttcaccctgcgctgccaagtggaggatgggtcgccccggaccagcctcacggtggtgctgcttcgctgggaggaggagctgagccggcagcccgcagtggaggagccagcggaggtcactgccactgtgctggccagcagagacgaccacggagcccctttctcatgccgcacagaactggacatgcagccccaggggctgggactgttcgtgaacacctcagccccccgccagctccgaacctttgtcctgcccgtgacccccccgcgcctcgtggccccccggttcttggaggtggaaacgtcgtggccggtggactgcaccctagacgggctttttccagcctcagaggcccaggtctacctggcgctgggggaccagatgctgaatgcgacagtcatgaaccacggggacacgctaacggccacagccacagccacggcgcgcgcggatcaggagggtgcccgggagatcgtctgcaacgtgaccctagggggcgagagacgggaggcccgggagaacttgacggtctttagcttcctaggacccattgtgaacctcagcgagcccaccgcccatgaggggtccacagtgaccgtgagttgcatggctggggctcgagtccaggtcacgctggacggagttccggccgcggccccggggcagccagctcaacttcagctaaatgctaccgagagtgacgacggacgcagcttcttctgcagtgccactctcgaggtggacggcgagttcttgcacaggaacagtagcgtccagctgcgagtcctgtatggtcccaaaattgaccgagccacatgcccccagcacttgaaatggaaagataaaacgagacacgtcctgcagtgccaagccaggggcaacccgtaccccgagctgcggtgtttgaaggaaggctccagccgggaggtgccggtggggatcccgttcttcgtcaacgtaacacataatggtacttatcagtgccaagcgtccagctcacgaggcaaatacaccctggtcgtggtgatggacattgaggctgggagctcccactttgtccccgtcttcgtggcggtgttactgaccctgggcgtggtgactatcgtactggccttaatgtacgtcttcagggagcaccaacggagcggcagttaccatgttagggaggagagcacctatctgcccctcacgtctatgcagccgacagaagcaatgggggaagaaccgtccagagctgagtgacgctgggatccgggatcaaagttggcgggggcttggctgtgccctcagattccgcaccaataaagccttcaaactccct

SEQ ID NO: 14576 - DNA, 1196 bp, Homo sapiens
  source 1..1196: mol_type = unassigned DNA
gctctctggcgcggggccccttagtccgggctttttgccatggggtctctgttccctctgtcgctgctgttttttttggcggccgcctacccgggagttgggagcgcgctgggacgccggactaagcgggcgcaaagccccaagggtagccctctcgcgccctccgggacctcagtgcccttctgggtgcgcatgagcccggagttcgtggctgtgcagccggggaagtcagtgcagctcaattgcagcaacagctgtccccagccgcagaattccagcctccgcaccccgctgcggcaaggcaagacgctcagagggccgggttgggtgtcttaccagctgctcgacgtgagggcctggagctccctcgcgcactgcctcgtgacctgcgcaggaaaaacacgctgggccacctccaggatcaccgcctacagtgttcccggtgggctacttggtggtgaccctgaggcatggaagccgggtcatctattccgaaagcctggagcgcttcaccggcctggatctggccaacgtgaccttgacctacgagtttgctgctggaccccgcgacttctggcagcccgtgatctgccacgcgcgcctcaatctcgacggcctggtggtccgcaacagctcggcacccattacactgatgctcgcttggagccccgcgcccacagctttggcctccggttccatcgctgcccttgtagggatcctcctcactgtgggcgctgcgtacctatgcaagtgcctagctatgaagtcccaggcgtaaagggggatgttctatgccggctgagcgagaaaaagaggaatatgaaacaatctggggaaatggccatacatggtggctgacgcctgtaatcccagcactttgggaggccgaggcaggagaatcgcttgagcccaggagttcgagaccagcctggacaacatagtgagaccccgtctatgcaaaaaatacacaaattagcctggtgtggtggcccgcacctgtggtcccagctacccgggaggctgagttgggaggatcctttgagccctgaaagtcgaggttgcagtgagccttgatcgtgccactgcactccagcctgggggacagagcacgaccctgtctccaaaaataaaataaaaataaaaataaatattggcgggggaaccctctggaatcaataaaggcttccttaaccagc

SEQ ID NO: 14577 - DNA, 1273 bp, Homo sapiens
  source 1..1273: mol_type = unassigned DNA
gctctctggcgcggggccccttagtccgggctttttgccatggggtctctgttccctctgtcgctgctgttttttttggcggccgcctacccgggagttgggagcgcgctgggacgccggactaagcgggcgcaaagccccaagggtagccctctcgcgccctccgggacctcagtgcccttctgggtgcgcatgagcccggagttcgtggctgtgcagccggggaagtcagtgcagctcaattgcagcaacagctgtccccagccgcagaattccagcctccgcaccccgctgcggcaaggcaagacgctcagagggccgggttgggtgtcttaccagctgctcgacgtgagggcctggagctccctcgcgcactgcctcgtgacctgcgcaggaaaaacacgctgggccacctccaggatcaccgcctacaaaccgccccacagcgtgattttggagcctccggtcttaaagggcaggaaatacactttgcgctgccacgtgacgcaggtgttcccggtgggctacttggtggtgaccctgaggcatggaagccgggtcatctattccgaaagcctggagcgcttcaccggcctggatctggccaacgtgaccttgacctacgagtttgctgctggaccccgcgacttctggcagcccgtgatctgccacgcgcgcctcaatctcgacggcctggtggtccgcaacagctcggcacccattacactgatgctcgcttggagccccgcgcccacagctttggcctccggttccatcgctgcccttgtagggatcctcctcactgtgggcgctgcgtacctatgcaagtgcctagctatgaagtcccaggcgtaaagggggatgttctatgccggctgagcgagaaaaagaggaatatgaaacaatctggggaaatggccatacatggtggctgacgcctgtaatcccagcactttgggaggccgaggcaggagaatcgcttgagcccaggagttcgagaccagcctggacaacatagtgagaccccgtctatgcaaaaaatacacaaattagcctggtgtggtggcccgcacctgtggtcccagctacccgggaggctgagttgggaggatcctttgagccctgaaagtcgaggttgcagtgagccttgatcgtgccactgcactccagcctgggggacagagcacgaccctgtctccaaaaataaaataaaaataaaaataaatattggcgggggaaccctctggaatcaataaaggcttccttaaccagc

SEQ ID NO: 14578 - DNA, 1420 bp, Homo sapiens
  source 1..1420: mol_type = unassigned DNA
gctctctggcgcggggccccttagtccgggctttttgccatggggtctctgttccctctgtcgctgctgttttttttggcggccgcctacccgggagttgggagcgcgctgggacgccggactaagcgggcgcaaagccccaagggtagccctctcgcgccctccgggacctcagtgcccttctgggtgcgcatgagcccggagttcgtggctgtgcagccggggaagtcagtgcagctcaattgcagcaacagctgtccccagccgcagaattccagcctccgcaccccgctgcggcaaggcaagacgctcagagggccgggttgggtgtcttaccagctgctcgacgtgagggcctggagctccctcgcgcactgcctcgtgacctgcgcaggaaaaacacgctgggccacctccaggatcaccgcctacaaaccgccccacagcgtgattttggagcctccggtcttaaagggcaggaaatacactttgcgctgccacgtgacgcaggtgttcccggtgggctacttggtggtgaccctgaggcatggaagccgggtcatctattccgaaagcctggagcgcttcaccggcctggatctggccaacgtgaccttgacctacgagtttgctgctggaccccgcgacttctggcagcccgtgatctgccacgcgcgcctcaatctcgacggcctggtggtccgcaacagctcggcacccattacactgatgctcggtgaggcacccctgtaaccctggggactaggaggaagggggcagagagagttatgaccccgagagggcgcacagaccaagcgtgagctccacgcgggtcgacagacctccctgtgttccgttcctaattctcgccttctgctcccagcttggagccccgcgcccacagctttggcctccggttccatcgctgcccttgtagggatcctcctcactgtgggcgctgcgtacctatgcaagtgcctagctatgaagtcccaggcgtaaagggggatgttctatgccggctgagcgagaaaaagaggaatatgaaacaatctggggaaatggccatacatggtggctgacgcctgtaatcccagcactttgggaggccgaggcaggagaatcgcttgagcccaggagttcgagaccagcctggacaacatagtgagaccccgtctatgcaaaaaatacacaaattagcctggtgtggtggcccgcacctgtggtcccagctacccgggaggctgagttgggaggatcctttgagccctgaaagtcgaggttgcagtgagccttgatcgtgccactgcactccagcctgggggacagagcacgaccctgtctccaaaaataaaataaaaataaaaataaatattggcgggggaaccctctggaatcaataaaggcttccttaaccagc

SEQ ID NO: 14579 - DNA, 3001 bp, Homo sapiens
  source 1..3001: mol_type = unassigned DNA
ccgtcctctagcccagctcctcggctcgcgctctcctcgcctcctgtgctttccccgccgcggcgatgccagggccttcgccagggctgcgccgggcgctactcggcctctgggctgctctgggcctggggctcttcggcctctcagcggtctcgcaggagcccttctgggcggacctgcagcctcgcgtggcgttcgtggagcgcgggggctcgctgtggctgaattgcagcaccaactgccctcggccggagcgcggtggcctggagacctcgctgcgccgaaacgggacccagaggggtttgcgttggttggcgcggcagctggtggacattcgcgagccggagactcagcccgtctgcttcttccgctgcgcgcggcgcacactacaggcgcgtgggctcattcgcactttccagcgaccagatcgcgtagagctgatgccgctgcctccctggcagccggtgggcgagaacttcaccctgagctgtagggtccccggcgccgggccccgtgcgagcctcacgctgaccctgctgcggggcgcccaggagctgatccgccgcagcttcgccggtgaaccaccccgagcgcggggcgcggtgctcacagccacggtactggctcggagggaggaccatggagccaatttctcgtgtcgcgccgagctggacctgcggccgcacggactgggactgtttgaaaacagctcggcccccagagagctccgaaccttctccctgtctccggatgccccgcgcctcgctgctccccggctcttggaagttggctcggaaaggcccgtgagctgcactctggacggactgtttccagcctcagaggccagggtctacctcgcactgggggaccagaatctgagtcctgatgtcaccctcgaaggggacgcattcgtggccactgccacagccacagctagcgcagagcaggagggtgccaggcagctggtctgcaacgtcaccctggggggcgaaaaccgggagacccgggagaacgtgaccatctacagcttcccggcaccactcctgaccctgagcgaacccagcgtctccgaggggcagatggtgacagtaacctgcgcagctggggcccaagctctggtcacactggagggagttccagccgcggtcccggggcagcccgcccagcttcagctaaatgccaccgagaacgacgacagacgcagcttcttctgcgacgccaccctcgatgtggacggggagaccctgatcaagaacaggagcgcagagcttcgtgtcctatacgctccccggctagacgattcggactgccccaggagttggacgtggcccgagggcccagagcagacgctgcgctgcgaggcccgcgggaacccagaaccctcagtgcactgtgcgcgctccgacggcggggccgtgctggctctgggcctgctgggtccagtcactcgggcgctctcaggcacttaccgctgcaaggcggccaatgatcaaggcgaggcggtcaaggacgtaacgctaacggtggagtacgcaccagcgctggacagcgtgggctgcccagaacgcattacttggctggagggaacagaagcctcgctgagctgtgtggcgcacggggtaccgccgcctgatgtgatctgcgtgcgctctggagaactcggggccgtcatcgaggggctgttgcgtgtggcccgggagcatgcgggcacttaccgctgcgaagccaccaaccctcggggctctgcggccaaaaatgtggccgtcacggtggaatatggccccaggtttgaggagccgagctgccccagcaattggacatgggtggaaggatctgggcgcctgttttcctgtgaggtcgatgggaagccacagccaagcgtgaagtgcgtgggctccgggggcgccactgagggggtgctgctgccgctggcacccccagaccctagtcccagagctcccagaatccctagagtcctggcacccggtatctacgtctgcaacgccaccaaccgccacggctccgtggccaaaacagtcgtcgtgagcgcggagtcgccaccggagatggatgaatctacctgcccaagtcaccagacgtggctggaaggggctgaggcttccgcgctggcctgcgccgcccggggtcgcccttccccaggagtgcgctgctctcgggaaggcatcccatggcctgagcagcagcgcgtgtcccgagaggacgcgggcacttaccactgtgtggccaccaatgcgcatggcacggactcccggaccgtcactgtgggcgtggaataccggccagtggtggccgaacttgctgcctcgccccctggaggcgtgcgcccaggaggaaacttcacgttgacctgccgcgcggaggcctggcctccagcccagatcagctggcgcgcgcccccgggggccctcaacatcggcctgtcgagcaacaacagcacactgagcgtggcaggcgccatgggaagccacggcggcgagtacgagtgcgcagccaccaacgcgcacgggcgccacgcgcggcgcatcacggtgcgcgtggccggtccgtggctatgggtcgccgtgggcggcgcggcggggggcgcggcgctgctggccgcgggggccggcctggccttctacgtgcagtccaccgcctgcaagaagggcgagtacaacgtgcaggaggccgagagctcaggcgaggccgtgtgtctgaacggagcgggcggcggcgctggcggggcggcaggcgcggagggcggacccgaggcggcggggggcgcggccgagtcgccggcggagggcgaggtcttcgccatacagctgacatcggcgtgagcccgctcccctctccccgcgggccgggggacgccccccagactcacacgggggcttatttattgctttatttatttacttattcatttatttatgtattcaactccaagggcgtcacccccattttctacccatcccctcaataaagtttttataaagga

SEQ ID NO: 14580 - DNA, 6139 bp, Homo sapiens
  source 1..6139: mol_type = unassigned DNA
agaagaggcggcgcgtgcgtagaggggcggtgagagctaagaggggcagcgcgtgtgcagaggggcggtgtgacttaggacggggcgatggcggctgagaggagctgcgcgtgcgcgaacatgtaactggtgggatctgcggcggctcccagatgatggtcgtcctcctgggcgcgacgaccctagtgctcgtcgccgtggcgccatgggtgttgtccgcagccgcaggtggaaaaaatctaaaatctcctcaaaaagtagaggtcgacatcatagatgacaactttatcctgaggtggaacaggagcgatgagtctgtcgggaatgtgactttttcattcgattatcaaaaaactgggatggataattggataaaattgtctgggtgtcagaatattactagtaccaaatgcaacttttcttcactcaagctgaatgtttatgaagaaattaaattgcgtataagagcagaaaaagaaaacacttcttcatggtatgaggttgactcatttacaccatttcgcaaagctcagattggtcctccagaagtacatttagaagctgaagataaggcaatagtgatacacatctctcctggaacaaaagatagtgttatgtgggctttggatggtttaagctttacatatagcttagttatctggaaaaactcttcaggtgtagaagaaaggattgaaaatatttattccagacataaaatttataaactctcaccagagactacttattgtctaaaagttaaagcagcactacttacgtcatggaaaattggtgtctatagtccagtacattgtataaagaccacagttgaaaatgaactacctccaccagaaaatatagaagtcagtgtccaaaatcagaactatgttcttaaatgggattatacatatgcaaacatgacctttcaagttcagtggctccacgcctttttaaaaaggaatcctggaaaccatttgtataaatggaaacaaatacctgactgtgaaaatgtcaaaactacccagtgtgtctttcctcaaaacgttttccaaaaaggaatttaccttctccgcgtacaagcatctgatggaaataacacatctttttggtctgaagagataaagtttgatactgaaatacaagctttcctacttcctccagtctttaacattagatcccttagtgattcattccatatctatatcggtgctccaaaacagtctggaaacacgcctgtgatccaggattatccactgatttatgaaattattttttgggaaaacacttcaaatgctgagagaaaaattatcgagaaaaaaactgatgttacagttcctaatttgaaaccactgactgtatattgtgtgaaagccagagcacacaccatggatgaaaagctgaataaaagcagtgtttttagtgacgctgtatgtgagaaaacaaaaccaggaaatacctctaaaatttggcttatagttggaatttgtattgcattatttgctctcccgtttgtcatttatgctgcgaaagtcttcttgagatgcatcaattatgtcttctttccatcacttaaaccttcttccagtatagatgagtatttctctgaacagccattgaagaatcttctgctttcaacttctgaggaacaaatcgaaaaatgtttcataattgaaaatataagcacaattgctacagtagaagaaactaatcaaactgatgaagatcataaaaaatacagttcccaaactagccaagattcaggaaattattctaatgaagatgaaagcgaaagtaaaacaagtgaagaactacagcaggactttgtatgaccagaaatgaactgtgtcaagtataaggtttttcagcaggagttacactgggagcctgaggtcctcaccttcctctcagtaactacagagaggacgtttccctgtttagggaaagaaaaaacatcttcagatcataggtcctaaaaatacgggcaagctcttaactatttaaaaatgaaattacaggcccgggcacggtggctcacacctgtaatcccagcactttgggaggctgaggcaggcagatcatgaggtcaagagatcgagaccagcctggccaacgtggtgaaaccccatctctactaaaaatacaaaaattagccgggtgtggtggcgcgcgcctgttgtcttagctactcaggaggctgaggcaggagaatcgcttgaaaacaggaggtggaggttgcagtgagccgagatcacgccactgcactccagcctggtgacagcgtgagactctttaaaaaaagaaattaaaagagttgagacaaacgtttcctacattcttttccatgtgtaaaatcatgaaaaagcctgtcaccggacttgcattggatgagatgagtcagaccaaaacagtggccacccgtcttcctcctgtgagcctaagtgcagccgtgctagctgcgcaccgtggctaaggatgacgtctgtgttcctgtccatcactgatgctgctggctactgcatgtgccacacctgtctgttcgccattcctaacattctgtttcattcttcctcgggagatatttcaaacatttggtcttttcttttaacactgagggtaggcccttaggaaatttatttaggaaagtctgaacacgttatcacttggttttctggaaagtagcttaccctagaaaacagctgcaaatgccagaaagatgatccctaaaaatgttgagggacttctgttcattcatcccgagaacattggcttccacatcacagtatctacccttacatggtttaggattaaagccaggcaatcttttactatgcattaagacctctgattcaaaacttattagaacagtagcttctgctggaatttgcaatcactgaagtcatagaaaataggtaactatctaattagagaaataattgttgtattttaagatctgagagtgtgtacaagttttagtatacatgccatgccagaagatagtgtatgcaagaagtcttgggaccagaaaatggcaatgataggagactgacatagaagaagaatgcttccctaggaaaaaggtcgctggctttggtgcaagaggaagaagaatgttccactggaagcctgagcacctaatcagctctcagtgatcaacccactcttgttatgggtggtctctgtcactttgaatgccaggctggcttctcgtctagcagtattcagataccccttctgctcagcctgcttggcgttaaaatacaaatcattgaactgagggggaaaaatgtaactaggaagaaaaacccaatttaagaaattacataatgctttccaaaggcacctacaacttagttttaaattacttgctactggggattacccatggatatccttaataggcaggaagtctgggaattctggtggcctctagggcagtgttctcacagcaccgttccgacagggaccagtgaaagaaaagagacaaagttagaacgtgctggggagcggccatttctaaggccagtctggtttaagtagtcatttctgctgaaaaaacagatgatcctggtggaagaaaaggttgaaggcagctgccctcgggagggctgtgatgctcggcacatcctgcctggcacatacacgtgtctgcaggccacaccgtgcatgtccccagacctgccgcctggcttctggagtgcttcaagcagagcatggtgggtcattgaggagacccaggaatctcatctgagaacccactctctgccggagaaccccatggtgacacattttcatctttctgaccagaggctgtttttttttttttttgagacagtctcattctgttgcccaggctggagtgcagtggcttgatctcggctcactgcaacctcgcctcccgggttcaagcaattctctgccgcagcctccagagtagctgggataacaggtgcccaccaccacaccccactaatttttgtatttgtatttttagtagagatggggtttcaccatgttggtcaggctggtcttggactcctgacctcatgctccacccgcttcggcctcccaaagttctgggattacaggtgtgagccaccgtgcacggccggcctgacctttggaaaagccttgtcactttggacgtttgcgtctttgaagaggcgatgggagcatatcatgactgcctgccaccattgcttttcagactaccacaactcaatcatgctgtccaggacttctggccctgtgttcaccactgggaaaacgtacttcagactggatagcctaaaaaggagcaatgcccttgtaggatgtggagaagggaaaatacggacattaacattaaaagacaccagtgaaattgttaggtctctaggaagttggagcacaaggcttcacgctttaagaccatctgtggttttcagtgaacaagcgctgagcaccagcagcagaaaacaacaacaaaaaaacacctcgtttttaccttgtcttctagacatgaaaaggcagttgcattccactctgcattatgttctacatgttgctttatcagtatatgcttagctgtaagtgacaagtattttttctgaacagaagtttacttagaaataccatgcacttgggggtaccaattaaccgcctgaaaattagcatattgatagttcttagagagaccagatataatctaagaatttatatgaaagatttgtatcattagagccagaaataattttatattaatatataatacagattaacattatatataatatgtacctgtgtcacttctgacatgagcctgtaaacatatattcatatatgtacctgcacatgtacccacctgatgtaggtcttattcctttagtatggacttaaagtacttattcatataccttgtaactaaaaattagaacagctccctagaattgtgaacttttaagagtctgactagaaatttgcaacttataaaaaagttacttttaaaaatataagttagggctaggcacagtggctcatgcctataatctcagcacttttgggaggccaagacaggaggatcacttcaggccaggagttcaagatcaaccaacctgggtaacatggccagaccccatctctatttatatatatatatataaaacttagagtttttatcttcccctaaaagaggccgtgatatttgcagcagcctcaaattgctcttaaggggtttaggtgtgcagaagctttcctttccctacccagtaaccatgtgactactaacgtggtatattgatttattttgtttgctgtctgtctcccctgccccactgctggaacagaggctccaagaaaacagggaccttattattcattactgcatccccagtaatgaaagtacttagaaaataattattgaatgaatgaaatctaaactgtgaacctgagggtgtttgtggcagtgtttgttttactgaattgtagaaggacataaccgtgttttcagtgtttctatggaacaaacttgtacattttatttcacttgtgttttgtcttaaaccctactgctggaaacaattttatgtaataagcaatgggcccaaaagtctaggagtttttttgtacttagtgaatttgtatgcaacagagatgctgcagctgatgcctttaaaaggtattcatcatggaagagctgaggcctgtgcttggtgttccagagcccagggttgagcatcctgaaggagccactgcagccgtcactgtccccagagcctgtggagatagagcctgtttgctgctttttcttcccgctcttaagacatggctggagctcagtcttcattgaatgaagtttgctgtggtattgcatagccttgctttcttgaactaaactgtttgcccttcacaagtagttcttctttcaggattagttcgttccaaggaggctcttcagtctcacagataagtagatctctcctgctgtctggacacatttcactcggaaattgaatacaatttgtattcaggctgggaacctgaacacacacttgtgtttttaagcttcccttttttacagtggacaaggacacaaataataaataaatcatccctaatgcccaagaaatgccctggtacttagtaataacaaaataccagtaacttc

SEQ ID NO: 14581 - DNA, 1950 bp, Homo sapiens
  source 1..1950: mol_type = unassigned DNA
tcagccacttcctccttccagcctcatctggttcccaggccgctggggactcccaacgccactgtccaagactctagggtcagcaagcgccccgggcggagaagggcgaggacgaagagcgccgggccgcgaccaggagcccacccgcgccctccgactgcagacatggggaagagacgcgggaactccaaagtcgctgggtctgcgcaggtggaaaaaatctaaaatctcctcaaaaagtagaggtcgacatcatagatgacaactttatcctgaggtggaacaggagcgatgagtctgtcgggaatgtgactttttcattcgattatcaaaaaactgggatggataattggataaaattgtctgggtgtcagaatattactagtaccaaatgcaacttttcttcactcaagctgaatgtttatgaagaaattaaattgcgtataagagcagaaaaagaaaacacttcttcatggtatgaggttgactcatttacaccatttcgcaaagctcagattggtcctccagaagtacatttagaagctgaagataaggcaatagtgatacacatctctcctggaacaaaagatagtgttatgtgggctttggatggtttaagctttacatatagcttagttatctggaaaaactcttcaggtgtagaagaaaggattgaaaatatttattccagacataaaatttataaactctcaccagagactacttattgtctaaaagttaaagcagcactacttacgtcatggaaaattggtgtctatagtccagtacattgtataaagaccacagttgaaaatgaactacctccaccagaaaatatagaagtcagtgtccaaaatcagaactatgttcttaaatgggattatacatatgcaaacatgacctttcaagttcagtggctccacgcctttttaaaaaggaatcctggaaaccatttgtataaatggaaacaaatacctgactgtgaaaatgtcaaaactacccagtgtgtctttcctcaaaacgttttccaaaaaggaatttaccttctccgcgtacaagcatctgatggaaataacacatctttttggtctgaagagataaagtttgatactgaaatacaagctttcctacttcctccagtctttaacattagatcccttagtgattcattccatatctatatcggtgctccaaaacagtctggaaacacgcctgtgatccaggattatccactgatttatgaaattattttttgggaaaacacttcaaatgctgagagaaaaattatcgagaaaaaaactgatgttacagttcctaatttgaaaccactgactgtatattgtgtgaaagccagagcacacaccatggatgaaaagctgaataaaagcagtgtttttagtgacgctgtatgtgagaaaacaaaaccaggaaatacctctaaaatttggcttatagttggaatttgtattgcattatttgctctcccgtttgtcatttatgctgcgaaagtcttcttgagatgcatcaattatgtcttctttccatcacttaaaccttcttccagtatagatgagtatttctctgaacagccattgaagaatcttctgctttcaacttctgaggaacaaatcgaaaaatgtttcataattgaaaatataagcacaattgctacagtagaagaaactaatcaaactgatgaagatcataaaaaatacagttcccaaactagccaagattcaggaaattattctaatgaagatgaaagcgaaagtaaaacaagtgaagaactacagcaggactttgtatgaccagaaatgaactgtgtcaagtataaggtttttcagcaggagttacactgggagcctgaggtcctcaccttcctctcagtaactacagagaggacgtttccctgtttagggaaagaaaaaacatcttcagatcataggtcct

SEQ ID NO: 14582 - DNA, 1878 bp, Homo sapiens
  source 1..1878: mol_type = unassigned DNA
gtgacttaggacggggcgatggcggctgagaggagctgcgcgtgcgcgaacatgtaactggtgggatctgcggcggctcccagatgatggtcgtcctcctgggcgcgacgaccctagtgctcgtcgccgtggcgccatgggtgttgtccgcagccgcaggtggaaaaaatctaaaatctcctcaaaaagtagaggtcgacatcatagatgacaactttatcctgaggtggaacaggagcgatgagtctgtcgggaatgtgactttttcattcgattatcaaaaaactgggatggataattggataaaattgtctgggtgtcagaatattactagtaccaaatgcaacttttcttcactcaagctgaatgtttatgaagaaattaaattgcgtataagagcagaaaaagaaaacacttcttcatggtatgaggttgactcatttacaccatttcgcaaagctcagattggtcctccagaagtacatttagaagctgaagataaggcaatagtgatacacatctctcctggaacaaaagatagtgttatgtgggctttggatggtttaagctttacatatagcttagttatctggaaaaactcttcaggtgtagaagaaaggattgaaaatatttattccagacataaaatttataaactctcaccagagactacttattgtctaaaagttaaagcagcactacttacgtcatggaaaattggtgtctatagtccagtacattgtataaagaccacagttgaaaatgaactacctccaccagaaaatatagaagtcagtgtccaaaatcagaactatgttcttaaatgggattatacatatgcaaacatgacctttcaagttcagtggctccacgcctttttaaaaaggaatcctggaaaccatttgtataaatggaaacaaatacctgactgtgaaaatgtcaaaactacccagtgtgtctttcctcaaaacgttttccaaaaaggaatttaccttctccgcgtacaagcatctgatggaaataacacatctttttggtctgaagagataaagtttgatactgaaatacaagctttcctacttcctccagtctttaacattagatcccttagtgattcattccatatctatatcggtgctccaaaacagtctggaaacacgcctgtgatccaggattatccactgatttatgaaattattttttgggaaaacacttcaaatgctgagagaaaaattatcgagaaaaaaactgatgttacagttcctaatttgaaaccactgactgtatattgtgtgaaagccagagcacacaccatggatgaaaatgacgctgtatgtgagtatttctctgaacagccattgaagaatcttctgctttcaacttctgaggaacaaatcgaaaaatgtttcataattgaaaatataagcacaattgctacagtagaagaaactaatcaaactgatgaagatcataaaaaatacagttcccaaactagccaagattcaggaaattattctaatgaagatgaaagcgaaagtaaaacaagtgaagaactacagcaggactttgtatgaccagaaatgaactgtgtcaagtataaggtttttcagcaggagttacactgggagcctgaggtcctcaccttcctctcagtaactacagagaggacgtttccctgtttagggaaagaaaaaacatcttcagatcataggtcctaaaaatacgggcaagctcttaactatttaaaaatgaaattacaggcccgggcacggtggctcacacctgtaatcccagcactttgggaggctgaggcaggcagatcatgaggtcaagagatcgagaccagcctggccaacgtggtgaaaccccatctctact

SEQ ID NO: 14583 - DNA, 2899 bp, Homo sapiens
  source 1..2899: mol_type = unassigned DNA
cccgcactaaagacgcttcttcccggcgggtaggaatcccgccggcgagccgaacagttccccgagcgcagcccgcggaccaccacccggccgcacgggccgcttttgtcccccgcccgccgcttctgtccgagaggccgcccgcgaggcgcatcctgaccgcgagcgtcgggtcccagagccgggcgcggctggggcccgaggctagcatctctcgggagccgcaaggcgagagctgcaaagtttaattagacacttcagaattttgatcacctaatgttgatttcagatgtaaaagtcaagagaagactctaaaaatagcaaagatgcttttgagccagaatgccttcatcttcagatcacttaatttggttctcatggtgtatatcagcctcgtgtttggtatttcatatgattcgcctgattacacagatgaatcttgcactttcaagatatcattgcgaaatttccggtccatcttatcatgggaattaaaaaaccactccattgtaccaactcactatacattgctgtatacaatcatgagtaaaccagaagatttgaaggtggttaagaactgtgcaaataccacaagatcattttgtgacctcacagatgagtggagaagcacacacgaggcctatgtcaccgtcctagaaggattcagcgggaacacaacgttgttcagttgctcacacaatttctggctggccatagacatgtcttttgaaccaccagagtttgagattgttggttttaccaaccacattaatgtgatggtgaaatttccatctattgttgaggaagaattacagtttgatttatctctcgtcattgaagaacagtcagagggaattgttaagaagcataaacccgaaataaaaggaaacatgagtggaaatttcacctatatcattgacaagttaattccaaacacgaactactgtgtatctgtttatttagagcacagtgatgagcaagcagtaataaagtctcccttaaaatgcaccctccttccacctggccaggaatcagaatcagcagaatctgccaaaataggaggaataattactgtgtttttgatagcattggtcttgacaagcaccatagtgacactgaaatggattggttatatatgcttaagaaatagcctccccaaagtcttgaattttcataactttttagcctggccatttcctaacctgccaccgttggaagccatggatatggtggaggtcatttacatcaacagaaagaagaaagtgtgggattataattatgatgatgaaagtgatagcgatactgaggcagcgcccaggacaagtggcggtggctataccatgcatggactgactgtcaggcctctgggtcaggcctctgccacctctacagaatcccagttgatagacccggagtccgaggaggagcctgacctgcctgaggttgatgtggagctccccacgatgccaaaggacagccctcagcagttggaactcttgagtgggccctgtgagaggagaaagagtccactccaggacccttttcccgaagaggactacagctccacggaggggtctgggggcagaattaccttcaatgtggacttaaactctgtgtttttgagagttcttgatgacgaggacagtgacgacttagaagcccctctgatgctatcgtctcatctggaagagatggttgacccagaggatcctgataatgtgcaatcaaaccatttgctggccagcggggaagggacacagccaacctttcccagcccctcttcagagggcctgtggtccgaagatgctccatctgatcaaagtgacacttctgagtcagatgttgaccttggggatggttatataatgagatgactccaaaactattgaatgaacttggacagacaagcacctacagggttctttgtctctgcatcctaacttgctgccttatcgtctgcaagtgttctccaagggaaggaggaggaaactgtggtgttcctttcttccaggtgacatcacctatgcacattcccagtatggggaccatagtatcattcagtgcattgtttacatattcaaagtggtgcactttgaaggaagcacatgtgcacctttcctttacactaatgcacttaggatgtttctgcatcatgtctaccagggagcagggttccccacagtttcagaggtggtccaggaccctatgatatttctcttctttcgttcttttttttttttttttttgagacagagtctcgttctgtcgcccaagctggagcgcaatggtgtgatcttggctcactgcaacatccgcctcccaggttcaagtgattctcctgcctcagcctccctcgcaagtagctgggattacaggcgcctgccaccatgcctagcaaatttttgtatttttagtagagacaggattttaccatgttggccaggctggtctcaaactcctgacctcaagtgatctgccctcctcagcctcgtaaagtgctgggattacaggggtgagccgctgtgcctggctggccctgtgatatttctgtgaaataaattgggccagggtgggagcagggaaagaaaaggaaaatagtagcaagagctgcaaagcaggcaggaagggaggaggagagccaggtgagcagtggagagaaggggggccctgcacaaggaaacagggaagagccatcgaagtttcagtcggtgagccttgggcacctcacccatgtcacatcctgtctcctgcaattggaattccaccttgtccagccctccccagttaaagtggggaagacagactttaggatcacgtgtgtgactaatacagaaaggaaacatggcgtcggggagagggataaaacctgaatgccatattttaagttaaaaaaaaaaaa

SEQ ID NO: 14584 - DNA, 2889 bp, Homo sapiens
  source 1..2889: mol_type = unassigned DNA
gcccgcgcttccgtatcgctcctcgtaggccggggctcggcgcgcgcacccgcactaaagacgcttcttcccggcgggtaggaatcccgccggcgagccgaacagttccccgagcgcagcccgcggaccaccacccggccgcacgggccgcttttgtcccccgcccgccgcttctgtccgagaggccgcccgcgaggcgcatcctgaccgcgagcgtcgggtcccagagccgggcgcggctggggcccgaggctagcatctctcgggagccgcaaggcgagagctgcaaagatgtaaaagtcaagagaagactctaaaaatagcaaagatgcttttgagccagaatgccttcatcttcagatcacttaatttggttctcatggtgtatatcagcctcgtgtttggtatttcatatgattcgcctgattacacagatgaatcttgcactttcaagatatcattgcgaaatttccggtccatcttatcatgggaattaaaaaaccactccattgtaccaactcactatacattgctgtatacaatcatgagtaaaccagaagatttgaaggtggttaagaactgtgcaaataccacaagatcattttgtgacctcacagatgagtggagaagcacacacgaggcctatgtcaccgtcctagaaggattcagcgggaacacaacgttgttcagttgctcacacaatttctggctggccatagacatgtcttttgaaccaccagagtttgagattgttggttttaccaaccacattaatgtgatggtgaaatttccatctattgttgaggaagaattacagtttgatttatctctcgtcattgaagaacagtcagagggaattgttaagaagcataaacccgaaataaaaggaaacatgagtggaaatttcacctatatcattgacaagttaattccaaacacgaactactgtgtatctgtttatttagagcacagtgatgagcaagcagtaataaagtctcccttaaaatgcaccctccttccacctggccaggaatcagaatcagcagaatctgccaaaataggaggaataattactgtgtttttgatagcattggtcttgacaagcaccatagtgacactgaaatggattggttatatatgcttaagaaatagcctccccaaagtcttgaattttcataactttttagcctggccatttcctaacctgccaccgttggaagccatggatatggtggaggtcatttacatcaacagaaagaagaaagtgtgggattataattatgatgatgaaagtgatagcgatactgaggcagcgcccaggacaagtggcggtggctataccatgcatggactgactgtcaggcctctgggtcaggcctctgccacctctacagaatcccagttgatagacccggagtccgaggaggagcctgacctgcctgaggttgatgtggagctccccacgatgccaaaggacagccctcagcagttggaactcttgagtgggccctgtgagaggagaaagagtccactccaggacccttttcccgaagaggactacagctccacggaggggtctgggggcagaattaccttcaatgtggacttaaactctgtgtttttgagagttcttgatgacgaggacagtgacgacttagaagcccctctgatgctatcgtctcatctggaagagatggttgacccagaggatcctgataatgtgcaatcaaaccatttgctggccagcggggaagggacacagccaacctttcccagcccctcttcagagggcctgtggtccgaagatgctccatctgatcaaagtgacacttctgagtcagatgttgaccttggggatggttatataatgagatgactccaaaactattgaatgaacttggacagacaagcacctacagggttctttgtctctgcatcctaacttgctgccttatcgtctgcaagtgttctccaagggaaggaggaggaaactgtggtgttcctttcttccaggtgacatcacctatgcacattcccagtatggggaccatagtatcattcagtgcattgtttacatattcaaagtggtgcactttgaaggaagcacatgtgcacctttcctttacactaatgcacttaggatgtttctgcatcatgtctaccagggagcagggttccccacagtttcagaggtggtccaggaccctatgatatttctcttctttcgttcttttttttttttttttttgagacagagtctcgttctgtcgcccaagctggagcgcaatggtgtgatcttggctcactgcaacatccgcctcccaggttcaagtgattctcctgcctcagcctccctcgcaagtagctgggattacaggcgcctgccaccatgcctagcaaatttttgtatttttagtagagacaggattttaccatgttggccaggctggtctcaaactcctgacctcaagtgatctgccctcctcagcctcgtaaagtgctgggattacaggggtgagccgctgtgcctggctggccctgtgatatttctgtgaaataaattgggccagggtgggagcagggaaagaaaaggaaaatagtagcaagagctgcaaagcaggcaggaagggaggaggagagccaggtgagcagtggagagaaggggggccctgcacaaggaaacagggaagagccatcgaagtttcagtcggtgagccttgggcacctcacccatgtcacatcctgtctcctgcaattggaattccaccttgtccagccctccccagttaaagtggggaagacagactttaggatcacgtgtgtgactaatacagaaaggaaacatggcgtcggggagagggataaaacctgaatgccatattttaagtt

SEQ ID NO: 14585 - DNA, 1389 bp, Homo sapiens
  source 1..1389: mol_type = unassigned DNA
gcccccgcgccggcggcggcgcggcgcccgcgcttccgtatcgctcctcgtaggccggggctcggcgcgcgcacccgcactaaagacgcttcttcccggcgggtaggaatcccgccggcgagccgaacagttccccgagcgcagcccgcggaccaccacccggccgcacgggccgcttttgtcccccgcccgccgcttctgtccgagaggccgcccgcgaggcgcatcctgaccgcgagcgtcgggtcccagagccgggcgcggctggggcccgaggctagcatctctcgggagccgcaaggcgagagctgcaaagatgtaaaagtcaagagaagactctaaaaatagcaaagatgcttttgagccagaatgccttcatcttcagatcacttaatttggttctcatggtgtatatcagcctcgtgtttggtatttcatatgattcgcctgattacacagatgaatcttgcactttcaagatatcattgcgaaatttccggtccatcttatcatgggaattaaaaaaccactccattgtaccaactcactatacattgctgtatacaatcatgagtaaaccagaagatttgaaggtggttaagaactgtgcaaataccacaagatcattttgtgacctcacagatgagtggagaagcacacacgaggcctatgtcaccgtcctagaaggattcagcgggaacacaacgttgttcagttgctcacacaatttctggctggccatagacatgtcttttgaaccaccagagtttgagattgttggttttaccaaccacattaatgtgatggtgaaatttccatctattgttgaggaagaattacagtttgatttatctctcgtcattgaagaacagtcagagggaattgttaagaagcataaacccgaaataaaaggaaacatgagtggaaatttcacctatatcattgacaagttaattccaaacacgaactactgtgtatctgtttatttagagcacagtgatgagcaagcagtaataaagtctcccttaaaatgcaccctccttccacctggccaggaatcagaatcagcagaatctgccaaaataggaggaataattactgtgtttttgatagcattggtcttgacaagcaccatagtgacactgaaatggattggttatatatgcttaagaaatagcctccccaaagtcttgaggcaaggtctcgctaagggctggaatgcagtggctattcacaggtgcagtcataatgcactacagtctgaaactcctgagctcaaacagtcgtcctgcctaagcttccccagtagctgggattacaagcgtgcatccctgtgccccagtgattaagttttattatgtagaaaataaagagcaaacagtacagctg

SEQ ID NO: 14586 - DNA, 4335 bp, Homo sapiens
  source 1..4335: mol_type = unassigned DNA
gccggcggcggcgcggcgcccgcgcttccgtatcgctcctcgtaggccggggctcggcgcgcgcacccgcactaaagacgcttcttcccggcgggtaggaatcccgccggcgagccgaacagttccccgagcgcagcccgcggaccaccacccggccgcacgggccgcttttgtcccccgcccgccgcttctgtccgagaggccgcccgcgaggcgcatcctgaccgcgagcgtcgggtcccagagccgggcgcggctggggcccgaggctagcatctctcgggagccgcaaggcgagagctgcaaagtttaattagacacttcagaattttgatcacctaatgttgatttcagatgtaaaagtcaagagaagactctaaaaatagcaaagatgcttttgagccagaatgccttcatcttcagatcacttaatttggttctcatggtgtatatcagcctcgtgtttggtatttcatatgattcgcctgattacacagatgaatcttgcactttcaagatatcattgcgaaatttccggtccatcttatcatgggaattaaaaaaccactccattgtaccaactcactatacattgctgtatacaatcatgagtaaaccagaagatttgaaggtggttaagaactgtgcaaataccacaagatcattttgtgacctcacagatgagtggagaagcacacacgaggcctatgtcaccgtcctagaaggattcagcgggaacacaacgttgttcagttgctcacacaatttctggctggccatagacatgtcttttgaaccaccagagtttgagattgttggttttaccaaccacattaatgtgatggtgaaatttccatctattgttgaggaagaattacagtttgatttatctctcgtcattgaagaacagtcagagggaattgttaagaagcataaacccgaaataaaaggaaacatgagtggaaatttcacctatatcattgacaagttaattccaaacacgaactactgtgtatctgtttatttagagcacagtgatgagcaagcagtaataaagtctcccttaaaatgcaccctccttccacctggccaggaatcagaatcagcagaatctgccaaaataggaggaataattactgtgtttttgatagcattggtcttgacaagcaccatagtgacactgaaatggattggttatatatgcttaagaaatagcctccccaaagtcttgaggcaaggtctcgctaagggctggaatgcagtggctattcacaggtgcagtcataatgcactacagtctgaaactcctgagctcaaacagtcgtcctgcctaagcttccccagtagctgggattacaagcgtgcatccctgtgccccagtgattaagttttattatgtagaaaataaagagcaaacagtacagctgatacggactctctctctctttttttttttttttaagaattttcataactttttagcctggccatttcctaacctgccaccgttggaagccatggatatggtggaggtcatttacatcaacagaaagaagaaagtgtgggattataattatgatgatgaaagtgatagcgatactgaggcagcgcccaggacaagtggcggtggctataccatgcatggactgactgtcaggcctctgggtcaggcctctgccacctctacagaatcccagttgatagacccggagtccgaggaggagcctgacctgcctgaggttgatgtggagctccccacgatgccaaaggacagccctcagcagttggaactcttgagtgggccctgtgagaggagaaagagtccactccaggacccttttcccgaagaggactacagctccacggaggggtctgggggcagaattaccttcaatgtggacttaaactctgtgtttttgagagttcttgatgacgaggacagtgacgacttagaagcccctctgatgctatcgtctcatctggaagagatggttgacccagaggatcctgataatgtgcaatcaaaccatttgctggccagcggggaagggacacagccaacctttcccagcccctcttcagagggcctgtggtccgaagatgctccatctgatcaaagtgacacttctgagtcagatgttgaccttggggatggttatataatgagatgactccaaaactattgaatgaacttggacagacaagcacctacagggttctttgtctctgcatcctaacttgctgccttatcgtctgcaagtgttctccaagggaaggaggaggaaactgtggtgttcctttcttccaggtgacatcacctatgcacattcccagtatggggaccatagtatcattcagtgcattgtttacatattcaaagtggtgcactttgaaggaagcacatgtgcacctttcctttacactaatgcacttaggatgtttctgcatcatgtctaccagggagcagggttccccacagtttcagaggtggtccaggaccctatgatatttctcttctttcgttcttttttttttttttttttgagacagagtctcgttctgtcgcccaagctggagcgcaatggtgtgatcttggctcactgcaacatccgcctcccaggttcaagtgattctcctgcctcagcctccctcgcaagtagctgggattacaggcgcctgccaccatgcctagcaaatttttgtatttttagtagagacaggattttaccatgttggccaggctggtctcaaactcctgacctcaagtgatctgccctcctcagcctcgtaaagtgctgggattacaggggtgagccgctgtgcctggctggccctgtgatatttctgtgaaataaattgggccagggtgggagcagggaaagaaaaggaaaatagtagcaagagctgcaaagcaggcaggaagggaggaggagagccaggtgagcagtggagagaaggggggccctgcacaaggaaacagggaagagccatcgaagtttcagtcggtgagccttgggcacctcacccatgtcacatcctgtctcctgcaattggaattccaccttgtccagccctccccagttaaagtggggaagacagactttaggatcacgtgtgtgactaatacagaaaggaaacatggcgtcggggagagggataaaacctgaatgccatattttaagttaaaaaaaaaaaaagcaaacacaaagatgcttcaagatcttcaggagaagtatggtatacaagtttcagggaccctatttgacaattttcagagtgctctctatgctgattccgagtcgagtgtgtcagctgtgattacagtgcctgtggatctaggccgggttgggggggtgtgggcgggggaagggaagtctggcccggagcaattgctcctgccggtaaccccagcactttgggatgcctaaacaggcgtatcgcttgaggccagtaattcgagaccagcctgggcaacatggcaaatctgtctctacaaaacaaaattagaaaaattaactgggcgtagtggcatgtgcctgttgtcccagctacttgggaggctgaggtgggagaatggcttgagcccaggaagcggaggttgcagtgagccaagatcatgtcactgcacttcagcctgggtgacagaaccagaccctgtctttaaaaagggagttggtggggagaggttctagaatgtcatgtagcaaccagtttaaggactgggactcagggatccaactcccacagtttccctgtgtgaccctaggcatttgacttagcctttctgagcctcaggttttttgtttctgaagtaaaaggattggactaggtaatctccaagatcctaggaacccaggagaaagatgagaaaatgtacaagaatgaacactcaggtggaaatgctgcaatcctgagaagctcccaggatgaatgaaaggcacaggacctcttacccctcacccctgcccccctcaagagctggtttctcaaacctttctcttaggccccttcaaagggggaaaactaaaaattatacaagttatagttcaaggactttaaatagattatttatatgattgctcataaggatgaggctgtgaggagggaacaccttatttaatctaatgaaattccataggaaagaggccttttgtatattgaatcaatttatctgccttctcagtgcatctgtcatattctgaaagattctgggttgatcttttgcgataacctctatggctgtgagtgtgtgtgtgtgtttgtgtattttttaacattttgtataatgattggaggttggtaaaaagtaacacaacagtacttttttaatacaaa

SEQ ID NO: 14587 - DNA, 876 bp, Homo sapiens
  source 1..876: mol_type = unassigned DNA
gctcggggttggagccagcgaccgtcggtagcagcatggctctcctctttctcctaccccttgtcatgcagggtgtgagcagggctgagatgggcaccgcggatctggggccgtcctcagtggccataatataattgtgataatgtaataaaatcaggaaacattacctgaagcagatgcttttgaagtcaccagaaaatagtcttctccaattccaatttaaatatggagtgcctacaccaactaatgttacaattgaatcctataacatgaaccctatcgtatattgggagtaccagatcatgccacaggtccctgtttttaccgtagaggtaaagaactatggtgttaagaattcagaatggattgatgcctgcatcaatatttctcatcattattgtaatatttctgatcatgttggtgatccatcaaattctctttgggtcagagttaaagccagggttggacaaaaagaatctgcctatgcaaagtcagaagaatttgctgtatgccgagatggaaaaattggaccacctaaactggatatcagaaaggaggagaagcaaatcatgattgacatatttcacccttcagtttttgtaaatggagacgagcaggaagtcgattatgatcccgaaactacctgttacattagggtgtacaatgtgtatgtgagaatgaacggaagtgagattaaaagaagctgtgcattttcactgttttcttttttcatctagatccagtataaaatactcacgcagaaggaagatgattgtgacgagattcagtgccagttagcgattccagtatcctcactgaattctcagtactgtgtttcagcagaaggagtcttacatgtgtggggtgttacaactg

SEQ ID NO: 14588 - DNA, 2139 bp, Homo sapiens
  source 1..2139: mol_type = unassigned DNA
gcctcctgccgacgccggcacagaccccggtgacggaagtgacgtaaggccggggctggagggcagtgctgggctggtcccgcaggcgctcggggttggagccagcgaccgtcggtagcagcatggctctcctctttctcctaccccttgtcatgcagggtgtgagcagggctgagatgggcaccgcggatctggggccgtcctcagtgcctacaccaactaatgttacaattgaatcctataacatgaaccctatcgtatattgggagtaccagatcatgccacaggtccctgtttttaccgtagaggtaaagaactatggtgttaagaattcagaatggattgatgcctgcatcaatatttctcatcattattgtaatatttctgatcatgttggtgatccatcaaattctctttgggtcagagttaaagccagggttggacaaaaagaatctgcctatgcaaagtcagaagaatttgctgtatgccgagatggaaaaattggaccacctaaactggatatcagaaaggaggagaagcaaatcatgattgacatatttcacccttcagtttttgtaaatggagacgagcaggaagtcgattatgatcccgaaactacctgttacattagggtgtacaatgtgtatgtgagaatgaacggaagtgagatccagtataaaatactcacgcagaaggaagatgattgtgacgagattcagtgccagttagcgattccagtatcctcactgaattctcagtactgtgtttcagcagaaggagtcttacatgtgtggggtgttacaactgaaaagtcaaaagaagtttgtattaccattttcaatagcagtataaaaggttctctttggattccagttgttgctgctttactactctttctagtgcttagcctggtattcatctgtttttatattaagaaaattaatccattgaaggaaaaaagcataatattacccaagtccttgatctctgtggtaagaagtgctactttagagacaaaacctgaatcaaaatatgtatcactcatcacgtcataccagccattttccttagaaaaggaggtggtctgtgaagagccgttgtctccagcaacagttccaggcatgcataccgaagacaatccaggaaaagtggaacatacagaagaactttctagtataacagaagtggtgactactgaagaaaatattcctgacgtggtcccgggcagccatctgactccaatagagagagagagttcttcacctttaagtagtaaccagtctgaacctggcagcatcgctttaaactcgtatcactccagaaattgttctgagagtgatcactccagaaatggttttgatactgattccagctgtctggaatcacatagctccttatctgactcagaatttcccccaaataataaaggtgaaataaaaacagaaggacaagagctcataaccgtaataaaagcccccacctcctttggttatgataaaccacatgtgctagtggatctacttgtggatgatagcggtaaagagtccttgattggttatagaccaacagaagattccaaagaattttcatgagatcagctaagttgcaccaactttgaagtctgattttcctggacagttttctgctttaatttcatgaaaagattatgatctcagaaattgtatcttagttggtatcaaccaaatggagtgacttagtgtacatgaaagcgtaaagaggatgtgtggcattttcacttttggcttgtaaagtacagacttttttttttttttaaacaaaaaaagcattgtaacttatgaacctttacatccagataggttaccagtaacggaacagtatccagtactcctggttcctaggtgagcaggtgatgccccagggacctttgtagccacttcactttttttcttttctctgccttggtatagcatatgtttttgtaagtttatgcatacagtaattttaagtaatttcagaagaaattctgcaagcttttcaaaattggacttaaaatctaattcaaactaatagaattaatggaatatgtaaatagaaacgtgtatattttttatgaaacattacagttagagatttttaaataaagaattttaaaactcg

SEQ ID NO: 14589 - DNA, 748 bp, Homo sapiens
  source 1..748: mol_type = unassigned DNA
gcctcctgccgacgccggcacagaccccggtgacggaagtgacgtaaggccggggctggagggcagtgctgggctggtcccgcaggcgctcggggttggagccagcgaccgtcggtagcagcatggctctcctctttctcctaccccttgtcatgcagggtgtgagcagggctgagatgggcaccgcggatctggggccgtcctcagtggccataatataattgtgataatgtaataaaatcaggaaacattacctgaagcagatgcttttgaagtcaccagaaaatagtcttctccaattccaatttaaatatggagtgcctacaccaactaatgttacaattgaatcctataacatgaaccctatcgtatattgggagtaccagatcatgccacaggtccctgtttttaccgtagaggtaaagaactatggtgttaagaattcagaatggattgatgcctgcatcaatatttctcatcattattgtaatatttctgatcatgttggtgatccatcaaattctctttgggtcagagttaaagccagggttggacaaaaagaatctgcctatgcaaagtcagaagaatttgctgtatgccgagatggaaaaattggaccacctaaactggatatcagaaaggaggagaagcaaatcatgattgacatatttcacccttcagtttttgtaaatggagacgagcaggaagtcgattatgatcccgaaactacctgttacattagggtgta

SEQ ID NO: 14590 - DNA, 2055 bp, Homo sapiens
  source 1..2055: mol_type = unassigned DNA
ccgcaggcgctcggggttggagccagcgaccgtcggtagcagcatggctctcctctttctcctaccccttgtcatgcagggtgtgagcagggctgagatgggcaccgcggatctggggccgtcctcagtgcctacaccaactaatgttacaattgaatcctataacatgaaccctatcgtatattgggagtaccagatcatgccacaggtccctgtttttaccgtagaggtaaagaactatggtgttaagaattcagaatggattgatgcctgcatcaatatttctcatcattattgtaatatttctgatcatgttggtgatccatcaaattctctttgggtcagagttaaagccagggttggacaaaaagaatctgcctatgcaaagtcagaagaatttgctgtatgccgagatggaaaaattggaccacctaaactggatatcagaaaggaggagaagcaaatcatgattgacatatttcacccttcagtttttgtaaatggagacgagcaggaagtcgattatgatcccgaaactacctgttacattagggtgtacaatgtgtatgtgagaatgaacggaagtgagatccagtataaaatactcacgcagaaggaagatgattgtgacgagattcagtgccagttagcgattccagtatcctcactgaattctcagtactgtgtttcagcagaaggagtcttacatgtgtggggtgttacaactgaaaagtcaaaagaagtttgtattaccattttcaatagcagtataaaaggttctctttggattccagttgttgctgctttactactcttttgcttagcctggtattcatctgtttttatattaagaaaattaatccattgaaggaaaaaagcataatattacccaagtccttgatctctgtggtaagaagtgctactttagagacaaaacctgaatcaaaatatgtatcactcatcacgtcataccagccattttccttagaaaaggaggtggtctgtgaagagccgttgtctccagcaacagttccaggcatgcataccgaagacaatccaggaaaagtggaacatacagaagaactttctagtataacagaagtggtgactactgaagaaaatattcctgacgtggtcccgggcagccatctgactccaatagagagagagagttcttcacctttaagtagtaaccagtctgaacctggcagcatcgctttaaactcgtatcactccagaaattgttctgagagtgatcactccagaaatggttttgatactgattccagctgtctggaatcacatagctccttatctgactcagaatttcccccaaataataaaggtgaaataaaaacagaaggacaagagctcataaccgtaataaaagcccccacctcctttggttatgataaaccacatgtgctagtggatctacttgtggatgatagcggtaaagagtccttgattggttatagaccaacagaagattccaaagaattttcatgagatcagctaagttgcaccaactttgaagtctgattttcctggacagttttctgctttaatttcatgaaaagattatgatctcagaaattgtatcttagttggtatcaaccaaatggagtgacttagtgtacatgaaagcgtaaagaggatgtgtggcattttcacttttggcttgtaaagtacagacttttttttttttttaaacaaaaaaagcattgtaacttatgaacctttacatccagataggttaccagtaacggaacagtatccagtactcctggttcctaggtgagcaggtgatgccccagggacctttgtagccacttcactttttttcttttctctgccttggtatagcatatgtttttgtaagtttatgcatacagtaattttaagtaatttcagaagaaattctgcaagcttttcaaaattggacttaaaatctaattcaaactaatagaattaatggaatatgtaaatagaaacgtgtatattttttatgaaacattacagttagagatttttaaataaagaattttaaaactc

SEQ ID NO: 14591 - DNA, 753 bp, Homo sapiens
  source 1..753: mol_type = unassigned DNA
gcctcctgccgacgccggcacagaccccggtgacggaagtgacgtaaggccggggctggagggcagtgctgggctggtcccgcaggcgctcggggttggagccagcgaccgtcggtagcagcatggctctcctctttctcctaccccttgtcatgcagggtgtgagcagggctgagatgggcaccgcggatctggggccgtcctcagtgcctacaccaactaatgttacaattgaatcctataacatgaaccctatcgtatattgggagtaccagatcatgccacaggtccctgtttttaccgtagaggtaaagaactatggagttaaagccagggttggacaaaaagaatctgcctatgcaaagtcagaagaatttgctgtatgccgagatggaaaaattggaccacctaaactggatatcagaaaggaggagaagcaaatcatgattgacatatttcacccttcagtttttgtaaatggagacgagcaggaagtcgattatgatcccgaaactacctgttacattagggtgtacaatgtgtatgtgagaatgaacggaagtgagatccagtataaaatactcacgcagaaggaagatgattgtgacgagattcagtgccagttagcgattccagtatcctcactgaattctcagtactgtgtttcagcagaaggagtcttacatgtgtggggtgttacaactgaaaagtcaaaagaagtttgtattaccattttcaatagcagtataaaag

SEQ ID NO: 14592 - DNA, 1648 bp, Homo sapiens
  source 1..1648: mol_type = unassigned DNA
gcagtccgtcttaggtctcagtctggaagtggtggattgccggcactcactagcagatttggcatgcctacaccaactaatgttacaattgaatcctataacatgaaccctatcgtatattgggagtaccagatcatgccacaggtccctgtttttaccgtagaggtaaagaactatggtgttaagaattcagaatggattgatgcctgcatcaatatttctcatcattattgtaatatttctgatcatgttggtgatccatcaaattctctttgggtcagagttaaagccagggttggacaaaaagaatctgcctatgcaaagtcagaagaatttgctgtatgccgagatggaaaaattggaccacctaaactggatatcagaaaggaggagaagcaaatcatgattgacatatttcacccttcagtttttgtaaatggagacgagcaggaagtcgattatgatcccgaaactacctgttacattagggtgtacaatgtgtatgtgagaatgaacggaagtgagatccagtataaaatactcacgcagaaggaagatgattgtgacgagattcagtgccagttagcgattccagtatcctcactgaattctcagtactgtgtttcagcagaaggagtcttacatgtgtggggtgttacaactgaaaagtcaaaagaagtttgtattaccattttcaatagcagtataaaaggttctctttggattccagttgttgctgctttactactctttctagtgcttagcctggtattcatctgtttttatattaagaaaattaatccattgaaggaaaaaagcataatattacccaagtccttgatctctgtggtaagaagtgctactttagagacaaaacctgaatcaaaatatgtatcactcatcacgtcataccagccattttccttagaaaaggaggtggtctgtgaagagccgttgtctccagcaacagttccaggcatgcataccgaagacaatccaggaaaagtggaacatacagaagaactttctagtataacagaagtggtgactactgaagaaaatattcctgacgtggtcccgggcagccatctgactccaatagagagagagagttcttcacctttaagtagtaaccagtctgaacctggcagcatcgctttaaactcgtatcactccagaaattgttctgagagtgatcactccagaaatggttttgatactgattccagctgtctggaatcacatagctccttatctgactcagaatttcccccaaataataaaggtgaaataaaaacagaaggacaagagctcataaccgtaataaaagcccccacctcctttggttatgataaaccacatgtgctagtggatctacttgtggatgatagcggtaaagagtccttgattggttatagaccaacagaagattccaaagaattttcatgagatcagctaagttgcaccaactttgaagtctgattttcctggacagttttctgctttaatttcatgaaaagattatgatctcagaaattgtatcttagttggtatcaaccaaatggagtgacttagtgtacatgaaagcgtaaagaggatgtgtggcattttcacttttggcttgtaaagtacagactttttttttttt

SEQ ID NO: 14593 - DNA, 2221 bp, Homo sapiens
  source 1..2221: mol_type = unassigned DNA
gttgactggaggcggaggttgcagtgagccgagatcgccccactgcactccagcctggtgactccgtctcaaaaaaaaggggaggggggcgggggagagttgaaagcttaatatgtactttgggggctattaaagcaaacatttcgactaaaggggcgaatcctcgaattgtgcgatcaagcacccgagaggagagttggggggggtcaggaggggtgggggctccagggaaagcccgggggtctgggccggggtctcgcggggcccttccggaaggatcgcggcccccgaaggtgggcgtcccgcggggctccagtctccaggacgttccgggaggctccgcgctctgggaggccggctgcgtggggtccccgcgctgcagccgcagaggccccccagggccgcggttcccggagcgggaaagtcccgcgcgggggcggtggcctcgggggcgggacggggcgggggcgggggcgcgggcggccgagccgaatcccctccaccgggacgccccgctgctgctcgggaagaggcgggccctgcgcgccctgcgctcgccatggcggtttgggcggcgacgtgagcggctccgcggaccccgagcggggccccggccgcgacctgagccgccgccgagcgcccggggccatgcgaccgacgctgctgtggtcgctgctgctgctgctcggagtcttcgccgccgccgccgcggccccgccagaccctctttcccagctgcccgctcctcagcacccgaagattcgcctgtacaacgcagagcaggtcctgagttgggagccagtggccctgagcaatagcacgaggcctgttgtctaccaagtgcagtttaaatacaccgacagtaaatggttcacggccgacatcatgtccataggggtgaattgtacacagatcacagcaacagagtgtgacttcactgccgccagtccctcagcaggcttcccaatggatttcaatgtcactctacgccttcgagctgagctgggagcactccattctgcctgggtgacaatgccttggtttcaacactatcggaatgtgactgtcgggcctccagaaaacattgaggtgaccccaggagaaggctccctcatcatcaggttctcctctccctttgacatcgctgatacctccacggcctttttttgttattatgtccattactgggaaaaaggaggaatccaacaggtcaaaggccctttcagaagcaactccatttcattggataacttaaaaccctccagagtgtactgtttacaagtccaggcacaactgctttggaacaaaagtaacatctttagagtcgggcatttaagcaacatatcttgctacgaaacaatggcagatgcctccactgagcttcagcaagtcatcctgatctccgtgggaacattttcgttgctgtcggtgctggcaggagcctgtttcttcctggtcctgaaatatagaggcctgattaaatactggtttcacactccaccaagcatcccattacagatagaagagtatttaaaagacccaactcagcccatcttagaggccttggacaaggacagctcaccaaaggatgacgtctgggactctgtgtccattatctcgtttccggaaaaggagcaagaagatgttctccaaacgctttgaaccaaagcatgggcctagcccactggctccctggaagagatcaagccatcggagctgctagagttctgtctggactttccagagaccagtattcccttttgctgcctctaaaaggcctgtccctgcagacatgagagacagcaggtctcatgggggtgacaagctttttttttttttcttaaagaattttcaaaatcaaattccagaatgattttacggagatatcccaggaaaattaaggcttctcttaaacactaaaaaggcatgtaattgcttgttagcaaaatggatatgacacatctctgatacttttttcattattggttgggctgagcagtcagaagacctggtcgtcgtcttgactttggcaaatgagccggagccccttgggcaggtcacacaacctgtcccagcgagggacaccgagtggcccttcatgtacatccatggtgtgctggcttaaaatgtaattaatcttgtaaatatactcctagtaatttaagattttgtttttaaactggaaataaaagattgtatagtgcatgttttttaaagtcta

SEQ ID NO: 14594 - DNA, 844 bp, Homo sapiens
  source 1..844: mol_type = unassigned DNA
cgttcctgggcctggagggctgctttggggcaggaaactttggccaccaggcctctgacctgcaccaggagacactgggaggtttagtccccaaacccgcacagagcaggactgcagcctgaggaaagagcaaggatttcaggagagaggcctgcgacaagtgagcaggaaatagaaacttaagagaaatacacacttctgagaaactgaaacgacaggggaaaggaggtctcactgagcaccgtcccagcatccggacaccacagcggcccttcgctccacgcagaaaaccacacttctcaaaccttcactcaacacttccttccccaaagccagaagatgcacaaggaggaacatgaggtggctgtgctggggccaccccccagcaccatccttccaaggtccaccgtgatcaacatccacagcgagacctccgtgcccgaccatgtcgtctggtccctgttcaacaccctcttcttgaactggtgctgtctgggcttcatagcattcgcctactccgtgaagtctagggacaggaagatggttggcgacgtgaccggggcccaggcctatgcctccaccgccaagtgcctgaacatctgggccctgattctgggcatcctcatgaccattggattcatcctgttactggtattcggctctgtgacagtctaccatattatgttacagataatacaggaaaaacggggttactagtagccgcccatagcctgcaacctttgcactccactgtgcaatgctggccctgcacgctggggctgttgcccctgcccccttggtcctgcccctagatacagcagtttatacccacacacctgtctac

SEQ ID NO: 14595 - DNA, 855 bp, Homo sapiens
  source 1..855: mol_type = unassigned DNA
ctagtcctgacttgagtttctgatgaggaagcctctctccttagccttcagcctttcctcccaccctgccataaagtaatttgatcctcaagaagttaaaccacacctcattggtccctggctaattcaccaatttacaaacagcaggaaatagaaacttaagagaaatacacacttctgagaaactgaaacgacaggggaaaggaggtctcactgagcaccgtcccagcatccggacaccacagcggcccttcgctccacgcagaaaaccacacttctcaaaccttcactcaacacttccttccccaaagccagaagatgcacaaggaggaacatgaggtggctgtgctggggccaccccccagcaccatccttccaaggtccaccgtgatcaacatccacagcgagacctccgtgcccgaccatgtcgtctggtccctgttcaacaccctcttcttgaactggtgctgtctgggcttcatagcattcgcctactccgtgaagtctagggacaggaagatggttggcgacgtgaccggggcccaggcctatgcctccaccgccaagtgcctgaacatctgggccctgattctgggcatcctcatgaccattggattcatcctgttactggtattcggctctgtgacagtctaccatattatgttacagataatacaggaaaaacggggttactagtagccgcccatagcctgcaacctttgcactccactgtgcaatgctggccctgcacgctggggctgttgcccctgcccccttggtcctgcccctagatacagcagtttatacccacacacctgtctacagtgtcattcaataaagtgcacgtgcttgtga

SEQ ID NO: 14596 - DNA, 655 bp, Homo sapiens
  source 1..655: mol_type = unassigned DNA
aaacgacaggggaaaggaggtctcactgagcaccgtcccagcatccggacaccacagcggcccttcgctccacgcagaaaaccacacttctcaaaccttcactcaacacttccttccccaaagccagaagatgcacaaggaggaacatgaggtggctgtgctggggccaccccccagcaccatccttccaaggtccaccgtgatcaacatccacagcgagacctccgtgcccgaccatgtcgtcgtccctgttcaacaccctcttcttgaatgctgtctgggcttcatagcattcgcctactccgtgaagtctagggacaggaagatggttggcgacgtgaccggggcccaggccctccaccgccaagtgcctgaacatctgggccctgattctgggcatcctcatgaccattggattcatcctgttactggtattcggctctgtgacagtctaccatattatgttacagataatacaggaaaaacggggttactagtagccgcccatagcctgcaacctttgcactccactgtgcaatgctggccctgcacgctggggctgttgcccctgcccccttggtcctgcccctagatacagcagtttatacccacacacctgtctacagtgtcattcaataaagtgcacgtgcttgtg

SEQ ID NO: 14597 - DNA, 730 bp, Homo sapiens
  source 1..730: mol_type = unassigned DNA
gtcagttctccccagagtccccgttcctgggcctggagggctgctttggggcaggaaactttggccaccaggcctctgacctgcaccaggagacactgggaggtttagtccccaaacccgcacagagcaggactgcagcctgaggaaagagcaaggatttcaggagagaggcctgcgacaagtgagccagaagatgcacaaggaggaacatgaggtggctgtgctggggccaccccccagcaccatccttccaaggtccaccgtgatcaacatccacagcgagacctccgtgcccgaccatgtcgtctggtccctgttcaacaccctcttcttgaactggtgctgtctgggcttcatagcattcgcctactccgtgaagtctagggacaggaagatggttggcgacgtgaccggggcccaggcctatgcctccaccgccaagtgcctgaacatctgggccctgattctgggcatcctcatgaccattggattcatcctgttactggtattcggctctgtgacagtctaccatattatgttacagataatacaggaaaaacggggttactagtagccgcccatagcctgcaacctttgcactccactgtgcaatgctggccctgcacgctggggctgttgcccctgcccccttggtcctgcccctagatacagcagtttatacccacacacctgtctacagtgtcattcaataaagtgcacgtgcttgtga

SEQ ID NO: 14598 - DNA, 648 bp, Homo sapiens
  source 1..648: mol_type = unassigned DNA
atcccggtaacccgatcaccgctggtcaccatgaaccacattgtgcaaaccttctctcctgtcaacagcggccagcctcccaactacgagatgctcaaggaggagcaggaagtggctatgctgggggtgccccacaaccctgctcccccgatgtccaccgtgatccacatccgcagcgagacctccgtgcctgaccatgtggtcgtccctgttcaacaccctcttcatgaatgctgcctgggcttcatagcattcgcgtactccgtgaagtctagggacaggaagatggttggcgacgtgaccggggcccaggccctccaccgccaagtgcctgaacatctgggccctgattttgggcatcttcatgaccattctgctcatcatcatcccagtgttggtcgtccaggcccagcgatagatcaggaggcatcattgaggccaggagctctgcccgtgacctgtatcccacgtactctatcttccattcctcgccctgcccccagaggccaggagctctgcccttgacctgtattccacttactccaccttccattcctcgccctgtccccacagccgagtcctgcatcagccctttatcctcacacgcttttctacaatggcattcaataaagtgtatatgtttctggt

SEQ ID NO: 14599 - DNA, 659 bp, Homo sapiens
  source 1..659: mol_type = unassigned DNA
atcccggtaacccgatcaccgctggtcaccatgaaccacattgtgcaaaccttctctcctgtcaacagcggccagcctcccaactacgagatgctcaaggaggagcaggaagtggctatgctgggggtgccccacaaccctgctcccccgatgtccaccgtgatccacatccgcagcgagacctccgtgcctgaccatgtggtctggtccctgttcaacaccctcttcatgaacacctgctgcctgggcttcatagcattcgcgtactccgtgaagtctagggacaggaagatggttggcgacgtgaccggggcccaggcctatgcctccaccgccaagtgcctgaacatctgggccctgattttgggcatcttcatgaccattctgctcatcatcatcccagtgttggtcgtccaggcccagcgatagatcaggaggcatcattgaggccaggagctctgcccgtgacctgtatcccacgtactctatcttccattcctcgccctgcccccagaggccaggagctctgcccttgacctgtattccacttactccaccttccattcctcgccctgtccccacagccgagtcctgcatcagccctttatcctcacacgcttttctacaatggcattcaataaagtgtatatgtttctggt

SEQ ID NO: 14600 - DNA, 444 bp, Homo sapiens
  source 1..444: mol_type = unassigned DNA
ccccccaactatgagatgctcaaggaggagcacgaggtggctgtgctgggggcgccccacaaccctgctcccccgacgtccaccgtgatccacatccgcagcgagacctccgtgcccgaccatgtcgtcgtccctgttcaacaccctcttcatgaatgctgcctgggcttcatagcattcgcctactccgtgaagtctagggacaggaagatggttggcgacgtgaccggggcccaggccctccaccgccaagtgcctgaacatctgggccctgattctgggcatcctcatgaccattctgctcatcgtcatcccagtgctgatcttccaggcctatggatagatcaggaggcatcactgaggccaggagctctgcccatgacctgtatcccacgtactccaacttccattcctcgccctgcccccggagccgagtcctgtatc

SEQ ID NO: 14601 - DNA, 808 bp, Homo sapiens
  source 1..808: mol_type = unassigned DNA
tgctcccttgggctctagagaggaagcccctcttagccctcagcccctctttcctccctctcctaaagtaatttgatcctcaggaatttgttccgccctcatctggccccggccaaatcccgatttgacaaatgccaggaaaaggaaactgttgagaaaccgaaactactggggaaagggagggctcactgagaaccatcccagtaacccgaccgccgctggtcttcgctggacaccatgaatcacactgtccaaaccttcttctctcctgtcaacagtggccagccccccaactatgagatgctcaaggaggagcacgaggtggctgtgctgggggcgccccacaaccctgctcccccgacgtccaccgtgatccacatccgcagcgagacctccgtgcccgaccatgtcgtctggtccctgttcaacaccctcttcatgaacccctgctgcctgggcttcatagcattcgcctactccgtgaagtctagggacaggaagatggttggcgacgtgaccggggcccaggcctatgcctccaccgccaagtgcctgaacatctgggccctgattctgggcatcctcatgaccattctgctcatcgtcatcccagtgctgatcttccaggcctatggatagatcaggaggcatcactgaggccaggagctctgcccatgacctgtatcccacgtactccaacttccattcctcgccctgcccccggagccgagtcctgtatcagccctttatcctcacacgcttttctacaatggcattcaataaagtgcacgtgtttctggtgctgctg

SEQ ID NO: 14602 - DNA, 3595 bp, Homo sapiens
  source 1..3595: mol_type = unassigned DNA
aacagaaaccaaagtcaggcaaactctgtaagaactgcctgacagaaagctggactcaaagctcctacccgagtgtgcagcaggatcgccccggtccgggaccccaggcgcacaccgcagagtccaaagtgccgcgcctgccggccgcacctgcctgccgcggccccgcgcgccgccccgctgcccacctgcccgcctgcccacctgcccaggtgcgagtgcagccccgcgcgccggcctgagagccctgtggacaacctcgtcattgtcaggcacagagcggtagaccctgcttctctaagtgggcagcggacagcggcacgcacatttcacctgtcccgcagacaacagcaccatctgcttgggagaaccctctcccttctctgagaaagaaagatgtcgaatgggtattccacagacgagaatttccgctatctcatctcgtgcttcagggccagggtgaaaatgtacatccaggtggagcctgtgctggactacctgacctttctgcctgcagaggtgaaggagcagattcagaggacagtcgccacctccgggaacatgcaggcagttgaactgctgctgagcaccttggagaagggagtctggcaccttggttggactcgggaattcgtggaggccctccggagaaccggcagccctctggccgcccgctacatgaaccctgagctcacggacttgccctctccatcgtttgagaacgctcatgatgaatatctccaactgctgaacctccttcagcccactctggtggacaagcttctagttagagacgtcttggataagtgcatggaggaggaactgttgacaattgaagacagaaaccggattgctgctgcagaaaacaatggaaatgaatcaggtgtaagagagctactaaaaaggattgtgcagaaagaaaactggttctctgcatttctgaatgttcttcgtcaaacaggaaacaatgaacttgtccaagagttaacaggctctgattgctcagaaagcaatgcagagattgagaatttatcacaagttgatggtcctcaagtggaagagcaacttctttcaaccacagttcagccaaatctggagaaggaggtctggggcatggagaataactcatcagaatcatcttttgcagattcttctgtagtttcagaatcagacacaagtttggcagaaggaagtgtcagctgcttagatgaaagtcttggacataacagcaacatgggcagtgattcaggcaccatgggaagtgattcagatgaagagaatgtggcagcaagagcatccccggagccagaactccagctcaggccttaccaaatggaagttgcccagccagccttggaagggaagaatatcatcatctgcctccctacagggagtggaaaaaccagagtggctgtttacattgccaaggatcacttagacaagaagaaaaaagcatctgagcctggaaaagttatagttcttgtcaataaggtactgctagttgaacagctcttccgcaaggagttccaaccatttttgaagaaatggtatcgtgttattggattaagtggtgatacccaactgaaaatatcatttccagaagttgtcaagtcctgtgatattattatcagtacagctcaaatccttgaaaactccctcttaaacttggaaaatggagaagatgctggtgttcaattgtcagacttttccctcattatcattgatgaatgtcatcacaccaacaaagaagcagtgtataataacatcatgaggcattatttgatgcagaagttgaaaaacaatagactcaagaaagaaaacaaaccagtgattccccttcctcagatactgggactaacagcttcacctggtgttggaggggccacgaagcaagccaaagctgaagaacacattttaaaactatgtgccaatcttgatgcatttactattaaaactgttaaagaaaaccttgatcaactgaaaaaccaaatacaggagccatgcaagaagtttgccattgcagatgcaaccagagaagatccatttaaagagaaacttctagaaataatgacaaggattcaaacttattgtcaaatgagtccaatgtcagattttggaactcaaccctatgaacaatgggccattcaaatggaaaaaaaagctgcaaaagaaggaaatcgcaaagaacgtgtttgtgcagaacatttgaggaagtacaatgaggccctacaaattaatgacacaattcgaatgatagatgcgtatactcatcttgaaactttctataatgaagagaaagataagaagtttgcagtcatagaagatgatagtgatgagggtggtgatgatgagtattgtgatggtgatgaagatgaggatgatttaaagaaacctttgaaactggatgaaacagatagatttctcatgactttattttttgaaaacaataaaatgttgaaaaggctggctgaaaacccagaatatgaaaatgaaaagctgaccaaattaagaaataccataatggagcaatatactaggactgaggaatcagcacgaggaataatctttacaaaaacacgacagagtgcatatgcgctttcccagtggattactgaaaatgaaaaatttgctgaagtaggagtcaaagcccaccatctgattggagctggacacagcagtgagttcaaacccatgacacagaatgaacaaaaagaagtcattagtaaatttcgcactggaaaaataaatctgcttatcgctaccacagtggcagaagaaggtctggatattaaagaatgtaacattgttatccgttatggtctcgtcaccaatgaaatagccatggtccaggcccgtggtcgagccagagctgatgagagcacctacgtcctggttgctcacagtggttcaggagttatcgaacatgagacagttaatgatttccgagagaagatgatgtataaagctatacattgtgttcaaaatatgaaaccagaggagtatgctcataagattttggaattacagatgcaaagtataatggaaaagaaaatgaaaaccaagagaaatattgccaagcattacaagaataacccatcactaataactttcctttgcaaaaactgcagtgtgctagcctgttctggggaagatatccatgtaattgagaaaatgcatcacgtcaatatgaccccagaattcaaggaactttacattgtaagagaaaacaaagcactgcaaaagaagtgtgccgactatcaaataaatggtgaaatcatctgcaaatgtggccaggcttggggaacaatgatggtgcacaaaggcttagatttgccttgtctcaaaataaggaattttgtagtggttttcaaaaataattcaacaaagaaacaatacaaaaagtgggtagaattacctatcacatttcccaatcttgactattcagaatgctgtttatttagtgatgaggattagcacttgattgaagattcttttaaaatactatcagttaaacatttaatatgattatgattaatgtattcattatgctacagaactgacataagaatcaataaaatgattgttttactctgca

SEQ ID NO: 14603 - DNA, 1617 bp, Homo sapiens
  source 1..1617: mol_type = unassigned DNA
caaactctgtaagaactgcctgacagaaagctggactcaaagctcctacccgagtgtgcagcaggatcgccccggtccgggaccccaggcgcacaccgcagagtccaaagtgccgcgcctgccggccgcacctgcctgccgcggccccgcgcgccgccccgctgcccacctgcccgcctgcccacctgcccaggtgcgagtgcagccccgcgcgccggcctgagagccctgtggacaacctcgtcattgtcaggcacagagcggtagaccctgcttctctaagtgggcagcggacagcggcacgcacatttcacctgtcccgcagacaacagcaccatctgcttgggagaaccctctcccttctctgagaaagaaagatgtcgaatgggtattccacagacgagaatttccgctatctcatctcgtgcttcagggccagggtgaaaatgtacatccaggtggagcctgtgctggactacctgacctttctgcctgcagaggtgaaggagcagattcagaggacagtcgccacctccgggaacatgcaggcagttgaactgctgctgagcaccttggagaagggagtctggcaccttggttggactcgggaattcgtggaggccctccggagaaccggcagccctctggccgcccgctacatgaaccctgagctcacggacttgccctctccatcgtttgagaacgctcatgatgaatatctccaactgctgaacctccttcagcccactctggtggacaagcttctagttagagacgtcttggataagtgcatggaggaggaactgttgacaattgaagacagaaaccggattgctgctgcagaaaacaatggaaatgaatcaggtgtaagagagctactaaaaaggattgtgcagaaagaaaactggttctctgcatttctgaatgttcttcgtcaaacaggaaacaatgaacttgtccaagagttaacaggctctgattgctcagaaagcaatgcaggtatttgtaattttactgaggaagattcttcaaattctgcctagtgattgagaattcaataaagcagaaagacacaatgctaaacaccaagatttttagaatcaaaattttaagagtggaacatatgtgatagatcatctattttatcaccttaacaaatgaggaaattgatgcctgggaaaatatcaactgatcaaagaccatttttcatccaaccaacactctttctactaccttattttaaaaacaatatgactaccagaaattttatcaagattatgtaacattaaatatacacaaatacattggaagaaagtattttagtggttataaaaaatctgctgcatattcttctgaacatttttatacattttaagcaatgtattaagcatttgataaaaggattgttttgtcaatatatctcaaccttacctaatgtgagattttaaacagcattcaataatagtaataacataacattttatagctccttctcctacattatttgtaaatctcacttaaactgctatcttatttttcttttcgtagtatgcatcctatgtttccaaaaatatcatatgaaagacaaattgaaagttaactattaattaattataa

SEQ ID NO: 14604 - DNA, 3452 bp, Homo sapiens
  source 1..3452: mol_type = unassigned DNA
acagaaaccaaagtcaggcaaactctgtaagaactgcctgacagaaagctggactcaaagctcctacccgagtgtgcagcaggatcgccccggtccgggaccccaggcgcacaccgcagagtccaaagtgccgcgcctgccggccgcacctgcctgcctgagagccctgtggacaacctcgtcattgtcaggcacagagcggtagaccctgcttctctaagtgggcagcggacagcggcacgcacatttcacctgtcccgcagacaacagcaccatctgcttgggagaaccctctcccttctctgagaaagaaagatgtcgaatgggtattccacagacgagaatttccgctatctcatctcgtgcttcagggccagggtgaaaatgtacatccaggtggagcctgtgctggactacctgacctttctgcctgcagaggtgaaggagcagattcagaggacagtcgccacctccgggaacatgcaggcagttgaactgctgctgagcaccttggagaagggagtctggcaccttggttggactcgggaattcgtggaggccctccggagaaccggcagccctctggccgcccgctacatgaaccctgagctcacggacttgccctctccatcgtttgagaacgctcatgatgaatatctccaactgctgaacctccttcagcccactctggtggacaagcttctagttagagacgtcttggataagtgcatggaggaggaactgttgacaattgaagacagaaaccggattgctgctgcagaaaacaatggaaatgaatcaggtgtaagagagctactaaaaaggattgtgcagaaagaaaactggttctctgcatttctgaatgttcttcgtcaaacaggaaacaatgaacttgtccaagagttaacaggctctgattgctcagaaagcaatgcagagattgagaatttatcacaagttgatggtcctcaagtggaagagcaacttctttcaaccacagttcagccaaatctggagaaggaggtctggggcatggagaataactcatcagaatcatcttttgcagattcttctgtagtttcagaatcagacacaagtttggcagaaggaagtgtcagctgcttagatgaaagtcttggacataacagcaacatgggcagtgattcaggcaccatgggaagtgattcagatgaagagaatgtggcagcaagagcatccccggagccagaactccagctcaggccttaccaaatggaagttgcccagccagccttggaagggaagaatatcatcatctgcctccctacagggagtggaaaaaccagagtggctgtttacattgccaaggatcacttagacaagaagaaaaaagcatctgagcctggaaaagttatagttcttgtcaataaggtactgctagttgaacagctcttccgcaaggagttccaaccatttttgaagaaatggtatcgtgttattggattaagtggtgatacccaactgaaaatatcatttccagaagttgtcaagtcctgtgatattattatcagtacagctcaaatccttgaaaactccctcttaaacttggaaaatggagaagatgctggtgttcaattgtcagacttttccctcattatcattgatgaatgtcatcacaccaacaaagaagcagtgtataataacatcatgaggcattatttgatgcagaagttgaaaaacaatagactcaagaaagaaaacaaaccagtgattccccttcctcagatactgggactaacagcttcacctggtgttggaggggccacgaagcaagccaaagctgaagaacacattttaaaactatgtgccaatcttgatgcatttactattaaaactgttaaagaaaaccttgatcaactgaaaaaccaaatacaggagccatgcaagaagtttgccattgcagatgcaaccagagaagatccatttaaagagaaacttctagaaataatgacaaggattcaaacttattgtcaaatgagtccaatgtcagattttggaactcaaccctatgaacaatgggccattcaaatggaaaaaaaagctgcaaaagaaggaaatcgcaaagaacgtgtttgtgcagaacatttgaggaagtacaatgaggccctacaaattaatgacacaattcgaatgatagatgcgtatactcatcttgaaactttctataatgaagagaaagataagaagtttgcagtcatagaagatgatagtgatgagggtggtgatgatgagtattgtgatggtgatgaagatgaggatgatttaaagaaacctttgaaactggatgaaacagatagatttctcatgactttattttttgaaaacaataaaatgttgaaaaggctggctgaaaacccagaatatgaaaatgaaaagctgaccaaattaagaaataccataatggagcaatatactaggactgaggaatcagcacgaggaataatctttacaaaaacacgacagagtgcatatgcgctttcccagtggattactgaaaatgaaaaatttgctgaagtaggagtcaaagcccaccatctgattggagctggacacagcagtgagttcaaacccatgacacagaatgaacaaaaagaagtcattagtaaatttcgcactggaaaaataaatctgcttatcgctaccacagtggcagaagaaggtctggatattaaagaatgtaacattgttatccgttatggtctcgtcaccaatgaaatagccatggtccaggcccgtggtcgagccagagctgatgagagcacctacgtcctggttgctcacagtggttcaggagttatcgaacatgagacagttaatgatttccgagagaagatgatgtataaagctatacattgtgttcaaaatatgaaaccagaggagtatgctcataagattttggaattacagatgcaaagtataatggaaaagaaaatgaaaaccaagagaaatattgccaagcattacaagaataacccatcactaataactttcctttgcaaaaactgcagtgtgctagcctgttctggggaagatatccatgtaattgagaaaatgcatcacgtcaatatgaccccagaattcaaggaactttacattgtaagagaaaacaaagcactgcaaaagaagtgtgccgactatcaaataaatggtgaaatcatctgcaaatgtggccaggcttggggaacaatgatggtgcacaaaggcttagatttgccttgtctcaaaataaggaattttgtagtggttttcaaaaataattcaacaaagaaacaatacaaaaagtgggtagaattacctatcacatttcccaatcttgactattcagaatgctgtttatttagtgatgaggattagcacttgattgaagattcttttaaaatactatcagttaaacatttaatatgattatgatt

SEQ ID NO: 14605 - DNA, 2303 bp, Homo sapiens
  source 1..2303: mol_type = unassigned DNA
ggatttccagccgcggctcttcgcagtttcctctccttgttttgctttcgatctggactgttctcaggcaagccggggagtaacttttagttttgctcctgcgattattcaactgacgggctttcatttccatttcacataccctagcaacacttataccttgcggaattgtattggtagcgtgaaaaaagcacactgagagggcaccatgccggtggaaaggatgcgcatgcgcccgtggctggaggagcagataaactccaacacgatcccggggctcaagtggcttaacaaggaaaagaagatttttcagatcccctggatgcatgcggctagacatgggtgggatgtggaaaaagatgcaccactctttagaaactgggcaatccatacaggaaagcatcaaccaggagtagataaacctgatcccaaaacatggaaggcgaatttcagatgcgccatgaattccttgcctgatattgaagaagtcaaggataaaagcataaagaaaggaaataatgccttcagggtctaccgaatgctgcccctatcagaacggccttctaagaaaggaaagaaaccaaagacagaaaaagaagacaaagttaagcacatcaagcaagaaccagttgagtcatctctggggcttagtaatggagtaagtgatctttctcctgagtatgcggtcctgacttcaactataaaaaatgaagtggatagtacggtgaacatcatagttgtaggacagtcccatctggacagcaacattgagaatcaagagattgtcaccaatccgccagacatttgccaagttgtagaggtgaccactgagagcgacgagcagccggtcagcatgagcgagctctaccctctgcagatctcccccgtgtcttcctatgcagaaagcgaaacgactgatagtgtgcccagcgatgaagagagtgccgaggggcggccacactggcggaagaggaatattgaaggcaaacagtacctcagcaacatggggactcgaggctcctacctgctgcccggcatggcgtccttcgtcacttccaacaaaccggacctccaggtcaccatcaaagaggagagcaatccggtgccttacaacagctcctggcccccttttcaagacctccccctttcttcctccatgaccccagcatccagcagcagtcggccagaccgggagacccgggccagcgtcatcaagaaaacatcggatatcacccaggcccgcgtcaagagctgttaagcctctgactctccgcggtggttgttggggcttcttggctttgttttgttgtttgtttgtattttatttttttctctctgacacctattttagacaaatctaagggaaaaagccttgacaatagaacattgattgctgtgtccaactccagtactggagcttctctttaactcaggactccagcccattggtagacgtgtgtttctagagcctgctggatctcccagggctactcactcaagttcaaggaccaacaagggcagtggaggtgctgcattgcctgcggtcaaggccagcaaggtggagtggatgcctcagaacggacgagataatgtgaactagctggaattttttattcttgtgaatatgtacataggcagcactagcgacattgcagtctgcttctgcaccttatcttaaagcacttacagataggccttcttgtgatcttgctctatctcacagcacactcagcacccccttctctgcccattccccagcctctcttcctatcccatcccatcccatcccatcccatcccatcccatcccgctcttttcctacttttccttccctcaaagcttccattccacatccggaggagaagaaggaaatgaatttctctacagatgtcccattttcagactgctttaaaaaaaatccttctaatctgctatgcttgaatgccacgcggtacaaaggaaaaagtatcatggaaatattatgcaaattcccagatttgaagacaaaaatactctaattctaaccagagcaagcttttttattttttatacaggggaatattttattcaaggtaaaattctaaataaaatataattgttttttatcttttctacagcaaatttataattttaagattccttttcttgtttatcagcagttgttattacatccttgtggcacatttttttttttaattttgtaaaggtgaaaaaagcttttatgagctcatgtagcaatcagattttcctgtggattgataataaatgaatatgatatatagttaaatttttaaggggcatca

SEQ ID NO: 14606 - DNA, 665 bp, Homo sapiens
  source 1..665: mol_type = unassigned DNA
ctctccttgttttgctttcgatctggactgttctcaggcaagccggggagtaacttttagttttgctcctgcgattattcaactgacgggctttcatttccatttcacataccctagcaacacttataccttgcggaattgtattggtagcgtgaaaaaagcacactgagaggggcaaaacacaccttttgaggtctgtggagctcaaaaatgaagtcaaaggtgactgggtgacacaaacagctcagggcaccatgccggtggaaaggatgcgcatgcgcccgtggctggaggagcagataaactccaacacgatcccggggctcaagtggcttaacaaggaaaagaagatttttcagatcccctggatgcatgcggctagacatgggtgggatgtggaaaaagatgcaccactctttagaaactgggcaatccatacaggaaagcatcaaccaggagtagataaacctgatcccaaaacatggaaggcgaatttcagatgcgccatgaattccttgcctgatattgaagaagtcaaggataaaagcataaagaaaggaaataatgccttcagggtctaccgaatgctgcccctatcagaacggccttctaagaaaggaaagaaaccaaagacagaaaaagaagacaaagttaagcacatcaag

SEQ ID NO: 14607 - DNA, 498 bp, Homo sapiens
  source 1..498: mol_type = unassigned DNA
gattttaggggaagcaggttctgctgctgttgctgctgctactggggctgctgaggctgcgaggaggaggaggaggaggagggcaccatgccggtggaaaggatgcgcatgcgcccgtggctggaggagcagataaactccaacacgatcccggggctcaagtggcttaacaaggaaaagaagatttttcagatcccctggatgcatgcggctagacatgggtgggatgtggaaaaagatgcaccactctttagaaactgggcaatccatacaggaaagcatcaaccaggagtagataaacctgatcccaaaacatggaaggcgaatttcagatgcgccatgaattccttgcctgatattgaagaagtcaaggataaaagcataaagaaaggaaataatgccttcagggtctaccgaatgctgcccctatcagaacggccttctaagaaaggaaagaaaccaaagacagaaaaagaagacaaagttaagcacatcaag

SEQ ID NO: 14608 - DNA, 595 bp, Homo sapiens
  source 1..595: mol_type = unassigned DNA
gcagatgcggagaggtggctccatggacacagacctgctgtgtgtgcttctgcgccccagggcaccatgccggtggaaaggatgcgcatgcgcccgtggctggaggagcagataaactccaacacgatcccggggctcaagtggcttaacaaggaaaagaagatttttcagatcccctggatgcatgcggctagacatgggtgggatgtggaaaaagatgcaccactctttagaaactgggcaatccatacaggaaagcatcaaccaggagtagataaacctgatcccaaaacatggaaggcgaatttcagatgcgccatgaattccttgcctgatattgaagaagtcaaggataaaagcataaagaaaggaaataatgccttcagggtctaccgaatgctgcccctatcagaacggccttctaagaaaggaaagaaaccaaagacagaaaaagaagacaaagttaagcacatcaagcaagaaccagttgagtcatctctggggcttagtaatggagtaagtgatctttctcctgagtatgcggtcctgacttcaactataaaaaatgaagtggatagtacggtgaacatcatag

SEQ ID NO: 14609 - DNA, 568 bp, Homo sapiens
  source 1..568: mol_type = unassigned DNA
cagatgcggagaggtggctccatggacacagacctgctgtgtgtgcttctgcgccccaggtgttgtgtgtgggggtgcagggcaccatgccggtggaaaggatgcgcatgcgcccgtggctggaggagcagataaactccaacacgatcccggggctcaagtggcttaacaaggaaaagaagatttttcagatcccctggatgcatgcggctagacatgggtgggatgtggaaaaagatgcaccactctttagaaactgggcaatccatacaggaaagcatcaaccaggagtagataaacctgatcccaaaacatggaaggcgaatttcagatgcgccatgaattccttgcctgatattgaagaagtcaaggataaaagcataaagaaaggaaataatgccttcagggtctaccgaatgctgcccctatcagaacggccttctaagaaaggaaagaaaccaaagacagaaaaagaagacaaagttaagcacatcaagcaagaaccagttgagtcatctctggggcttagtaatggagtaagtgatctttctcctgagtatgcggtcct

SEQ ID NO: 14610 - DNA, 1690 bp, Homo sapiens
  source 1..1690: mol_type = unassigned DNA
gctaccctgaaagtggggatacttactttcgatgatgtgggggagggaggaggtctatactggcggaattgagggagtggagggtctgcactgaagacgctggggaaggatgtgccatggatatgggaaggaaccctagctgattagagagcctctcgggaggatgggaggatgggaagaggaggtttcctgtttgtacccccgaaaatatgggtgaaggacctgtgccgtggcccgtgagaaggaggtctgggtgcggaaactccaggccaggtgggtccgggggaggccggtcgcgcccaggaaatgccctatacgcgcaggccggaccatgggaaccccaaagccacggatcctgccctggctggtgtcgcagctggacctggggcaactggagggcgtggcctgggtgaacaagagccgcacgcgcttccgcatcccttggaagcacggcctacggcaggatgcacagcaggaggatttcggaatcttccaggcctgggccgaggccactggtgcatatgttcccgggagggataagccagacctgccaacctggaagaggaatttccgctctgccctcaaccgcaaagaagggttgcgtttagcagaggaccggagcaaggaccctcacgacccacataaaatctacgagtttgtgaactcaggagttggggacttttcccagccagacacctctccggacaccaatggtggaggcagtacttctgatacccaggaagacattctggatgagttactgggtaacatggtgttggccccactcccagatccgggacccccaagcctggctgtagcccctgagccctgccctcagcccctgcggagccccagcttggacaatcccactcccttcccaaacctggggccctctgagaacccactgaagcggctgttggtgccgggggaagagtgggagttcgaggtgacagccttctaccggggccgccaagtcttccagcagaccatctcctgcccggagggcctgcggctggtggggtccgaagtgggagacaggacgctgcctggatggccagtcacactgccagaccctggcatgtccctgacagacaggggagtgatgagctacgtgaggcatgtgctgagctgcctgggtgggggactggctctctggcgggccgggcagtggctctgggcccagcggctggggcactgccacacatactgggcagtgagcgaggagctgctccccaacagcgggcatgggcctgatggcgaggtccccaaggacaaggaaggaggcgtgtttgacctggggcccttcattgtagatctgattaccttcacggaaggaagcggacgctcaccacgctatgccctctggttctgtgtgggggagtcatggccccaggaccagccgtggaccaagaggctcgtgatggtcaaggttgtgcccacgtgcctcagggccttggtagaaatggcccgggtagggggtgcctcctccctggagaatactgtggacctgcacatttccaacagccacccactctccctcacctccgaccagtacaaggcctacctgcaggacttggtggagggcatggatttccagggccctggggagagctgagccctcgctcctcatggtgtgcctccaacccccctgttccccaccacctcaaccaataaactggttcctgctatg

SEQ ID NO: 14611 - DNA, 903 bp, Homo sapiens
  source 1..903: mol_type = unassigned DNA
atgggaaccccaaagccacggatcctgccctggctggtgtcgcagctggacctggggcaactggagggcgtggcctgggtgaacaagagccgcacgcgcttccgcatcccttggaagcacggcctacggcaggatgcacagcaggaggatttcggaatcttccaggcctgggccgaggccactggtgcatatgttcccgggagggataagccagacctgccaacctggaagaggaatttccgctctgccctcaaccgcaaagaagggttgcgtttagcagaggaccggagcaaggaccctcacgacccacataaaatctacgagtttgtgaactcaggagttggggacttttcccagccagacacctctccggacaccaatggtggaggcagtacttctgatacccaggaagacattctggatgagttactgggtaacatggtgttggccccactcccagatccgggacccccaagcctggctgtagcccctgagccctgccctcagcccctgcggagccccagcttggacaatcccactcccttcccaaacctggggccctctgagaacccactgaagcggctgttggtgccgggggaagatctgattaccttcacggaaggaagcggacgctcaccacgctatgccctctggttctgtgtgggggagtcatggccccaggaccagccgtggaccaagaggctcgtgatggtcaaggttgtgcccacgtgcctcagggccttggtagaaatggcccgggtagggggtgcctcctccctggagaatactgtggacctgcacatttccaacagccacccactctccctcacctccgaccagtacaaggcctacctgcaggacttggtggagggcatggatttccagggccctggggagagctga

SEQ ID NO: 14612 - DNA, 1613 bp, Homo sapiens
  source 1..1613: mol_type = unassigned DNA
ggaaacccaaaaaagggcataggggcgggaacagcccagcgggccgtcccatcggcttttgggtctgttacccaaagaatgataaagttggttttatttcaagaagtcgatcaaaaagaaagccccagcgctctagagctcagctgacgggaaagggggtgcgcagcctcgagtttgagagctacccggagctccaagacaggggtgggttccagctgcccgcacgccccgaccttccatcgtaggccggaccatgggaaccccaaagccacggatcctgccctggctggtgtcgcagctggacctggggcaactggagggcgtggcctgggtgaacaagagccgcacgcgcttccgcatcccttggaagcacggcctacggcaggatgcacagcaggaggatttcggaatcttccaggcctgggccgaggccactggtgcatatgttcccgggagggataagccagacctgccaacctggaagaggaatttccgctctgccctcaaccgcaaagaagggttgcgtttagcagaggaccggagcaaggaccctcacgacccacataaaatctacgagtttgtgaactcaggagttggggacttttcccagccagacacctctccggacaccaatggtggaggcagtacttctgatacccaggaagacattctggatgagttactgggtaacatggtgttggccccactcccagatccgggacccccaagcctggctgtagcccctgagccctgccctcagcccctgcggagccccagcttggacaatcccactcccttcccaaacctggggccctctgagaacccactgaagcggctgttggtgccgggggaagagtgggagttcgaggtgacagccttctaccggggccgccaagtcttccagcagaccatctcctgcccggagggcctgcggctggtggggtccgaagtgggagacaggacgctgcctggatggccagtcacactgccagaccctggcatgtccctgacagacaggggagtgatgagctacgtgaggcatgtgctgagctgcctgggtgggggactggctctctggcgggccgggcagtggctctgggcccagcggctggggcactgccacacatactgggcagtgagcgaggagctgctccccaacagcgggcatgggcctgatggcgaggtccccaaggacaaggaaggaggcgtgtttgacctggggcccttcattgtagatctgattaccttcacggaaggaagcggacgctcaccacgctatgccctctggttctgtgtgggggagtcatggccccaggaccagccgtggaccaagaggctcgtgatggtcaaggttgtgcccacgtgcctcagggccttggtagaaatggcccgggtagggggtgcctcctccctggagaatactgtggacctgcacatttccaacagccacccactctccctcacctccgaccagtacaaggcctacctgcaggacttggtggagggcatggatttccagggccctggggagagctgagccctcgctcctcatggtgtgcctccaacccccctgttccccaccacctcaaccaataaactggttcctgctatga

SEQ ID NO: 14613 - DNA, 315 bp, Homo sapiens
  source 1..315: mol_type = unassigned DNA
atgggaaccccaaagccacggatcctgccctggctggtgtcgcagctggacctggggcaactggagggcgtggcctgggtgaacaagagccgcacgcgcttccgcatcccttggaagcacggcctacggcaggatgcacagcaggaggatttcggaatcttccaggagttggggacttttcccagccagacacctctccggacaccaatggtggaggcagtacttctgatacccaggaagacattctggatgagttactgggtaacatggtgttggccccactcccagatccgggacccccaagcctggctgtag

SEQ ID NO: 14614 - DNA, 1494 bp, Homo sapiens
  source 1..1494: mol_type = unassigned DNA
gagtttgagagctacccggagctccaagacaggggtgggttccagctgcccgcacgccccgaccttccatcgtaggtgcgtgcgacgacctgggacgctggaaacccggagctgcgcgctgggcggaaaggactcctagtgggcccggctgagaaggcggaggtggcgcgcgaggggcgggctcgtgccaacgctggtgggtggggctagaacgggaggggcggggctagccggatccgctgactgatggtggggcgcaagcagggttggagctgcagggttacgggaataaaaccgggaaagccggcctgggccgaggccactggtgcatatgttcccgggagggataagccagacctgccaacctggaagaggaatttccgctctgccctcaaccgcaaagaagggttgcgtttagcagaggaccggagcaaggaccctcacgacccacataaaatctacgagtttgtgaactcaggagttggggacttttcccagccagacacctctccggacaccaatggtggaggcagtacttctgatacccaggaagacattctggatgagttactgggtaacatggtgttggccccactcccagatccgggacccccaagcctggctgtagcccctgagccctgccctcagcccctgcggagccccagcttggacaatcccactcccttcccaaacctggggccctctgagaacccactgaagcggctgttggtgccgggggaagagtgggagttcgaggtgacagccttctaccggggccgccaagtcttccagcagaccatctcctgcccggagggcctgcggctggtggggtccgaagtgggagacaggacgctgcctggatggccagtcacactgccagaccctggcatgtccctgacagacaggggagtgatgagctacgtgaggcatgtgctgagctgcctgggtgggggactggctctctggcgggccgggcagtggctctgggcccagcggctggggcactgccacacatactgggcagtgagcgaggagctgctccccaacagcgggcatgggcctgatggcgaggtccccaaggacaaggaaggaggcgtgtttgacctggggcccttcattgtagatctgattaccttcacggaaggaagcggacgctcaccacgctatgccctctggttctgtgtgggggagtcatggccccaggaccagccgtggaccaagaggctcgtgatggtcaaggttgtgcccacgtgcctcagggccttggtagaaatggcccgggtagggggtgcctcctccctggagaatactgtggacctgcacatttccaacagccacccactctccctcacctccgaccagtacaaggcctacctgcaggacttggtggagggcatggatttccagggccctggggagagctgagccctcgctcctcatggtgtgcctccaacccccctgttccccaccacctcaaccaataaactggttcct

SEQ ID NO: 14615 - DNA, 710 bp, Homo sapiens
  source 1..710: mol_type = unassigned DNA
gagtttgagagctacccggagctccaagacaggggtgggttccagctgcccgcacgccccgaccttccatcgtaggagttggggacttttcccagccagacacctctccggacaccaatggtggaggcagtacttctgatacccaggaagacattctggatgagttactgggtaacatggtgttggccccactcccagatccgggacccccaagcctggctgtagcccctgagccctgccctcagcccctgcggagccccagcttggacaatcccactcccttcccaaacctggggccctctgagaacccactgaagcggctgttggtgccgggggaagatctgattaccttcacggaaggaagcggacgctcaccacgctatgccctctggttctgtgtgggggagtcatggccccaggaccagccgtggaccaagaggctcgtgatggtcaaggttgtgcccacgtgcctcagggccttggtagaaatggcccgggtagggggtgcctcctccctggagaatactgtggacctgcacatttccaacagccacccactctccctcacctccgaccagtacaaggcctacctgcaggacttggtggagggcatggatttccagggccctggggagagctgagccctcgctcctcatggtgtgcctccaacccccctgttccccaccacctcaaccaataaactggttcct

SEQ ID NO: 14616 - DNA, 1117 bp, Homo sapiens
  source 1..1117: mol_type = unassigned DNA
tgacgggaaagggggtgcgcagcctcgagtttgagagctacccggagctccaagacaggggtgggttccagctgcccgcacgccccgaccttccatcgtaggagttggggacttttcccagccagacacctctccggacaccaatggtggaggcagtacttctgatacccaggaagacattctggatgagttactgggtaacatggtgttggccccactcccagatccgggacccccaagcctggctgtagcccctgagccctgccctcagcccctgcggagccccagcttggacaatcccactcccttcccaaacctggggccctctgagaacccactgaagcggctgttggtgccgggggaagagtgggagttcgaggtgacagccttctaccggggccgccaagtcttccagcagaccatctcctgcccggagggcctgcggctggtggggtccgaagtgggagacaggacgctgcctggatggccagtcacactgccagaccctggcatgtccctgacagacaggggagtgatgagctacgtgaggcatgtgctgagctgcctgggtgggggactggctctctggcgggccgggcagtggctctgggcccagcggctggggcactgccacacatactgggcagtgagcgaggagctgctccccaacagcgggcatgggcctgatggcgaggtccccaaggacaaggaaggaggcgtgtttgacctggggcccttcattgtagatctgattaccttcacggaaggaagcggacgctcaccacgctatgccctctggttctgtgtgggggagtcatggccccaggaccagccgtggaccaagaggctcgtgatggtcaaggttgtgcccacgtgcctcagggccttggtagaaatggcccgggtagggggtgcctcctccctggagaatactgtggacctgcacatttccaacagccacccactctccctcacctccgaccagtacaaggcctacctgcaggacttggtggagggcatggatttccagggccctggggagagctgagccctcgctcctcatggtgtgcctccaacccccctgttccccaccacctcaaccaataaactggttcct

SEQ ID NO: 14617 - DNA, 1055 bp, Homo sapiens
  source 1..1055: mol_type = unassigned DNA
gagtttgagagctacccggagctccaagacaggggtgggttccagctgcccgcacgccccgaccttccatcgtaggccggaccatgggaaccccaaagccacggatcctgccctggctggtgtcgcagctggacctggggcaactggagggcgtggcctgggtgaacaagagccgcacgcgcttccgcatcccttggaagcacggcctacggcaggatgcacagcaggaggatttcggaatcttccaggcctgggccgaggccactggtgcatatgttcccgggagggataagccagacctgccaacctggaagaggaatttccgctctgccctcaaccgcaaagaagggttgcgtttagcagaggaccggagcaaggaccctcacgacccacataaaatctacgagtttgtgaactcaggagttggggacttttcccagccagacacctctccggacaccaatggtggaggcagtacttctgatacccaggaagacattctggatgagttactgggtaacatggtgttggccccactcccagatccgggacccccaagcctggctgtagcccctgagccctgccctcagcccctgcggagccccagcttggacaatcccactcccttcccaaacctggggccctctgagaacccactgaagcggctgttggtgccgggggaagatctgattaccttcacggaaggaagcggacgctcaccacgctatgccctctggttctgtgtgggggagtcatggccccaggaccagccgtggaccaagaggctcgtgatggtcaaggttgtgcccacgtgcctcagggccttggtagaaatggcccgggtagggggtgcctcctccctggagaatactgtggacctgcacatttccaacagccacccactctccctcacctccgaccagtacaaggcctacctgcaggacttggtggagggcatggatttccagggccctggggagagctgagccctcgctcctcatggtgtgcctccaacccccctgttccccaccacctcaaccaataaactggttcct

SEQ ID NO: 14618 - DNA, 882 bp, Homo sapiens
  source 1..882: mol_type = unassigned DNA
gagtttgagagctacccggagctccaagacaggggtgggttccagctgcccgcacgccccgaccttccatcgtaggcctgggccgaggccactggtgcatatgttcccgggagggataagccagacctgccaacctggaagaggaatttccgctctgccctcaaccgcaaagaagggttgcgtttagcagaggaccggagcaaggaccctcacgacccacataaaatctacgagtttgtgaactcaggagttggggacttttcccagccagacacctctccggacaccaatggtggaggcagtacttctgatacccaggaagacattctggatgagttactgggtaacatggtgttggccccactcccagatccgggacccccaagcctggctgtagcccctgagccctgccctcagcccctgcggagccccagcttggacaatcccactcccttcccaaacctggggccctctgagaacccactgaagcggctgttggtgccgggggaagatctgattaccttcacggaaggaagcggacgctcaccacgctatgccctctggttctgtgtgggggagtcatggccccaggaccagccgtggaccaagaggctcgtgatggtcaaggttgtgcccacgtgcctcagggccttggtagaaatggcccgggtagggggtgcctcctccctggagaatactgtggacctgcacatttccaacagccacccactctccctcacctccgaccagtacaaggcctacctgcaggacttggtggagggcatggatttccagggccctggggagagctgagccctcgctcctcatggtgtgcctccaacccccctgttccccaccacctcaaccaataaactggttcct

SEQ ID NO: 14619 - DNA, 4306 bp, Homo sapiens
  source 1..4306: mol_type = unassigned DNA
cttggctaagacgtcgaggagcgtggtagcgacgggtgatcttcgctgcggacttggttcggagggacgtccgcttctggtggacagattgagcaaagaatctttgagcggtcaagggaaagacaagccgactcttcagatccctgtggacacactgcctgctcttccatatcatggccctccacccccgcagagtccggctaaagccctggctggtggcccaggtggatagtggcctctaccctgggctcatctggctacacagggactctaaacgcttccagattccctggaaacatgccacccggcatagccctcaacaagaagaggaaaataccatttttaaggcctgggctgtagagacagggaagtaccaggaaggggtggatgaccctgacccagctaaatggaaggcccagctgcgctgtgctctcaataagagcagagaattcaacctgatgtatgatggcaccaaggaggtgcccatgaacccagtgaagatatatcaagtgtgtgacatccctcagccccagggctcgatcattaacccaggatccacagggtctgctccctgggatgagaaggataatgatgtggatgaagaagatgaggaagatgagctggatcagtcgcagcaccatgttcccatccaggacaccttccccttcctgaacatcaatggttctcccatggcgccagccagtgtgggcaattgcagtgtgggcaactgcagcccggaggcagtgtggcccaaaactgaacccctggagatggaagtaccccaggcacctatacagcccttctatagctctccagaactgtggatcagctctctcccaatgactgacctggacatcaagtttcagtaccgtgggaaggagtacgggcagaccatgaccgtgagcaaccctcagggctgccgactcttctatggggacctgggtcccatgcctgaccaggaggagctctttggtcccgtcagcctggagcaggtcaaattcccaggtcctgagcatattaccaatgagaagcagaagctgttcactagcaagctgctggacgtcatggacagaggactgatcctggaggtcagcggtcatgccatttatgccatcaggctgtgccagtgcaaggtgtactggtctgggccatgtgccccatcacttgttgctcccaacctgattgagagacaaaagaaggtcaagctattttgtctggaaacattccttagcgatctcattgcccaccagaaaggacagatagagaagcagccaccgtttgagatctacttatgctttggggaagaatggccagatgggaaaccattggaaaggaaactcatcttggttcaggtcattccagtagtggctcggatgatctacgagatgttttctggtgatttcacacgatcctttgatagtggcagtgtccgcctgcagatctcaaccccagacatcaaggataacatcgttgctcagctgaagcagctgtaccgcatccttcaaacccaggagagctggcagcccatgcagcccacccccagcatgcaactgccccctgccctgcctccccagtaattgtgaatgccatcttcttccttctcttttttataatattgtacatatggatttttttattgtttagatttaaccagcttttaaatctctcttttctctaacagtgttagaagtttgtgattctccaaatatgcctagatttaaagctgatttaatttatggaaaaatcacccttcagactttgcttttctttttcaaatctcctaatggtagtatgatatagcatagtagaaggagatttggcctgggagtttggacaccaaagttctagctgcagctttgcttccaatgtgaccttgaacaagtcctttaacctctgggcttcagatttattgcttataaagtgaagagattggagtagtgcctgaaattgcatccagctttagaacggactcaatgaccttcttctacttgtacaaggctaaactgcctggaacagaatccttctgcattgttcttgtaccacatttttccttggttttgttaaagtttcctcaagcactgatttgtccaggatcgagctctgtttgacctgttctgctagtatagtaagctggctccctgatgggggaagtgagagggagaggagctggctggctggttgcttagaaactatgcttgatatctaaatagaaatgggtgccaaagtctgaaagtcacccagcctgtggagtgaaagctcacaaatttggcttctaaagggaagctgttgacacagaaagcctagggattctgtggaagaataggttgtcaggcatttaccttattaccactcaaataccagtgtgtgtgtgttgggggggcggcagggagagggggtaggtgacagtatgtgactcaggtgttagctttaagaggaaagagctctatttttcttgttttcttctctgagctagactgagctggggatctaagatgtacttctctgactacaaaagggacagtatcatttagattttttgcagttggaagaaatgggttgttgagtgtgttaaggctgggatgaagaagggctgggcagtactcttctggaaaggctcacctagcacgaacctgcttgtctcccttactagtggaggtatctgagtgtgaacagtgaaggtaaagagtggtatagaacaatgcagctgtatctgtcacaaactggtcttatctagaaacatctgctgagtctctaaccctttcagctttctcttcttttttgagacagagtcttgctttgttgcccaggctggagtgcagtggcaagtcaccacttactgcagctttaagctcctgggctcaagcaatcgtcctgccccagcctcctgagtagttgggacaacagtcgtgcactatgatgcttggctaattttttttttatttttgtagagatgaggtcttgctatgttgcccaggctggtcttgaactcctgggctcaagcaatctgggacctaaatggcaaataagatgctaatctgtggttgcaagccccagtcctcttgaatagtgatgcctatctgtctgtgtcgggacatagtaaggaagcccatgtctagtctggtacctttaaaccaggccatctccaacttttcaaaatgactcaaaagttgagctagccttattttaaaaactaaaagttcaaaatcagtggtgacatgaggacttatttatttaaagtgcttaagccttggttttagagtttctaagagacctagtggaatttgctattatgaaaagcatgaaaagattaagaaacctggctaaaggtcaggtgcccagcttcgaggaaaagttgggcttttagggaccgggaagcattaaaggcacagaaactttacattttgggggtcattttgttgagtaggtgaagtgagggatttgggcttgatatttggctgccccatctctacgtgggaactcaaagttaaaaacccactgtaggtaaattagaagggcagctcttgaatctgggccagtctatatcccttctgtgaagtgctaacagccaggctatctgtagcctgggtgggagcccagataatgtgagctggtaaagggtattggaaaagtgccaagaaatgccaagcttttggttcgtaaccactataaaaagtttatgaacatgtcagaggaatggatgagtgatttgtgaggtcttaactagataccccggtttcttccttgttttggcttcttttcagaatgccgggagagtacatgcagggattccatctaatcaccctcagcactctttctctggtcctgctggatagatttagatttcctttctttttttagggcctcagtctgctatctcctttggtggctaccaccactcactcccttgatatcttctactcccttgccttcaccttgcttaagactgagaagggagttagattttgtcactagctcttctttttcctcactgtgtaccccaccaaacaagattagttcaagttaaaaagaacctactggaggtaaactgggagagcaagtgttggatctgggctggtccctttcccataaaattaggtccctggttgtatgttcccatagcaccccatacttcctctctcagaataatcatttcccttgtaatgctcagcatccgcatcctgcttgactgcaaacttgctgaaggtagggactgtttgtcttggacttcgctgccagtccttagaacagtgtctgggacacagtgtgttctcaaatatttgttgctggaataaatgaatgaactaaa

SEQ ID NO: 14620 - DNA, 1027 bp, Homo sapiens
  source 1..1027: mol_type = unassigned DNA
ctttaccagactcagtagtggagacgtgttctcagcctttgtcgccagtgttcccaagccttctcccagacactggattgttgtatggatagccagctgagacccctccttttctccatacagaatctttgagcggtcaagggaaagacaagccgactcttcagatccctgtggacacactgcctgctcttccatatcatggccctccacccccgcagagtccggctaaagccctggctggtggcccaggtggatagtggcctctaccctgggctcatctggctacacagggactctaaacgcttccagattccctggaaacatgccacccggcatagccctcaacaagaagaggaaaataccatttttaaggcctgggctgtagagacagggaagtaccaggaaggggtggatgaccctgacccagctaaatggaaggcccagctgcgctgtgctctcaataagagcagagaattcaacctgatgtatgatggcaccaaggaggtgcccatgaacccagtgaagatatatcaagtgtgtgacatccctcagccccagggctcgatcattaacccaggatccacagggtctgctccctgggatgagaaggataatgatgtggatgaagaagatgaggaagatgagctggatcagtcgcagcaccatgttcccatccaggacaccttccccttcctgaacatcaatggttctcccatggcgccagccagtgtgggcaattgcagtgtgggcaactgcagcccggaggcagtgtggcccaaaactgaacccctggagatggaagtaccccaggcacctatacagcccttctatagctctccagaactgtggatcagctctctcccaatgactgacctggacatcaagtttcagtaccgtgggaaggagtacgggcagaccatgaccgtgagcaaccctcagggctgccgactcttctatggggacctgggtcccatgcctgaccaggaggagctctttggtcccgtcagcctggagcaggtcaaattcc

SEQ ID NO: 14621 - DNA, 1472 bp, Homo sapiens
  source 1..1472: mol_type = unassigned DNA
tgggctgggcaggtaagggctggtgcgggacggggagaggaacctgcagtccctacttgggtagagccaggcgccccttggctaagacgtcgaggagcgtggtagcgacgggtgatcttcgctgcggacttggttcggagggacgtccgcttctggtggacagattgagcaaaggcctgggctgtagagacagggaagtaccaggaaggggtggatgaccctgacccagctaaatggaaggcccagctgcgctgtgctctcaataagagcagagaattcaacctgatgtatgatggcaccaaggaggtgcccatgaacccagtgaagatatatcaagtgtgtgacatccctcagccccagggctcgatcattaacccaggatccacagggtctgctccctgggatgagaaggataatgatgtggatgaagaagatgaggaagatgagctggatcagtcgcagcaccatgttcccatccaggacaccttccccttcctgaacatcaatggttctcccatggcgccagccagtgtgggcaattgcagtgtgggcaactgcagcccggaggcagtgtggcccaaaactgaacccctggagatggaagtaccccaggcacctatacagcccttctatagctctccagaactgtggatcagctctctcccaatgactgacctggacatcaagtttcagtaccgtgggaaggagtacgggcagaccatgaccgtgagcaaccctcagggctgccgactcttctatggggacctgggtcccatgcctgaccaggaggagctctttggtcccgtcagcctggagcaggtcaaattcccaggtcctgagcatattaccaatgagaagcagaagctgttcactagcaagctgctggacgtcatggacagaggactgatcctggaggtcagcggtcatgccatttatgccatcaggctgtgccagtgcaaggtgtactggtctgggccatgtgccccatcacttgttgctcccaacctgattgagagacaaaagaaggtcaagctattttgtctggaaacattccttagcgatctcattgcccaccagaaaggacagatagagaagcagccaccgtttgagatctacttatgctttggggaagaatggccagatgggaaaccattggaaaggaaactcatcttggttcaggtcattccagtagtggctcggatgatctacgagatgttttctggtgatttcacacgatcctttgatagtggcagtgtccgcctgcagatctcaaccccagacatcaaggataacatcgttgctcagctgaagcagctgtaccgcatccttcaaacccaggagagctggcagcccatgcagcccacccccagcatgcaactgccccctgccctgcctccccagtaattgtgaatgccatcttcttccttctcttttttataatattgtacatatggatttttttattgtttaga

SEQ ID NO: 14622 - DNA, 3012 bp, Homo sapiens
  source 1..3012: mol_type = unassigned DNA
agtggctcgctcgggagccgccgcactcccggggctgtccgcccgagccggcctggaaggcggaggacgcctccaggtcgctccgcggggcctccggaattcctgggaaagcccccctgcagcgccgcccctggaccccaggtgtgaggagcggggctcggccagcggctccagaagaggcccggaccccactgccgtggctgccgggggcgggaaagtgatttctcggaaagcagagcacttcgaagaaggcgggccgcgcgagccaagctgacgctattggtcggtgtggccgtcgctctgcgcaccgcccgtcccccccacgaccctttttaaggccgcgcgaccgctggcgcatcgcctggagcgcggcagcaagcgtgggaacgcgggcggcgagacggcggcaggacggcggcaggatgtgtgaccggaatggtggtcggcggcttcgacagtggctgatcgagcagattgacagtagcatgtatccaggactgatttgggagaatgaggagaagagcatgttccggatcccttggaaacacgctggcaagcaagattataatcaggaagtggatgcctccatttttaaggcctgggcagtttttaaagggaagtttaaagaaggggacaaagctgaaccagccacttggaagacgaggttacgctgtgctttgaataagagcccagattttgaggaagtgacggaccggtcccaactggacatttccgagccatacaaagtttaccgaattgttcctgaggaagagcaaaaatgcaaactaggcgtggcaactgctggctgcgtgaatgaagttacagagatggagtgcggtcgctctgaaatcgacgagctgatcaaggagccttctgtggacgattacatggggatgatcaaaaggagcccttccccgccggaggcctgtcggagtcagctccttccagactggtgggcgcagcagcccagcacaggcgtgccgctggtgacggggtacaccacctacgacgcgcaccattcagcattctcccagatggtgatcagcttctactatgggggcaagctggtgggccaggccaccaccacctgccccgagggctgccgcctgtccctgagccagcctgggctgcccggcaccaagctgtatgggcccgagggcctggagctggtgcgcttcccgccggccgacgccatccccagcgagcgacagaggcaggtgacgcggaagctgttcgggcacctggagcgcggggtgctgctgcacagcagccggcagggcgtgttcgtcaagcggctgtgccagggccgcgtgttctgcagcggcaacgccgtggtgtgcaaaggcaggcccaacaagctggagcgtgatgaggtggtccaggtcttcgacaccagccagttcttccgagagctgcagcagttctataacagccagggccggcttcctgacggcagggtggtgctgtgctttggggaagagtttccggatatggcccccttgcgctccaaactcattctcgtgcagattgagcagctgtatgtccggcaactggcagaagaggctgggaagagctgtggagccggctctgtgatgcaggcccccgaggagccgccgccagaccaggtcttccggatgtttccagatatttgtgcctcacaccagagatcatttttcagagaaaaccaacagatcaccgtctaagtgcgtcgcttgggcgccccaccccgtctgcgtcctgcatccatctccctgttacagtggcccgcatcatgattaaagaatgtggatccctctgtctggggtgggatgccttactttgcacttaatttaataagggcattctcggaggagtagacgtttaatacgaagtggcggcatagccctgccgagatgtcggtgatggcctggatgctgtaaccacaacctgtggctaaaaattttattttctatcctttacccgtcattatcattagttgctatgattctttctgcattttcggttaactatcatttccaaagacttgtcattcagtaatattagcagatagctgcttcgataaaggaatttggagtttaaaaatcaacttgtgaaaacaaggttgtttttgtctttatcgtttgttagagttatagatttatgatttcataggcttgattctatgtgaaatatctttttacttttatgcattttaataagatttaaaaatatttagattaaagccccctttaatgagtacaagaaaaactcttggcttgttagaagaaagtatattctttctagaatttggtgcaggaatatgtgttcatatccaggcaaacgggtgtgtttttatcttcagacaatgaaaccttctcctctggggctttgttgccaggaagattagaactaaatttatttttttcatttctgtcatgaaatcattccagatacctcttttcttctttccaaatggttttcacatgtgtttgaaatatttgtacttcgaattgtcggattttccatgtcctcctttctcctttgtgcccagcctgagtcagcaccaatcccgcattcagaacctcccagtgaaagggcagccttcattttgagaaggtggaaggtgttagggtttgggagacagctcatccaatctcccaagtctcatggtggatttgtgactgtgagagtttccggtttaaaatctgaaaagccagatatgcctgtttccttttcccagcaccatgcctgtggaggggacagtcagacccagaggtcctttacgtgtggatggagttcacaggcgaatagaggagaggaccaggggacgtggcttgtcccttttgtccaacaaagcattatatttttaagaatggcagacctgtttgctgaagtgttcataagataacaataggcttgaatctccaattcaaatgaatgtcaaagcacatatctttaatatgctgaatgaatatttatttttgtatccattaaaacagtatattgatctcttttattctttattaaaataaa

SEQ ID NO: 14623 - DNA, 1856 bp, Homo sapiens
  source 1..1856: mol_type = unassigned DNA
atccactccacgaacgtcaaatgcgtcatctgaggagggggagggccggggcaaaggaggggcaccctgacatggagcctgccagctccgtcagccctgactcggcccggagctgagctccccacctgccggtagcccaggagatggagcagcccagcccacgtgcccggccttccgcccctgacttcacttgataacaaactagaaactgaaacagggtcgggatgccgatgccggcttggagttagagatgagtcaccgctgagagcagctgcagtagctgagcagtggcagcagagaggcagacgtgagctgagggcgcagaggcaggcagcatctctgagggtccccaaggaacatggctgggagccgtgaggtggtggccatggactgcgagatggtggggctggggccccaccgggagagtggcctggctcgttgcagcctcgtgaacgtccacggtgctgtgctgtacgacaagttcatccggcctgagggagagatcaccgattacagaacccgggtcagcggggtcacccctcagcacatggtgggggccacaccatttgccgtggccaggctagagatcctgcagctcctgaaaggcaagctggtggtgggtcatgacctgaagcacgacttccaggcactgaaagaggacatgagcggctacacaatctacgacacgtccactgacaggctgttgtggcgtgaggccaagctggaccactgcaggcgtgtctccctgcgggtgctgagtgagcgcctcctacacaagagcatccagaacagcctgcttggacacagctcggtggaagatgcgagggcaacgatggagctctatcaaatctcccagagaatccgagcccgccgagggctgccccgcctggctgtgtcagactgaagccccatccagcccgttccgcagggactagaggctttcggctttttgggacagcaactaccttgcttttggaaaatacatttttaatagtaaagtggctctatattttctctacgccatcactgggtcctcttcttattcttctctccaagctgggttaacagtagacaggacccatttctgtgtgatgttaggagggaatgaagtcttatgctggggaggtgggcaagtatcaatttccttaatatcttgaatcctgtgggtccaaaatgtggcttggaaatctaagtagcatgtggcttaattactaatcccaccctttgctgttgcatcccagccctattcctggtgcatttatgcccagagaggtggcattatttcctggggtggcattcagctcctcttgagttggtgccacagcatttgtgggctttgaagcaaaggtacaggaaatgtcaagggtgccaccccggcaaccttgagcaagtcacccctcctatttgtaaaatgaggaaggaaaggtaacaaactgtggagtcagagagaagtaggttggaatcctctttgtcatttagtagctgtttgacctaaggtggtttactgaacttctcagtttctccatctgtaaaatgagaattctagcaactcgtagggtatttgtgagatgttgcaggcaaagcccccagcaccatgcctgtcctagcttaagcacccaccaggtgtcgataagtaattgttcttccctggactgcctgcacatctagggcaccccaggaagagtcaccgcactctgtttcggggctcggctctctgaggggagggcatcctgtatggggaggagggtctggaccagagctgtccctgatcgctagaatcaacggcagaattcttgttattttaataataattaataatttagtgcttccactaaataaaaatcattggaatggtg

SEQ ID NO: 14624 - DNA, 800 bp, Homo sapiens
  source 1..800: mol_type = unassigned DNA
tatggtcattacaggtggtcagctgtagctggatgtgtgccttgaaaggctgacaagtttgccctgagtgactcacctactgtcacctgatccaacaagatttgtgggcgtagcctgccgatgggtgacgccagttaaagcatctctgagggtccccaaggaacatggctgggagccgtgaggtggtggccatggactgcgagatggtggggctggggccccaccgggagagtggcctggctcgttgcagcctcgtgaacgtccacggtgctgtgctgtacgacaagttcatccggcctgagggagagatcaccgattacagaacccgggtcagcggggtcacccctcagcacatggtgggggccacaccatttgccgtggccaggctagagatcctgcagctcctgaaaggcaagctggtggtgggtcatgacctgaagcacgacttccaggcactgaaagaggacatgagcggctacacaatctacgacacgtccactgacaggctgttgtggcgtgaggccaagctggaccactgcaggcgtgtctccctgcgggtgctgagtgagcgcctcctacacaagagcatccagaacagcctgcttggacacagctcggtggaagatgcgagggcaacgatggagctctatcaaatctcccagagaatccgagcccgccgagggctgccccgcctggctgtgtcagactgaagccccatccagcccgttccgcagggactagaggctttcggctttttgggacagcaactaccttgcttttggaaaatacatttttaatag

SEQ ID NO: 14625 - DNA, 3303 bp, Homo sapiens
  source 1..3303: mol_type = unassigned DNA
ttagctggacccgtctgggaggtaggtttgtgagcgtgagagatcgatctgtaccgcggggatccgaagtatgcttatccaggtgggctgcctcaagcctcgatcccacccccgcgctggtagatggtgtcaaggtccttgcgtgggagaaggacttgggtgagatgcatgcggagattgcccccaattccggcctggagccaagggaaagggatgcctggatttgtgtctctattggtggtccacgctgcggatgcctgggtagcccagaggttatctacgccatacttctcactgtttttgagcatacctagatgttcctttcctaggcggagtatagatcgcacgtgttctagcctcttagactcagagggttcgagctctataagcccctccactcccttcattttacaaatgagactcaaacctagagcgcggtaatgaccttactaagaccaaatggctggtgaattgggcttcactagaatccaggcttgctggctaacaccaatgctccctccatcatttcatgttatgttttcatttcccctctgtctgagagattgctctgatgtctttccttccataagtcctacggagatcgagcttacctcatttttctcccaggcctaggagctcaattaccaggatcactttcttccccagggtgtactacagacctccacatgttggacagtaggattcagcagagaatgagtcccacatcctcttttcatccataagccactcttcccaactactcttccgccttccattgtccctatgtctactttactgctcaatctggattttggggaacctcctcccaaaaaggcattagaaggaaatgccaagcaccgaaattttgtcaagaagcggaggctcttagaacggagaggctttctgagtaaaaagaaccaaccccctagcaaggcgcctaagttgcactctgaaccttcaaagaaaggggaaactcctacggtcgatggcacttggaagaccccttccttcccaaaaaagaagacagctgcttccagcaatgggtcaggacagcccctggacaagaaagctgcagtgtcttggttgacccctgccccttcaaaaaaggctgattctgttgctgctaaagtagatttgctgggggagttccagagtgcccttccaaagatcaatagccacccaacccgctctcagaagaagagctcccagaagaaatcctctaaaaagaaccatcctcagaagaatgccccacagaactccacccaagctcattcagagaataaatgctccggagcatcccagaagttgccacggaagatggtggcaattgactgtgagatggtgggcacaggaccaaaggggcatgttagttccttggctcgatgtagcattgtcaactacaacggagatgtgctttatgacgagtacattcttcccccctgccacattgtggactaccgaaccaggtggagtggtatccggaagcagcacatggtgaatgccacacccttcaagattgctcgaggccagatcttgaagatactcacagggaagatagtggtggggcatgccatccacaacgacttcaaagcccttcagtactttcaccccaagtccctcacccgtgacacctcccatatcccccccctcaaccggaaggctgactgcccggagaatgccaccatgtctctgaagcatctcaccaagaagctgctaaaccgggatatccaggttgggaagagcggacattcctctgtggaagatgcccaggccaccatggagctatataagttggttgaagtcgagtgggaagagcacctagcccggaatccccctacagactagtggcagtggggacgctggtgatatgaggaggcagaggcagcacccaggagaaacagggcagtggaccaatggacagctccaccagctccacatctttggaagctagatttggggagagagaagctctaccccagacttaatacccattgaaatttcacctcaggtgttgtgtcctgtgtctggttaagtgtcccatggaaggggaaagccttcacgtcagaacccaaccctataccttttacttcttaaatggtgctaaccacaggtgtcccagggtgctctgtgccagttaagatttttaactttcaaggggcagggcatactgggaaatgtagtttcccaaactgccttatcacttgggtggacatatgtctccttttatgccttttggtcttgagtaattaacagcatcctcttccacgctcagaagtgttctggttggggccaggcatggtggctcacacctgtagtcccaacacttagggaggccgaggcgggcggatcacctgagatcaggagttcaagaccagcctggccaacatggcgaattcccgttctctactaaaaatacaaaaaatgtgtggggtgtggtggcaggagcctgtaatcctagctactcaggaggctgaggcaggagaatcgcttgagcccaggaggcggagattgcagtgagccgagatcgtgtcactgcactccagcctgggtgacaagagtgagactccgtctccaaaaaaaaaaaaaaagaatttattaacctggttggttaataaattgtgtggtccctgccgggcgtggtggctcacgcctgtaatcccagcactttgggaggccgagacgggcagatcacgaggtcaggagatcgagaccatcctggctaacacggtgaaaccccgtctctactaaaaatacaaaaaattagccaggcgtggtggcgggcacctgtagttccagctacttgggaggctgaggcaggagaatggcgtgaacccaggaggcggagcttgcagtgagccgagattgtgccactgcactccagcctgggccacggccacagagcgagactctgtctcaaaaaaaaaaaaaaattaaaattgtgtggtccctttccatgtcacagagtctgcttttggctcagagtctgtatctagcctgtgtcaggatattgcctgttcttcccaccttgacttccagagcagccatcgctggtgagctttagttctccttagggttccaaggcattagaagtaagagtgtagcttggaaaccaacttctgtgatttaggaaagctgtctctttcctaaggtaatagggggtttatttcatttaggccccagttggtaggttttaaaataatttataaagtgttttaataatttggttgtcttttttaccttgctaaaccaagcctctaaaaactcaaattattcccttgataaatttttataatggaaaagcaa

SEQ ID NO: 14626 - DNA, 2310 bp, Homo sapiens
  source 1..2310: mol_type = unassigned DNA
gcgggccaagttccagttcccgccccttgccgtacactcctctcctcttacggaagtgaagccggaggtgtccggcgggctgcagttccggtttatcgcggccttcccacaccttcgcgttgtaccaccacggggctagaggggccggggagcgcatcccgcccccgcccccacccacgccgccccctcctccgccgccactgccgctcctcacacactcggaatcactggcctcactacctggggtcggggcggtgcgggtgtgcgcgcgccgacctctggcgcgttctaacccgcgcgcctgccttcccgggcttcgtcggcgcgcaccgatttccgcatccggctccggacgcttccggtcttagctggacccgtctgggagggtgtactacagacctccacatgttggacagtaggattcagcagagaatgagtcccacatcctcttttcatccataagccactcttcccaactactcttccgccttccattgtccctatgtctactttactgctcaatctggattttggggaacctcctcccaaaaaggcattagaaggaaatgccaagcaccgaaattttgtcaagaagcggaggctcttagaacggagaggctttctgagtaaaaagaaccaaccccctagcaaggcgcctaagttgcactctgaaccttcaaagaaaggggaaactcctacggtcgatggcacttggaagaccccttccttcccaaaaaagaagacagctgcttccagcaatgggtcaggacagcccctggacaagaaagctgcagtgtcttggttgacccctgccccttcaaaaaaggctgattctgttgctgctaaagtagatttgctgggggagttccagagtgcccttccaaagatcaatagccacccaacccgctctcagaagaagagctcccagaagaaatcctctaaaaagaaccatcctcagaagaatgccccacagaactccacccaagctcattcagagaataaatgctccggagcatcccagaagttgccacggaagatggtggcaattgactgtgagatggtgggcacaggaccaaaggggcatgttagttccttggctcgatgtagcattgtcaactacaacggagatgtgctttatgacgagtacattcttcccccctgccacattgtggactaccgaaccaggtggagtggtatccggaagcagcacatggtgaatgccacacccttcaagattgctcgaggccagatcttgaagatactcacagggaagatagtggtggggcatgccatccacaacgacttcaaagcccttcagtactttcaccccaagtccctcacccgtgacacctcccatatcccccccctcaaccggaaggctgactgcccggagaatgccaccatgtctctgaagcatctcaccaagaagctgctaaaccgggatatccaggttgggaagagcggacattcctctgtggaagatgcccaggccaccatggagctatataagttggttgaagtcgagtgggaagagcacctagcccggaatccccctacagactagtggcagtggggacgctggtgatatgaggaggcagaggcagcacccaggagaaacagggcagtggaccaatggacagctccaccagctccacatctttggaagctagatttggggagagagaagctctaccccagacttaatacccattgaaatttcacctcaggtgttgtgtcctgtgtctggttaagtgtcccatggaaggggaaagccttcacgtcagaacccaaccctataccttttacttcttaaatggtgctaaccacaggtgtcccagggtgctctgtgccagttaagatttttaactttcaaggggcagggcatactgggaaatgtagtttcccaaactgccttatcacttgggtggacatatgtctccttttatgccttttggtcttgagtaattaacagcatcctcttccacgctcagaagtgttctggttggggccaggcatggtggctcacacctgtagtcccaacacttagggaggccgaggcgggcggatcacctgagatcaggagttcaagaccagcctggccaacatggcgaattcccgttctctactaaaaatacaaaaaatgtgtggggtgtggtggcaggagcctgtaatcctagctactcaggaggctgaggcaggagaatcgcttgagcccaggaggcggagattgcagtgagccgagatcgtgtcactgcactccagcctgggtgacaagagtgagactccgtctccaaaaaaaaaaaaaaagaa

SEQ ID NO: 14627 - DNA, 635 bp, Homo sapiens
  source 1..635: mol_type = unassigned DNA
ttaagacggtgaggtcagcttcacattctcaggaactctccttctttgggtctggctgaagttgaggatctcttactctctaggccacggaattaacccgagcaggcatggaggcctctgctctcacctcatcagcagtgaccagtgtggccaaagtggtcagggtggcctctggctctgccgtagttttgcccctggccaggattgctacagttgtgattggaggagttgtggctgtgcccatggtgctcagtgccatgggcttcactgcggcgggaatcgcctcgtcctccatagcagccaagatgatgtccgcggcggccattgccaatgggggtggagttgcctcgggcagccttgtggctactctgcagtcactgggagcaactggactctccggattgaccaagttcatcctgggctccattgggtctgccattgcggctgtcattgcgaggttctactagctccctgcccctcgccctgcagagaagagaaccatgccaggggagaaggcacccagccatcctgacccagcgaggagccaactatcccaaatatacctggggtgaaatataccaaattctgcatctccagaggaaaataagaaataaagatgaattgttgcaactctt

SEQ ID NO: 14628 - DNA, 661 bp, Homo sapiens
  source 1..661: mol_type = unassigned DNA
gggaacacatccaagcttaagacggtgaggtcagcttcacattctcaggaactctccttctttgggtctggctgaagttgaggatctcttactctctaggccacggaattaacccgagcaggcatggaggcctctgctctcacctcatcagcagtgaccagtgtggccaaagtggtcagggtggcctctggctctgccgtagttttgcccctggccaggattgctacagttgtgattggaggaggtgagtctgtggtggctgtgcccatggtgctcagtgccatgggcttcactgcggcgggaatcgcctcgtcctccatagcagccaagatgatgtccgcggcggccattgccaatgggggtggagttgcctcgggcagccttgtggctactctgcagtcactgggagcaactggactctccggattgaccaagttcatcctgggctccattgggtctgccattgcggctgtcattgcgaggttctactagctccctgcccctcgccctgcagagaagagaaccatgccaggggagaaggcacccagccatcctgacccagcgaggagccaactatcccaaatatacctggggtgaaatataccaaattctgcatctccagaggaaaataagaaataaagatgaattgttgcaactcttc

SEQ ID NO: 14629 - DNA, 661 bp, Homo sapiens
  source 1..661: mol_type = unassigned DNA
gggaacacatccaagcttaagacggtgaggtcagcttcacattctcaggaactctccttctttgggtctggctgaagttgaggatctcttactctctaggccacggaattaacccgagcaggcatggaggcctctgctctcacctcatcagcagtgaccagtgtggccaaagtggtcagggtggcctctggctctgccgtagttttgcccctggccaggattgctacagttgtgattggaggagttgcttccattgtggctgtgcccatggtgctcagtgccatgggcttcactgcggcgggaatcgcctcgtcctccatagcagccaagatgatgtccgcggcggccattgccaatgggggtggagttgcctcgggcagccttgtggctactctgcagtcactgggagcaactggactctccggattgaccaagttcatcctgggctccattgggtctgccattgcggctgtcattgcgaggttctactagctccctgcccctcgccctgcagagaagagaaccatgccaggggagaaggcacccagccatcctgacccagcgaggagccaactatcccaaatatacctggggtgaaatataccaaattctgcatctccagaggaaaataagaaataaagatgaattgttgcaactcttc

SEQ ID NO: 14630 - DNA, 683 bp, Homo sapiens
  source 1..683: mol_type = unassigned DNA
gggggtaagagacagtgagtgcccaaacacagcgtcctgtacagacagcttgggcgttgttctcagggaagactgcgcctcgaagatccttggaggaaaccaaagtgggctcccagccaggttcgctgcttctgtctctgtctctgtctcgttattctcaccgctccagccattaaggaagagcacaccggacccgaaggatgcagcatgtgacagaatctccttcctcgataaggctgaatgacattccaccggaggtatagaccacatttggttgatccattcacccatcagtggacacttgggctgcttccacctctcggctattgtgcatagtgctgctatgtacgtgggggcagtgcttcagtcggggtggagctgcttaaaaggcctgggatcacaccctttgggaacacatccaagcttaagacggtgaggtcagcttcacattctcaggaactctccttctttgggccacggaattaacccgagcaggcatggaggcctctgctctcacctcatcagcagtgaccagtgtggccaaagtggtcagggtggcctctggctctgccgtagttttgcccctggccaggattgctacagttgtgattggaggagttgtggctgtgcccatggtgctcagtgccatgggcttcactgcggcgggaatcgcctcgtcctcc

SEQ ID NO: 14631 - DNA, 218 bp, Homo sapiens
  source 1..218: mol_type = unassigned DNA
acatccaagcttaagacggtgaggccacggaattaacccgagcaggcatggaggcctctgctctcacctcatcagcagtgaccagtgtggccaaagtggtcagggtggcctctggctctgccgtagttttgcccctggccaggattgctacagttgtgattggaggagttgtggctgtgcccatggtgctcagtgccatgggcttcactgcggcggga

SEQ ID NO: 14632 - DNA, 716 bp, Homo sapiens
  source 1..716: mol_type = unassigned DNA
ggcaggagctacccttcccgtggccccggaccttgggtgggctgtgggctcagggagcggaggggaggccttaagcatccactctctgcccggtgtttttgttctcatcagggagcctcagatgggaagggactcgagccccacctgtccctggactctggaatgccacggaattaacccgagcaggcatggaggcctctgctctcacctcatcagcagtgaccagtgtggccaaagtggtcagggtggcctctggctctgccgtagttttgcccctggccaggattgctacagttgtgattggaggagttgtggctgtgcccatggtgctcagtgccatgggcttcactgcggcgggaatcgcctcgtcctccatagcagccaagatgatgtccgcggcggccattgccaatgggggtggagttgcctcgggcagccttgtggctactctgcagtcactgggagcaactggactctccggattgaccaagttcatcctgggctccattgggtctgccattgcggctgtcattgcgaggttctactagctccctgcccctcgccctgcagagaagagaaccatgccaggggagaaggcacccagccatcctgacccagcgaggagccaactatcccaaatatacctggggtgaaatataccaaattctgcatctccagaggaaaataagaaataaagatgaattgttgcaactctt

SEQ ID NO: 14633 - DNA, 275 bp, Homo sapiens
  source 1..275: mol_type = unassigned DNA
cggtgaggtcagcttcacattctcaggaactctccttctttggggagcctcagatgggaagggactcgagccccacctgtccctggactctggaatgtctggctgaagttgaggatctcttactctctaggccacggaattaacccgagcaggcatggaggcctctgctctcacctcatcagcagtgaccagtgtggccaaagtggtcagggtggcctctggctctgccgtagttttgcccctggccaggattgctacagttgtgattggaggag

SEQ ID NO: 14634 - DNA, 355 bp, Homo sapiens
  source 1..355: mol_type = unassigned DNA
gcttaagacggtgaggtcagcttcacattctcaggaactctccttctttgggccacggaattaacccgagcaggcatggaggcctctgctctcacctcatcagcagtgaccagtgtggccaaagtggtcagggtggcctctggctctgccgtagttttgcccctggccaggattgctacagttgtgattggaggagttgtggctgtgcccatggtgctcagtgccatgggcttcactgcggcgggaatcgcctcgtcctccatagcagccaagatgatgtccgcggcggccattgccaatgggggtggagttgcctcgggcagccttgtggctactctgcagtcactgggagcaa

SEQ ID NO: 14635 - DNA, 2900 bp, Homo sapiens
  source 1..2900: mol_type = unassigned DNA
attgtttcctactccattttctctggggcaatagcagaataggagcaagccagcactagtcagctaactaagtgactcaaccaaggccttttttccttgttatctttgcagatacttcattttcttagcgtttctggagattacaacatcctgcggttccgtttctgggaactttactgatttatctcccccctcacacaaataagcattgattcctgcatttctgaagatctcaagatctggactactgttgaaaaaatttccagtgaggctcacttatgtctgtaaagatgggaaaaaaatacaagaacattgttctactaaaaggattagaggtcatcaatgattatcattttagaatggttaagtccttactgagcaacgatttaaaacttaatttaaaaatgagagaagagtatgacaaaattcagattgctgacttgatggaagaaaagttccgaggtgatgctggtttgggcaaactaataaaaattttcgaagatataccaacgcttgaagacctggctgaaactcttaaaaaagaaaagttaaaagtaaaaggaccagccctatcaagaaagaggaagaaggaagtggatgctacttcacctgcaccctccacaagcagcactgtcaaaactgaaggagcagaggcaactcctggagctcagaaaagaaaaaaatcaaccaaagaaaaggctggacccaaagggagtaaggtgtccgaggaacagactcagcctccctctcctgcaggagccggcatgtccacagccatgggccgttccccatctcccaagacctcattgtcagctccacccaacagttcttcaactgagaacccgaaaacagtggccaaatgtcaggtaactcccagaagaaatgttctccaaaaacgcccagtgatagtgaaggtactgagtacaacaaagccatttgaatatgagaccccagaaatggagaaaaaaataatgtttcatgctacagtggctacacagacacagttcttccatgtgaaggttttaaacaccagcttgaaggagaaattcaatggaaagaaaatcatcatcatatcagattatttggaatatgatagtctcctagaggtcaatgaagaatctactgtatctgaagctggtcctaaccaaacgtttgaggttccaaataaaatcatcaacagagcaaaggaaactctgaagattgatattcttcacaaacaagcttcaggaaatattgtatatggggtatttatgctacataagaaaacagtaaatcagaagaccacaatctacgaaattcaggatgatagaggaaaaatggatgtagtggggacaggacaatgtcacaatatcccctgtgaagaaggagataagctccaacttttctgctttcgacttagaaaaaagaaccagatgtcaaaactgatttcagaaatgcatagttttatccagataaagaaaaaaacaaacccgagaaacaatgaccccaagagcatgaagctaccccaggaacagcgtcagcttccatatccttcagaggccagcacaaccttccctgagagccatcttcggactcctcagatgccaccaacaactccatccagcagtttcttcaccaagaaaagtgaagacacaatctccaaaatgaatgacttcatgaggatgcagatactgaaggaagggagtcattttccaggaccgttcatgaccagcataggcccagctgagagccatccccacactcctcagatgcctccatcaacaccaagcagcagtttcttaaccacgaaaagtgaagacacaatctccaaaatgaatgacttcatgaggatgcagatactgaaggaagggagtcattttccaggaccgttcatgaccagcataggcccagctgagagccatccccacactcctcagatgcctccatcaacaccaagcagcagtttcttaaccacgttgaaaccaagactgaagactgaacctgaagaagtttccatagaagacagtgcccagagtgacctcaaagaagtgatggtgctgaacgcaacagaatcatttgtatatgagcccaaagagcagaagaaaatgtttcatgccacagtggcaactgagaatgaagtcttccgagtgaaggtttttaatattgacctaaaggagaagttcaccccaaagaagatcattgccatagcaaattatgtttgccgcaatgggttcctggaggtatatcctttcacacttgtggctgatgtgaatgctgaccgaaacatggagatcccaaaaggattgattagaagtgccagcgtaactcctaaaatcaatcagctttgctcacaaactaaaggaagttttgtgaatggggtgtttgaggtacataagaaaaatgtaaggggtgaattcacttattatgaaatacaagataatacagggaagatggaagtggtggtgcatggacgactgaccacaatcaactgtgaggaaggagataaactgaaactcacctgctttgaattggcaccgaaaagtgggaataccggggagttgagatctgtaattcatagtcacatcaaggtcatcaagaccaggaaaaacaagaaagacatactcaatcctgattcaagtatggaaacttcaccagactttttcttctaaaatctggatgtcattgacgataatgtttatggagataaggtctaagtgcctaaaaaaatgtacatatacctggttgaaatacaacactatacatacacaccaccatatatactagctgttaatcctatggaatggggtattgggagtgcttttttaatttttcatagtttttttttaataaaatggcatattttgcatctacaacttctataatttgaaaaaataaataaacattatcttttttgtgaaagg

SEQ ID NO: 14636 - DNA, 2564 bp, Homo sapiens
  source 1..2564: mol_type = unassigned DNA
attgtttcctactccattttctctggggcaatagcagaataggagcaagccagcactagtcagctaactaagtgactcaaccaaggccttttttccttgttatctttgcagatacttcattttcttagcgtttctggagattacaacatcctgcggttccgtttctgggaactttactgatttatctcccccctcacacaaataagcattgattcctgcatttctgaagatctcaagatctggactactgttgaaaaaatttccagtgaggctcacttatgtctgtaaagatgggaaaaaaatacaagaacattgttctactaaaaggattagaggtcatcaatgattatcattttagaatggttaagtccttactgagcaacgatttaaaacttaatttaaaaatgagagaagagtatgacaaaattcagattgctgacttgatggaagaaaagttccgaggtgatgctggtttgggcaaactaataaaaattttcgaagatataccaacgcttgaagacctggctgaaactcttaaaaaagaaaagttaaaagtaaaaggaccagccctatcaagaaagaggaagaaggaagtggatgctacttcacctgcaccctccacaagcagcactgtcaaaactgaaggagcagaggcaactcctggagctcagaaaagaaaaaaatcaaccaaagaaaaggctggacccaaagggagtaaggtgtccgaggaacagactcagcctccctctcctgcaggagccggcatgtccacagccatgggccgttccccatctcccaagacctcattgtcagctccacccaacagttcttcaactgagaacccgaaaacagtggccaaatgtcaggtaactcccagaagaaatgttctccaaaaacgcccagtgatagtgaaggtactgagtacaacaaagccatttgaatatgagaccccagaaatggagaaaaaaataatgtttcatgctacagtggctacacagacacagttcttccatgtgaaggttttaaacaccagcttgaaggagaaattcaatggaaagaaaatcatcatcatatcagattatttggaatatgatagtctcctagaggtcaatgaagaatctactgtatctgaagctggtcctaaccaaacgtttgaggttccaaataaaatcatcaacagagcaaaggaaactctgaagattgatattcttcacaaacaagcttcaggaaatattgtatatggggtatttatgctacataagaaaacagtaaatcagaagaccacaatctacgaaattcaggatgatagaggaaaaatggatgtagtggggacaggacaatgtcacaatatcccctgtgaagaaggagataagctccaacttttctgctttcgacttagaaaaaagaaccagatgtcaaaactgatttcagaaatgcatagttttatccagataaagaaaaaaacaaacccgagaaacaatgaccccaagagcatgaagctaccccaggaacagcgtcagcttccatatccttcagaggccagcacaaccttccctgagagccatcttcggactcctcagatgccaccaacaactccatccagcagtttcttcaccaagttgaaaccaagactgaagactgaacctgaagaagtttccatagaagacagtgcccagagtgacctcaaagaagtgatggtgctgaacgcaacagaatcatttgtatatgagcccaaagagcagaagaaaatgtttcatgccacagtggcaactgagaatgaagtcttccgagtgaaggtttttaatattgacctaaaggagaagttcaccccaaagaagatcattgccatagcaaattatgtttgccgcaatgggttcctggaggtatatcctttcacacttgtggctgatgtgaatgctgaccgaaacatggagatcccaaaaggattgattagaagtgccagcgtaactcctaaaatcaatcagctttgctcacaaactaaaggaagttttgtgaatggggtgtttgaggtacataagaaaaatgtaaggggtgaattcacttattatgaaatacaagataatacagggaagatggaagtggtggtgcatggacgactgaccacaatcaactgtgaggaaggagataaactgaaactcacctgctttgaattggcaccgaaaagtgggaataccggggagttgagatctgtaattcatagtcacatcaaggtcatcaagaccaggaaaaacaagaaagacatactcaatcctgattcaagtatggaaacttcaccagactttttcttctaaaatctggatgtcattgacgataatgtttatggagataaggtctaagtgcctaaaaaaatgtacatatacctggttgaaatacaacactatacatacacaccaccatatatactagctgttaatcctatggaatggggtattgggagtgcttttttaatttttcatagtttttttttaataaaatggcatattttgcatctacaacttctataatttgaaaaaataaataaacattatcttttttgtgaaagg

SEQ ID NO: 14637 - DNA, 2099 bp, Homo sapiens
  source 1..2099: mol_type = unassigned DNA
tcatcaacatgcattcccagaaatgccatgaaaggaaagaccaagtcttgactgagaaacggaccgggcagatgagggactcccacatatacctgtttcctgctcttcccgaagacattttgccacaagcatataattcagcttctgaaaaatacggtcttcctcactgcagacaccatgccagcgttttaaatcaagttggctactcgtgctgtttagagtatgcagtttgcctgtggcaatattaaactcatctggaagaaagcacttaaacctatccagttcctcatcggtgatgttatccaggctggttagcaagagtatctccttatatttactctccatctcacgacttttcagcttataagggatccaaactatgtaagattataccaccaaaagtgattcaacattcaaaatgaagcaagatacttcattttcttagcgtttctggagattacaacatcctgcggttccgtttctgggaactttactgatttatctcccccctcacacaaataagcattgattcctgcatttctgaagatctcaagatctggactactgttgaaaaaatttccagtgaggctcacttatgtctgtaaagatgggaaaaaaatacaagaacattgttctactaaaaggattagaggtcatcaatgattatcattttagaatggttaagtccttactgagcaacgatttaaaacttaatttaaaaatgagagaagagtatgacaaaattcagattgctgacttgatggaagaaaagttccgaggtgatgctggtttgggcaaactaataaaaattttcgaagatataccaacgcttgaagacctggctgaaactcttaaaaaagaaaagttaaaagtaaaaggaccagccctatcaagaaagaggaagaaggaagtggatgctacttcacctgcaccctccacaagcagcactgtcaaaactgaaggagcagaggcaactcctggagctcagaaaagaaaaaaatcaaccaaagaaaaggctggacccaaagggagtaaggtgtccgaggaacagactcagcctccctctcctgcaggagccggcatgtccacagccatgggccgttccccatctcccaagacctcattgtcagctccacccaacagttcttcaactgagaacccgaaaacagtggccaaatgtcaggtaactcccagaagaaatgttctccaaaaacgcccagtgatagtgaaggtactgagtacaacaaagccatttgaatatgagaccccagaaatggagaaaaaaataatgtttcatgctacagtggctacacagacacagttcttccatgtgaaggttttaaacaccagcttgaaggagaagttcaccccaaagaagatcattgccatagcaaattatgtttgccgcaatgggttcctggaggtatatcctttcacacttgtggctgatgtgaatgctgaccgaaacatggagatcccaaaaggattgattagaagtgccagcgtaactcctaaaatcaatcagctttgctcacaaactaaaggaagttttgtgaatggggtgtttgaggtacataagaaaaatgtaaggggtgaattcacttattatgaaatacaagataatacagggaagatggaagtggtggtgcatggacgactgaccacaatcaactgtgaggaaggagataaactgaaactcacctgctttgaattggcaccgaaaagtgggaataccggggagttgagatctgtaattcatagtcacatcaaggtcatcaagaccaggaaaaacaagaaagacatactcaatcctgattcaagtatggaaacttcaccagactttttcttctaaaatctggatgtcattgacgataatgtttatggagataaggtctaagtgcctaaaaaaatgtacatatacctggttgaaatacaacactatacatacacaccaccatatatactagctgttaatcctatggaatggggtattgggagtgcttttttaatttttcatagtttttttttaataaaatggcatattttgcatctacaacttctataatttgaaaaaataaataaacattatcttttttgtg

SEQ ID NO: 14638 - DNA, 2731 bp, Homo sapiens
  source 1..2731: mol_type = unassigned DNA
gtttcctactccattttctctggggcaatagcagaataggagcaagccagcactagtcagctaactaagtgactcaaccaaggccttttttccttgttatctttgcagatacttcattttcttagcgtttctggagattacaacatcctgcggttccgtttctgggaactttactgatttatctcccccctcacacaaataagcattgattcctgcatttctgaagatctcaagatctggactactgttgaaaaaatttccagtgaggctcacttatgtctgtaaagatgggaaaaaaatacaagaacattgttctactaaaaggattagaggtcatcaatgattatcattttagaatggttaagtccttactgagcaacgatttaaaacttaatttaaaaatgagagaagagtatgacaaaattcagattgctgacttgatggaagaaaagttccgaggtgatgctggtttgggcaaactaataaaaattttcgaagatataccaacgcttgaagacctggctgaaactcttaaaaaagaaaagttaaaagtaaaaggaccagccctatcaagaaagaggaagaaggaagtggatgctacttcacctgcaccctccacaagcagcactgtcaaaactgaaggagcagaggcaactcctggagctcagaaaagaaaaaaatcaaccaaagaaaaggctggacccaaagggagtaaggtgtccgaggaacagactcagcctccctctcctgcaggagccggcatgtccacagccatgggccgttccccatctcccaagacctcattgtcagctccacccaacagttcttcaactgagaacccgaaaacagtggccaaatgtcaggtaactcccagaagaaatgttctccaaaaacgcccagtgatagtgaaggtactgagtacaacaaagccatttgaatatgagaccccagaaatggagaaaaaaataatgtttcatgctacagtggctacacagacacagttcttccatgtgaaggttttaaacaccagcttgaaggagaaattcaatggaaagaaaatcatcatcatatcagattatttggaatatgatagtctcctagaggtcaatgaagaatctactgtatctgaagctggtcctaaccaaacgtttgaggttccaaataaaatcatcaacagagcaaaggaaactctgaagattgatattcttcacaaacaagcttcaggaaatattgtatatggggtatttatgctacataagaaaacagtaaatcagaagaccacaatctacgaaattcaggatgatagaggaaaaatggatgtagtggggacaggacaatgtcacaatatcccctgtgaagaaggagataagctccaacttttctgctttcgacttagaaaaaagaaccagatgtcaaaactgatttcagaaatgcatagttttatccagataaagaaaaaaacaaacccgagaaacaatgaccccaagagcatgaagctaccccaggaacagcgtcagcttccatatccttcagaggccagcacaaccttccctgagagccatcttcggactcctcagatgccaccaacaactccatccagcagtttcttcaccaagaaaagtgaagacacaatctccaaaatgaatgacttcatgaggatgcagatactgaaggaagggagtcattttccaggaccgttcatgaccagcataggcccagctgagagccatccccacactcctcagatgcctccatcaacaccaagcagcagtttcttaaccacgttgaaaccaagactgaagactgaacctgaagaagtttccatagaagacagtgcccagagtgacctcaaagaagtgatggtgctgaacgcaacagaatcatttgtatatgagcccaaagagcagaagaaaatgtttcatgccacagtggcaactgagaatgaagtcttccgagtgaaggtttttaatattgacctaaaggagaagttcaccccaaagaagatcattgccatagcaaattatgtttgccgcaatgggttcctggaggtatatcctttcacacttgtggctgatgtgaatgctgaccgaaacatggagatcccaaaaggattgattagaagtgccagcgtaactcctaaaatcaatcagctttgctcacaaactaaaggaagttttgtgaatggggtgtttgaggtacataagaaaaatgtaaggggtgaattcacttattatgaaatacaagataatacagggaagatggaagtggtggtgcatggacgactgaccacaatcaactgtgaggaaggagataaactgaaactcacctgctttgaattggcaccgaaaagtgggaataccggggagttgagatctgtaattcatagtcacatcaaggtcatcaagaccaggaaaaacaagaaagacatactcaatcctgattcaagtatggaaacttcaccagactttttcttctaaaatctggatgtcattgacgataatgtttatggagataaggtctaagtgcctaaaaaaatgtacatatacctggttgaaatacaacactatacatacacaccaccatatatactagctgttaatcctatggaatggggtattgggagtgcttttttaatttttcatagtttttttttaataaaatggcatattttgcatctacaacttctataatttgaaaaaataaataaacattatcttttttgtgaaaggaa

SEQ ID NO: 14639 - DNA, 2704 bp, Homo sapiens
  source 1..2704: mol_type = unassigned DNA
ggcaatagcagaataggagcaagccagcactagtcagctaactaagtgactcaaccaaggccttttttccttgttatctttgcagatacttcattttcttagcgtttctggagattacaacatcctgcggttccgtttctgggaactttactgatttatctcccccctcacacaaataagcattgattcctgcatttctgaagatctcaagatctggactactgttgaaaaaatttccagtgaggctcacttatgtctgtaaagatgggaaaaaaatacaagaacattgttctactaaaaggattagaggtcatcaatgattatcattttagaatggttaagtccttactgagcaacgatttaaaacttaatttaaaaatgagagaagagtatgacaaaattcagattgctgacttgatggaagaaaagttccgaggtgatgctggtttgggcaaactaataaaaattttcgaagatataccaacgcttgaagacctggctgaaactcttaaaaaagaaaagttaaaagtaaaaggaccagccctatcaagaaagaggaagaaggaagtggatgctacttcacctgcaccctccacaagcagcactgtcaaaactgaaggagcagaggcaactcctggagctcagaaaagaaaaaaatcaaccaaagaaaaggctggacccaaagggagtaaggtgtccgaggaacagactcagcctccctctcctgcaggagccggcatgtccacagccatgggccgttccccatctcccaagacctcattgtcagctccacccaacagttcttcaactgagaacccgaaaacagtggccaaatgtcaggtaactcccagaagaaatgttctccaaaaacgcccagtgatagtgaaggtactgagtacaacaaagccatttgaatatgagaccccagaaatggagaaaaaaataatgtttcatgctacagtggctacacagacacagttcttccatgtgaaggttttaaacaccagcttgaaggagaaattcaatggaaagaaaatcatcatcatatcagattatttggaatatgatagtctcctagaggtcaatgaagaatctactgtatctgaagctggtcctaaccaaacgtttgaggttccaaataaaatcatcaacagagcaaaggaaactctgaagattgatattcttcacaaacaagcttcaggaaatattgtatatggggtatttatgctacataagaaaacagtaaatcagaagaccacaatctacgaaattcaggatgatagaggaaaaatggatgtagtggggacaggacaatgtcacaatatcccctgtgaagaaggagataagctccaacttttctgctttcgacttagaaaaaagaaccagatgtcaaaactgatttcagaaatgcatagttttatccagataaagaaaaaaacaaacccgagaaacaatgaccccaagagcatgaagctaccccaggaacagcgtcagcttccatatccttcagaggccagcacaaccttccctgagagccatcttcggactcctcagatgccaccaacaactccatccagcagtttcttcaccaagaaaagtgaagacacaatctccaaaatgaatgacttcatgaggatgcagatactgaaggaagggagtcattttccaggaccgttcatgaccagcataggcccagctgagagccatccccacactcctcagatgcctccatcaacaccaagcagcagtttcttaaccacgttgaaaccaagactgaagactgaacctgaagaagtttccatagaagacagtgcccagagtgacctcaaagaagtgatggtgctgaacgcaacagaatcatttgtatatgagcccaaagagcagaagaaaatgtttcatgccacagtggcaactgagaatgaagtcttccgagtgaaggtttttaatattgacctaaaggagaagttcaccccaaagaagatcattgccatagcaaattatgtttgccgcaatgggttcctggaggtatatcctttcacacttgtggctgatgtgaatgctgaccgaaacatggagatcccaaaaggattgattagaagtgccagcgtaactcctaaaatcaatcagctttgctcacaaactaaaggaagttttgtgaatggggtgtttgaggtacataagaaaaatgtaaggggtgaattcacttattatgaaatacaagataatacagggaagatggaagtggtggtgcatggacgactgaccacaatcaactgtgaggaaggagataaactgaaactcacctgctttgaattggcaccgaaaagtgggaataccggggagttgagatctgtaattcatagtcacatcaaggtcatcaagaccaggaaaaacaagaaagacatactcaatcctgattcaagtatggaaacttcaccagactttttcttctaaaatctggatgtcattgacgataatgtttatggagataaggtctaagtgcctaaaaaaatgtacatatacctggttgaaatacaacactatacatacacaccaccatatatactagctgttaatcctatggaatggggtattgggagtgcttttttaatttttcatagtttttttttaataaaatggcatattttgcatctacaacttctataatttgaaaaaataaataaacattatcttttttgtgaaa

SEQ ID NO: 14640 - DNA, 630 bp, Homo sapiens
  source 1..630: mol_type = unassigned DNA
agactactcaggcgtgcactgcgaggtggagatctgacttctcttgttcccgcttaagactgcctcctgtatacttcattttcttagcgtttctggagattacaacatcctgcggttccgtttctgggaactttactgatttatctcccccctcacacaaataagcattgattcctgcatttctgaagatctcaagatctggactactgttgaaaaaatttccagtgaggctcacttatgtctgtaaagatgggaaaaaaatacaagaacattgttctactaaaaggattagaggtcatcaatgattatcattttagaatggttaagtccttactgagcaacgatttaaaacttaatttaaaaatgagagaagagtatgacaaaattcagattgctgacttgatggaagaaaagttccgaggtgatgctggtttgggcaaactaataaaaattttcgaagatataccaacgcttgaagacctggctgaaactcttaaaaaagaaaagttaaaagtaaaaggaccagccctatcaagaaagaggaagaaggaagtggatgctacttcacctgcaccctccacaagcagcactgtcaaaactgaaggagcagaggcaactcctggagctcag

SEQ ID NO: 14641 - DNA, 2609 bp, Homo sapiens
  source 1..2609: mol_type = unassigned DNA
attttcttagcgtttctggagattacaacatcctgcggttccgtttctgggaactttactgatttatctcccccctcacacaaataagcattgattcctgcatttctgaagatctcaagatctggactactgttgaaaaaatttccagtgaggctcacttatgtctgtaaagatgggaaaaaaatacaagaacattgttctactaaaaggattagaggtcatcaatgattatcattttagaatggttaagtccttactgagcaacgatttaaaacttaatttaaaaatgagagaagagtatgacaaaattcagattgctgacttgatggaagaaaagttccgaggtgatgctggtttgggcaaactaataaaaattttcgaagatataccaacgcttgaagacctggctgaaactcttaaaaaagaaaagttaaaagtaaaaggaccagccctatcaagaaagaggaagaaggaagtggatgctacttcacctgcaccctccacaagcagcactgtcaaaactgaaggagcagaggcaactcctggagctcagaacccgaaaacagtggccaaatgtcaggtaactcccagaagaaatgttctccaaaaacgcccagtgatagtgaaggtactgagtacaacaaagccatttgaatatgagaccccagaaatggagaaaaaaataatgtttcatgctacagtggctacacagacacagttcttccatgtgaaggttttaaacaccagcttgaaggagaaattcaatggaaagaaaatcatcatcatatcagattatttggaatatgatagtctcctagaggtcaatgaagaatctactgtatctgaagctggtcctaaccaaacgtttgaggttccaaataaaatcatcaacagagcaaaggaaactctgaagattgatattcttcacaaacaagcttcaggaaatattgtatatggggtatttatgctacataagaaaacagtaaatcagaagaccacaatctacgaaattcaggatgatagaggaaaaatggatgtagtggggacaggacaatgtcacaatatcccctgtgaagaaggagataagctccaacttttctgctttcgacttagaaaaaagaaccagatgtcaaaactgatttcagaaatgcatagttttatccagataaagaaaaaaacaaacccgagaaacaatgaccccaagagcatgaagctaccccaggaacagcgtcagcttccatatccttcagaggccagcacaaccttccctgagagccatcttcggactcctcagatgccaccaacaactccatccagcagtttcttcaccaagaaaagtgaagacacaatctccaaaatgaatgacttcatgaggatgcagatactgaaggaagggagtcattttccaggaccgttcatgaccagcataggcccagctgagagccatccccacactcctcagatgcctccatcaacaccaagcagcagtttcttaaccacgaaaagtgaagacacaatctccaaaatgaatgacttcatgaggatgcagatactgaaggaagggagtcattttccaggaccgttcatgaccagcataggcccagctgagagccatccccacactcctcagatgcctccatcaacaccaagcagcagtttcttaaccacgttgaaaccaagactgaagactgaacctgaagaagtttccatagaagacagtgcccagagtgacctcaaagaagtgatggtgctgaacgcaacagaatcatttgtatatgagcccaaagagcagaagaaaatgtttcatgccacagtggcaactgagaatgaagtcttccgagtgaaggtttttaatattgacctaaaggagaagttcaccccaaagaagatcattgccatagcaaattatgtttgccgcaatgggttcctggaggtatatcctttcacacttgtggctgatgtgaatgctgaccgaaacatggagatcccaaaaggattgattagaagtgccagcgtaactcctaaaatcaatcagctttgctcacaaactaaaggaagttttgtgaatggggtgtttgaggtacataagaaaaatgtaaggggtgaattcacttattatgaaatacaagataatacagggaagatggaagtggtggtgcatggacgactgaccacaatcaactgtgaggaaggagataaactgaaactcacctgctttgaattggcaccgaaaagtgggaataccggggagttgagatctgtaattcatagtcacatcaaggtcatcaagaccaggaaaaacaagaaagacatactcaatcctgattcaagtatggaaacttcaccagactttttcttctaaaatctggatgtcattgacgataatgtttatggagataaggtctaagtgcctaaaaaaatgtacatatacctggttgaaatacaacactatacatacacaccaccatatatactagctgttaatcctatggaatggggtattgggagtgcttttttaatttttcatagtttttttttaataaaatggcatattttgcatctacaacttctataatttgaaaaaataaataaacattatcttttttgtg

SEQ ID NO: 14642 - DNA, 835 bp, Homo sapiens
  source 1..835: mol_type = unassigned DNA
gcattttccaggattttcaagtcttcgatgctgtcatgttgagagtccactatccacgtttgtttatccaggaataatgcagaaaatctgagcattcgtgaatctaatcattgagatacttcattttcttagcgtttctggagattacaacatcctgcggttccgtttctgggaactttactgatttatctcccccctcacacaaataagcattgattcctgcatttctgaagatctcaagatctggactactgttgaaaaaatttccagtgaggctcacttatgtctgtaaagatgggaaaaaaatacaagaacattgttctactaaaaggattagaggtcatcaatgattatcattttagaatggttaagtccttactgagcaacgatttaaaacttaatttaaaaatgagagaagagtatgacaaaattcagattgctgacttgatggaagaaaagttccgaggtgatgctggtttgggcaaactaataaaaattttcgaagatataccaacgcttgaagacctggctgaaactcttaaaaaagaaaagttaaaagtaaaaggaccagccctatcaagaaagaggaagaaggaagtggatgctacttcacctgcaccctccacaagcagcactgtcaaaactgaaggagcagaggcaactcctggagctcagaaaagaaaaaaatcaaccaaagaaaaggctggacccaaagggagtaaggtgtccgaggaacagactcagcctccctctcctgcaggagccggcatgtccacagccatgggccgttccccatctcccaagacctcattgtcagctccacccaacagttctt

SEQ ID NO: 14643 - DNA, 1711 bp, Homo sapiens
  source 1..1711: mol_type = unassigned DNA
cttcaactgagaacccgaaaacagtggccaaatgtcaggtaactcccagaagaaatgttctccaaaaacgcccagtgatagtgaaggtactgagtacaacaaagccatttgaatatgagaccccagaaatggagaaaaaaataatgtttcatgctacagtggctacacagacacagttcttccatgtgaaggttttaaacaccagcttgaaggagaaattcaatggaaagaaaatcatcatcatatcagattatttggaatatgatagtctcctagaggtcaatgaagaatctactgtatctgaagctggtcctaaccaaacgtttgaggttccaaataaaatcatcaacagagcaaaggaaactctgaagattgatattcttcacaaacaagcttcaggaaatattgtatatggggtatttatgctacataagaaaacagtaaatcagaagaccacaatctacgaaattcaggatgatagaggaaaaatggatgtagtggggacaggacaatgtcacaatatcccctgtgaagaaggagataagctccaacttttctgctttcgacttagaaaaaagaaccagatgtcaaaactgatttcagaaatgcatagttttatccagataaagaaaaaaacaaacccgagaaacaatgaccccaagagcatgaagctaccccaggaacagcgtcagcttccatatccttcagaggccagcacaaccttccctgagagccatcttcggactcctcagatgccaccaacaactccatccagcagtttcttcaccaagttgaaaccaagactgaagactgaacctgaagaagtttccatagaagacagtgcccagagtgacctcaaagaagtgatggtgctgaacgcaacagaatcatttgtatatgagcccaaagagcagaagaaaatgtttcatgccacagtggcaactgagaatgaagtcttccgagtgaaggtttttaatattgacctaaaggagaagttcaccccaaagaagatcattgccatagcaaattatgtttgccgcaatgggttcctggaggtatatcctttcacacttgtggctgatgtgaatgctgaccgaaacatggagatcccaaaaggattgattagaagtgccagcgtaactcctaaaatcaatcagctttgctcacaaactaaaggaagttttgtgaatggggtgtttgaggtacataagaaaaatgtaaggggtgaattcacttattatgaaatacaagataatacagggaagatggaagtggtggtgcatggacgactgaccacaatcaactgtgaggaaggagataaactgaaactcacctgctttgaattggcaccgaaaagtgggaataccggggagttgagatctgtaattcatagtcacatcaaggtcatcaagaccaggaaaaacaagaaagacatactcaatcctgattcaagtatggaaacttcaccagactttttcttctaaaatctggatgtcattgacgataatgtttatggagataaggtctaagtgcctaaaaaaatgtacatatacctggttgaaatacaacactatacatacacaccaccatatatactagctgttaatcctatggaatggggtattgggagtgcttttttaatttttcatagtttttttttaataaaatggcatattttgcatctacaacttctataatttgaaaaaataaa

SEQ ID NO: 14644 - DNA, 1032 bp, Homo sapiens
  source 1..1032: mol_type = unassigned DNA
ggaccgccgcctggttaaaggcgcttatttcccaggcagccgctgcagtcgccacacctttgcccctgctgcgatgaccctgtcgccacttctgctgttcctgccaccgctgctgctgctgctggacgtccccacggcggcggtgcaggcgtcccctctgcaagcgttagacttctttgggaatgggccaccagttaactacaagacaggcaatctatacctgcgggggcccctgaagaagtccaatgcaccgcttgtcaatgtgaccctctactatgaagcactgtgcggtggctgccgagccttcctgatccgggagctcttcccaacatggctgttggtcatggagatcctcaatgtcacgctggtgccctacggaaacgcacaggaacaaaatgtcagtggcaggtgggagttcaagtgccagcatggagaagaggagtgcaaattcaacaaggtggaggcctgcgtgttggatgaacttgacatggagctagccttcctgaccattgtctgcatggaagagtttgaggacatggagagaagtctgccactatgcctgcagctctacgccccagggctgtcgccagacactatcatggagtgtgcaatgggggaccgcggcatgcagctcatgcacgccaacgcccagcggacagatgctctccagccaccacacgagtatgtgccctgggtcaccgtcaatgggaaacccttggaagatcagacccagctccttacccttgtctgccagttgtaccagggcaagaagccggatgtctgcccttcctcaaccagctccctcaggagtgtttgcttcaagtgatggccggtgagctgcggagagctcatggaaggcgagtgggaacccggctgcctgcctttttttctgatccagaccctcggcacctgctacttaccaactggaaaattttatgcatcccatgaagcccagatacacaaaattccaccccatgatcaagaatcctgctccactaagaatggtgctaaagtaaaactagtttaataagc

SEQ ID NO: 14645 - DNA, 1514 bp, Homo sapiens
  source 1..1514: mol_type = unassigned DNA
gatctggtaaacctgaagcaaatatagaaacctatagggcctgacttcctacataaagtaaggagggtaaaaatggaggctagaataagggttaaaattttgcttctagaacagagaaaatgatttttttcatatatatatgaatatatattatatatacacatatatacatatattcactatagtgtgtatacataaatatataatatatatattgttagtgtagtgtgtgtctgattatttacatgcatatagtatatacacttatgactttagtacccagacgtttttcatttgattaagcattcatttgtattgacacagctgaagtttactggagtttagctgaagtctaatgcaaaattaatagattgttgtcatcctcttaaggtcatagggagaacacacaaatgaaaacagtaaaagaaactgaaagtacagagaaatgttcagaaaatgaaaaccatgtgtttcctattaaaagccatgcatacaagcaatgtcttcagaaaacctagggtccaaggttaagccatatcccagctcagtaaagccaggagcatcctcatttcccaatggccctcctgttccctctactggcagccctagtgatgaccagctatagccctgttggatctctgggctgtgatctgcctcagaaccatggcctacttagcaggaacaccttggtgcttctgcaccaaatgaggagaatctcccctttcttgtgtctcaaggacagaagagacttcaggttcccccaggagatggtaaaagggagccagttgcagaaggcccatgtcatgtctgtcctccatgagatgctgcagcagatcttcagcctcttccacacagagcgctcctctgctgcctggaacatgaccctcctagaccaactccacactggacttcatcagcaactgcaacacctggagacctgcttgctgcaggtagtgggagaaggagaatctgctggggcaattagcagccctgcactgaccttgaggaggtacttccagggaatccgtgtctacctgaaagagaagaaatacagcgactgtgcctgggaagttgtcagaatggaaatcatgaaatccttgttcttatcaacaaacatgcaagaaagactgagaagtaaagatagagacctgggctcatcttgaaatgattctcattgattaatttgccatataacacttgcacatgtgactctggtcaattcaaaagactcttatttcggctttaatcacagaattgactgaattagttctgcaaatactttgtcggtatattaagccagtatatgttaaaaagacttaggttcaggggcatcagtccctaagatgttatttatttttactcatttatttattcttacattttatcatatttatactatttatattcttatataacaaatgtttgcctttacattgtattaagataacaaaacatgttcagctttccatttggttaaatattgtattttgttatttattaaattattttcaaac

SEQ ID NO: 14646 - DNA, 1241 bp, Homo sapiens
  source 1..1241: mol_type = unassigned DNA
ggcagggggcggcatgtgagcgccagaaggcagggatttcacggaaatgaaagtggaagcaaacagcctgcgagcagagcctcctgaggtgtatttcgggtcttgctggggctgagagagaccacagccctttggggggtacaaacaagagttcagttgctgtgaattctgccactgtgcccagctctgaagcctcagctcttgccaaacagacccgagacccatgtcagccccactggatgccgccctccacgcccttcaggaggagcaggccagactcaagatgaggctgtgggacctgcagcagctgagaaaggagctcggggactcccccaaagacaaggtcccattttcagtgcccaagatccccctggtattccgaggacacacccagcaggacccggaagtgcctaagtctttagtttccaatttgcggatccactgccctctgcttgcgggctctgctctgatcacctttgatgaccccaaagtggctgagcaggtgctgcaacaaaaggagcacacgatcaacatggaggagtgccggctgcgggtgcaggtccagcccttggagctgcccatggtcaccaccatccagatgtccagccagttgagtggccggagggtgttggtcactggatttcctgccagcctcaggctgagtgaggaggagctgctggacaagctagagatcttctttggcaagactaggaacggaggtggcgatgtggacgttcgggagctactgccagggagtgtcatgctggggtttgctagggatggagtggctcagcgtctgtgccaaatcggccagttcacagtgccactgggtgggcagcaagtccctctgagagtctctccgtatgtgaacggggagatccagaaggctgagatcaggtcgcagccagttccccgctcggtactggtgctcaacattcctgatatcttggatggcccggagctgcatgacgtcctggagatccacttccagaagcccacccgcgggggcggggaggtagaggccctgacagtcgtaccccaaggacagcagggcctagcagtcttcacctctgagtcaggctaggggcctccccttctcatcctccccacccccccgccaaggttctcacactggcctgggcttgggtgcccatataggaggtctgtatgttcaccaacagtgcggaggggtcacacattgcaaaacactgcccagaacagtaaaaagagcctgcatgcca

SEQ ID NO: 14647 - DNA, 1232 bp, Homo sapiens
  source 1..1232: mol_type = unassigned DNA
gtgagcgccagaaggcagggatttcacggaaatgaaagtggaagcaaacagcctgcgagcagagcctcctgaggtgtatttcgggtcttgctggggctgagagagaccacagccctttggggggtacaaacaagagttcagttgctgtgaattctgccactgtgcccagctctgaagcctcagctcttgccaaacagacccgagacccatgtcagccccactggatgccgccctccacgcccttcaggaggagcaggccagactcaagatgaggctgtgggacctgcagcagctgagaaaggagctcggggactcccccaaagacaaggtcccattttcagtgcccaagatccccctggtattccgaggacacacccagcaggacccggaagtgcctaagtctttagtttccaatttgcggatccactgccctctgcttgcgggctctgctctgatcacctttgatgaccccaaagtggctgagcaggtgctgcaacaaaaggagcacacgatcaacatggaggagtgccggctgcgggtgcaggtccagcccttggagctgcccatggtcaccaccatccaggtgatgatgtccagccagttgagtggccggagggtgttggtcactggatttcctgccagcctcaggctgagtgaggaggagctgctggacaagctagagatcttctttggcaagactaggaacggaggtggcgatgtggacgttcgggagctactgccagggagtgtcatgctggggtttgctagggatggagtggctcagcgtctgtgccaaatcggccagttcacagtgccactgggtgggcagcaagtccctctgagagtctctccgtatgtgaacggggagatccagaaggctgagatcaggtcgcagccagttccccgctcggtactggtgctcaacattcctgatatcttggatggcccggagctgcatgacgtcctggagatccacttccagaagcccacccgcgggggcggggaggtagaggccctgacagtcgtaccccaaggacagcagggcctagcagtcttcacctctgagtcaggctaggggcctccccttctcatcctccccacccccccgccaaggttctcacactggcctgggcttgggtgcccatataggaggtctgtatgttcaccaacagtgcggaggggtcacacattgcaaaacactgcccagaacagtaaaaagagcctgcatgcca

SEQ ID NO: 14648 - DNA, 1687 bp, Homo sapiens
  source 1..1687: mol_type = unassigned DNA
cattttgtgcctgcctagctatccagacagagcagctaccctcagctctagctgatactacagacagtacaacagatcaagaagtatggcagtgacaactcgtttgacatggttgcacgaaaagatcctgcaaaatcattttggagggaagcggcttagccttctctataagggtagtgtccatggattccgtaatggagttttgcttgacagatgttgtaatcaagggcctactctaacagtgatttatagtgaagatcatattattggagcatatgcagaagagagttaccaggaaggaaagtatgcttccatcatcctttttgcacttcaagatactaaaatttcagaatggaaactaggactatgtacaccagaaacactgttttgttgtgatgttacaaaatataactccccaactaatttccagatagatggaagaaatagaaaagtgattatggacttaaagacaatggaaaatcttggacttgctcaaaattgtactatctctattcaggattatgaagtttttcgatgcgaagattcactggatgaaagaaagataaaaggggtcattgagctcaggaagagcttactgtctgccttgagaacttatgaaccatatggatccctggttcaacaaatacgaattctgctgctgggtccaattggagctgggaagtccagctttttcaactcagtgaggtctgttttccaagggcatgtaacgcatcaggctttggtgggcactaatacaactgggatatctgagaagtataggacatactctattagagacgggaaagatggcaaatacctgccgtttattctgtgtgactcactggggctgagtgagaaagaaggcggcctgtgcagggatgacatattctatatcttgaacggtaacattcgtgatagataccagtttaatcccatggaatcaatcaaattaaatcatcatgactacattgattccccatcgctgaaggacagaattcattgtgtggcatttgtatttgatgccagctctattcaatacttctcctctcagatgatagtaaagatcaaaagaattcgaagggagttggtaaacgctggtgtggtacatgtggctttgctcactcatgtggatagcatggatttgattacaaaaggtgaccttatagaaatagagagatgtgagcctgtgaggtccaagctagaggaagtccaaagaaaacttggatttgctctttctgacatctcggtggttagcaattattcctctgagtgggagctggaccctgtaaaggatgttctaattctttctgctctgagacgaatgctatgggctgcagatgacttcttagaggatttgccttttgagcaaatagggaatctaagggaggaaattatcaactgtgcacaaggaaaaaaatagatatgtgaaaggttcacgtaaatttcctcacatcacagaagattaaaattcagaaaggagaaaacacagaccaaagagaagtatctaagaccaaagggatgtgttttattaatgtctaggatgaagaaatgcatagaacattgtagtacttgtaaataactagaaataacatgatttagtcataattgtgaaaaataataataatttttcttggatttatgttctgtatctgtgaaaaaataaatttcttataaaactcgggtctaa

SEQ ID NO: 14649 - DNA, 686 bp, Homo sapiens
  source 1..686: mol_type = unassigned DNA
attttgtgcctgcctagctatccagacagagcagctaccctcagctctagctgatactacagacagtacaacagatagatggaagaaatagaaaagtgattatggacttaaagacaatggaaaatcttggacttgctcaaaattgtactatctctattcaggattatgaagtttttcgatgcgaagattcactggatgaaagaaagataaaaggggtcattgagctcaggaagagcttactgtctgccttgagaacttatgaaccatatggatccctggttcaacaaatacgaattctgctgctgggtccaattggagctgggaagtccagctttttcaactcagtgaggtctgttttccaagggcatgtaacgcatcaggctttggtgggcactaatacaactgggatatctgagaagtataggacatactctattagagacgggaaagatggcaaatacctgccgtttattctgtgtgactcactggggctgagtgagaaagaaggcggcctgtgcagggatgacatattctatatcttgaacggtaacattcgtgatagataccagtttaatcccatggaatcaatcaaattaaatcatcatgactacattgattccccatcgctgaaggacagaattcattgtgtggcatttgtatttgatgccagctctattcaatacttc

SEQ ID NO: 14650 - DNA, 497 bp, Homo sapiens
  source 1..497: mol_type = unassigned DNA
ctctttctgacatctcggtggttagcaattattcctctgagtgggagctggaccctgtaaaggatgttctaattctttctgctctgagacgaatgctatgggctgcagatgacttcttagaggatttgccttttgagcaaataggtagatggtttggtggtgtggaagcttggaagcggtcagggaatctaagggaggaaattatcaactgtgcacaaggaaaaaaatagatatgtgaaaggttcacgtaaatttcctcacatcacagaagattaaaattcagaaaggagaaaacacagaccaaagagaagtatctaagaccaaagggatgtgttttattaatgtctaggatgaagaaatgcatagaacattgtagtacttgtaaataactagaaataacatgatttagtcataattgtgaaaaataataataatttttcttggatttatgttctgtatctgtgaaaaaataaatttcttataaaactcgggtctaa

SEQ ID NO: 14651 - DNA, 1530 bp, Homo sapiens
  source 1..1530: mol_type = unassigned DNA
attttgtgcctgcctagctatccagacagagcagctaccctcagctctagctgatactacagacagtacaacagattcactggatgaaagaaagataaaaggggtcattgagctcaggaagagcttactgtctgccttgagaacttatgaaccatatggatccctggttcaacaaatacgaattctgctgctgggtccaattggagctgggaagtccagctttttcaactcagtgaggtctgttttccaagggcatgtaacgcatcaggctttggtgggcactaatacaactgggatatctgagaagtataggacatactctattagagacgggaaagatggcaaatacctgccgtttattctgtgtgactcactggggctgagtgagaaagaaggcggcctgtgcagggatgacatattctatatcttgaacggtaacattcgtgatagataccagtttaatcccatggaatcaatcaaattaaatcatcatgactacattgattccccatcgctgaaggacagaattcattgtgtggcatttgtatttgatgccagctctattcaatacttctcctctcagatgatagtaaagatcaaaagaattcgaagggagttggtaaacgctggtgtggtacatgtggctttgctcactcatgtggatagcatggatttgattacaaaaggtgaccttatagaaatagagagatgtgagcctgtgaggtccaaggtaatgaatgatgcccttcgtaaacacattttctggggtatgttactacaatcacatactagtgtgtataaaaataaaaacaagcagctactgggtttaagaagaattacaaaattacttaaatagggcccgtttcccaagatttaaaaattaaatacagttgttccttggtatttgcaggggattagttccaggactttgcattgttaccaaaatctgtggatgcttaatggcatagtatttgtatttgcatataacctatgcacatcctttggtatactttaaataatatctagattacttataatacctaacccaaattaaatgctttgtaaatagttgttctactctatttttcattattaatgacaagaaaataacctgtacatgttcagtacagatgaaatattttttcaaaatttatttttttgagatgaagtttctgttgcccaggctggagtgcagtggcatgatttcggctcactgcaacctccgcctcctgggttcaagtgattctcctgcctctgtctctcagcagctgggattacaggcacatgccaccatgcctggctaatcttttctgtatttttgtagagattaggtttcaccatgttggccaggctggtctcaaactcctgacctcaggtgatctgctcatctcggtcccccaaagttctgggattaaggcatgagtccctatacccagccattttttttcaattttttttgagccttagttgaactcacagatgcagaacccatggatacagaaggctaactgtctatctttacactgacat

SEQ ID NO: 14652 - DNA, 1377 bp, Homo sapiens
  source 1..1377: mol_type = unassigned DNA
tttctttcctagagtctctgaagccacagatctcttaagaactttctgtctccaaaccgtggctgctcgataaatcagacagaacagttaatcctcaatttaagcctgatctaacccctagaaacaggaattaaggataacctagacgacataaagaggataattaaagccagagagcacagaaataggcttctagcagacatcagagactataggccctatgcagacttggtttcagaaattcgtattcttttggtgggtccagttgggtctggaaagtccagttttttcaattcagtcaagtctatttttcatggccatgtgactggccaagccgtagtggggtctgatatcaccagcataaccgagcggtataggatatattctgttaaagatggaaaaaatggaaaatctctgccatttatgttgtgtgacactatggggctagatggggcagaaggagcaggactgtgcatggatgacattccccacatcttaaaaggttgtatgccagacagatatcagtttaattcccgtaaaccaattacacctgagcattctacttttatcacctctccatctctgaaggacaggattcactgtgtggcttatgtcttagacatcaactctattgacaatctctactctaaaatgttggcaaaagtgaagcaagttcacaaagaagtattaaactgtggtatagcatatgtggccttgcttactaaagtggatgattgcagtgaggttcttcaagacaactttttaaacatgagtagatctatgacttctcaaagccgggtcatgaatgtccataaaatgctaggcattcctatttccaatattttgatggttggaaattatgcttcagatttggaactggaccccatgaaggatattctcatcctctctgcactgaggcagatgctgcgggctgcagatgattttttagaagatttgcctcttgaggaaactggtgcaattgagagagcgttacagccctgcatttgagataagttgccttgattctgacatttggcccagcctgtactggtgtgccgcaatgagagtcaatctctattgacagcctgcttcagattttgcttttgttcgttttgccttctgtccttggaacagtcatatctcaagttcaaaggccaaaacctgagaagcggtgggctaagataggtcctactgcaaaccacccctccatatttccgtaccatttacaattcagtttctgtgacatctttttaaaccactggaggaaaaatgagatattctctaatttattcttctataacactctatatagagctatgtgagtactaatcacattgaataatagttataaaattattgtatagacatctgcttctt

SEQ ID NO: 14653 - DNA, 2528 bp, Homo sapiens
  source 1..2528: mol_type = unassigned DNA
gctgccagctgagtttttttgctgctttgagtctcagttttctttctttcctagagtctctgaagccacagatctcttaagaactttctgtctccaaaccgtggctgctcgataaatcagacagaacagttaatcctcaatttaagcctgatctaacccctagaaacagatatagaacaatggaagtgacaacaagattgacatggaatgatgaaaatcatctgcgcaagctgcttggaaatgtttctttgagtcttctctataagtctagtgttcatggaggtagcattgaagatatggttgaaagatgcagccgtcagggatgtactataacaatggcttacattgattacaatatgattgtagcctttatgcttggaaattatattaatttacatgaaagttctacagagccaaatgattccctatggttttcacttcaaaagaaaaatgacaccactgaaatagaaactttactcttaaatacagcaccaaaaattattgatgagcaactggtgtgtcgtttatcgaaaacggatattttcattatatgtcgagataataaaatttatctagataaaatgataacaagaaacttgaaactaaggttttatggccaccgtcagtatttggaatgtgaagtttttcgagttgaaggaattaaggataacctagacgacataaagaggataattaaagccagagagcacagaaataggcttctagcagacatcagagactataggccctatgcagacttggtttcagaaattcgtattcttttggtgggtccagttgggtctggaaagtccagttttttcaattcagtcaagtctatttttcatggccatgtgactggccaagccgtagtggggtctgatatcaccagcataaccgagcggtataggatatattctgttaaagatggaaaaaatggaaaatctctgccatttatgttgtgtgacactatggggctagatggggcagaaggagcaggactgtgcatggatgacattccccacatcttaaaaggttgtatgccagacagatatcagtttaattcccgtaaaccaattacacctgagcattctacttttatcacctctccatctctgaaggacaggattcactgtgtggcttatgtcttagacatcaactctattgacaatctctactctaaaatgttggcaaaagtgaagcaagttcacaaagaagtattaaactgtggtatagcatatgtggccttgcttactaaagtggatgattgcagtgaggttcttcaagacaactttttaaacatgagtagatctatgacttctcaaagccgggtcatgaatgtccataaaatgctaggcattcctatttccaatattttgatggttggaaattatgcttcagatttggaactggaccccatgaaggatattctcatcctctctgcactgaggcagatgctgcgggctgcagatgattttttagaagatttgcctcttgaggaaactggtgcaattgagagagcgttacagccctgcatttgagataagttgccttgattctgacatttggcccagcctgtactggtgtgccgcaatgagagtcaatctctattgacagcctgcttcagattttgcttttgttcgttttgccttctgtccttggaacagtcatatctcaagttcaaaggccaaaacctgagaagcggtgggctaagataggtcctactgcaaaccacccctccatatttccgtaccatttacaattcagtttctgtgacatctttttaaaccactggaggaaaaatgagatattctctaatttattcttctataacactctatatagagctatgtgagtactaatcacattgaataatagttataaaattattgtatagacatctgcttcttaaacagattgtgagttctttgagaaacagcgtggattttacttatctgtgtattcacagagcttagcacagtgcctggtaatgagcaagcatacttgccattacttttccttcccactctctccaacatcacattcactttaaatttttctgtatatagaaaggaaaactagcctgggcaacatgatgaaaccccatctccactgcaaaaaaaaaaaaaaaaaataagaaagaacaaaacaaaccccacaaaaattagctgggtatgatggcacgtgcctgtagtcccagttactcaggatgattgattgagccttggaggtggaggctacagtgagctgagattgtgccactgtactctagccagggagaaagagtgagatcctggctcaaaaaaaccaaataaaacaaaacaaacaaacgaaaaacagaaaggaagactgaaagagaatgaaaagctggggagaggaaataaaaataaagaaggaagagtgtttcatttatatctgaatgaaaatatgaatgactctaagtaattgaattaattaaaatgagccaacttttttttaacaatttacattttatttctatgggaaaaaataaatattcctcttctaacaaa

SEQ ID NO: 14654 - DNA, 554 bp, Homo sapiens
  source 1..554: mol_type = unassigned DNA
cagtgcagacaggcttggctttgaacagcatccagctccacgattctatcagctaaattttttttttgtactttaagaaatagggatagtcatagtgtttactgtacgcagttgttctgaggagaaattaggaaaagagtctctgaagccacagatctcttaagaactttctgtctccaaaccgtggctgctcgataaatcagacagaacagttaatcctcaatttaagcctgatctaacccctagaaacagatatagaacaatggaagtgacaacaagattgacatggaatgatgaaaatcatctgcgcaagctgcttggaaatgtttctttgagtcttctctataagtctagtgttcatggaggtagcattgaagatatggttgaaagatgcagccgtcagggatgtactataacaatggcttacattgattacaatatgattgtagcctttatgcttggaaattatattaatttacatgaaagttctacagagccaaatgattccctatggttttcacttcaaaagaaaaatgacaccactgaaatagaaa

SEQ ID NO: 14655 - DNA, 1880 bp, Homo sapiens
  source 1..1880: mol_type = unassigned DNA
gcaaggacacacccacagcttacaccattggctgctgtttagctcccttatataacactgtcttggggtttaaacgtaactgaaaatccacaagacagaatagccagatctcagaggagcctggctaagcaaaaccctgcagaacggctgcctaatttacagcaaccatgagtacaaatggtgatgatcatcaggtcaaggatagtctggagcaattgagatgtcactttacatgggagttatccattgatgacgatgaaatgcctgatttagaaaacagagtcttggatcagattgaattcctagacaccaaatacagtgtgggaatacacaacctactagcctatgtgaaacacctgaaaggccagaatgaggaagccctgaagagcttaaaagaagctgaaaacttaatgcaggaagaacatgacaaccaagcaaatgtgaggagtctggtgacctggggcaactttgcctggatgtattaccacatgggcagactggcagaagcccagacttacctggacaaggtggagaacatttgcaagaagctttcaaatcccttccgctatagaatggagtgtccagaaatagactgtgaggaaggatgggccttgctgaagtgtggaggaaaaaattatgaacgggccaaggcctgctttgaaaaggtgcttgaagtggaccctgaaaaccctgaatccagcgctgggtatgcgatctctgcctatcgcctggatggctttaaattagccacaaaaaatcacaagccattttctttgcttcccctaaggcaggctgtccgcttaaatccagacaatggatatattaaggttctccttgccctgaagcttcaggatgaaggacaggaagctgaaggagaaaagtacattgaagaagctctagccaacatgtcctcacagacctatgtctttcgatatgcagccaagttttaccgaagaaaaggctctgtggataaagctcttgagttattaaaaaaggccttgcaggaaacacccacttctgtcttactgcatcaccagatagggctttgctacaaggcacaaatgatccaaatcaaggaggctacaaaagggcagcctagagggcagaacagagaaaagctagacaaaatgataagatcagccatatttcattttgaatctgcagtggaaaaaaagcccacatttgaggtggctcatctagacctggcaagaatgtatatagaagcaggcaatcacagaaaagctgaagagaattttcaaaaattgttatgcatgaaaccagtggtagaagaaacaatgcaagacatacatttccactatggtcggtttcaggaatttcaaaagaaatctgacgtcaatgcaattatccattatttaaaagctataaaaatagaacaggcatcattaacaagggataaaagtatcaattctttgaagaaattggttttaaggaaacttcggagaaaggcattagatctggaaagcttgagcctccttgggttcgtctacaaattggaaggaaatatgaatgaagccctggagtactatgagcgggccctgagactggctgctgactttgagaactctgtgagacaaggtccttaggcacccagatatcagccactttcacatttcatttcattttatgctaacatttactaatcatcttttctgcttactgttttcagaaacattataattcactgtaatgatgtaattcttgaataataaatctgacaaaatattagttgtgttcaacaattagtgaaacagaatgtgtgtatgcatgtaagaaagagaaatcatttgtatgagtgctatgtagtagagaaaaaatgttagttaactttgtaggaaataaaacattggacttacactaaa

SEQ ID NO: 14656 - DNA, 2769 bp, Homo sapiens
  source 1..2769: mol_type = unassigned DNA
tttgctatgtgaataatgctgctatgaatatggacaaataaataatctgcttgagtctctgctttcacttctttttgggtataaaaccaaaagtggaattgctggatcaaatggtaattctatggttaatttttctgaggaattaccataccatttttcacagcacttgcccccttttacattcctactagcagtgcacatttctctagattctcaccaataattgttatatcctgctttttttttaaaataatagccaacctaacagacatgaagtggtatctcattgtggtttttatttgcatttcactaatgattagtgatattgagcatctttgcatatgtttattggccatttgtatattttcttttgggaaatgtctatttaagtcctttgcccatttcttaatcagttgtttgttttttgttgctgagttgtagaggttctttatctattctgtatattaatcccctatcaggtacaagatttgcaaatattttccttcattctgtgatttgtcttatcactctgttgatagtatccttccatgcataaaagtttttaattttggtggagtccagcttaattatttttactgttattgcctgtgattttggtatcatatctaatgaatcactgccaattgccaaatccaatgttacaaagctttttcctttcttctgagttttataattttagggcttacatttaggtctttcatccattttgagttaatttttgtatatggcataaagtaagggtccaactttaccctttttcatcatatatccagctttcccacacatttgttgaaaagaccatcctttccccattagatggtcttgtcattcttattgaaaatcattccaccattgttatggaatgaattgtgcacttcccacccacccctgcccaaaattcttaagttgaagccttaaccctcttatgttgaactgttgtttggagatagagtctaaaaagaggtaataaaggttaaataaaatcgtaagagtgaggccttaatccaacagagctggtgtccttagacaccaaagctcactctctctctctctgtgccactgaggaaaggccacttaaggatgcagcaagaaggagccatctgcaatccaggaagaaattccttgccaggaaccaaattggttgtcaccttcatctaggacttctagcctcgagaacttacaaatggtgatgatcatcaggtcaaggatagtctggagcaattgagatgtcactttacatgggagttatccattgatgacgatgaaatgcctgatttagaaaacagagtcttggatcagattgaattcctagacaccaaatacagtgtgggaatacacaacctactagcctatgtgaaacacctgaaaggccagaatgaggaagccctgaagagcttaaaagaagctgaaaacttaatgcaggaagaacatgacaaccaagcaaatgtgaggagtctggtgacctggggcaactttgcctggatgtattaccacatgggcagactggcagaagcccagacttacctggacaaggtggagaacatttgcaagaagctttcaaatcccttccgctatagaatggagtgtccagaaatagactgtgaggaaggatgggccttgctgaagtgtggaggaaaaaattatgaacgggccaaggcctgctttgaaaaggtgcttgaagtggaccctgaaaaccctgaatccagcgctgggtatgcgatctctgcctatcgcctggatggctttaaattagccacaaaaaatcacaagccattttctttgcttcccctaaggcaggctgtccgcttaaatccagacaatggatatattaaggttctccttgccctgaagcttcaggatgaaggacaggaagctgaaggagaaaagtacattgaagaagctctagccaacatgtcctcacagacctatgtctttcgatatgcagccaagttttaccgaagaaaaggctctgtggataaagctcttgagttattaaaaaaggccttgcaggaaacacccacttctgtcttactgcatcaccagatagggctttgctacaaggcacaaatgatccaaatcaaggaggctacaaaagggcagcctagagggcagaacagagaaaagctagacaaaatgataagatcagccatatttcattttgaatctgcagtggaaaaaaagcccacatttgaggtggctcatctagacctggcaagaatgtatatagaagcaggcaatcacagaaaagctgaagagaattttcaaaaattgttatgcatgaaaccagtggtagaagaaacaatgcaagacatacatttccactatggtcggtttcaggaatttcaaaagaaatctgacgtcaatgcaattatccattatttaaaagctataaaaatagaacaggcatcattaacaagggataaaagtatcaattctttgaagaaattggttttaaggaaacttcggagaaaggcattagatctggaaagcttgagcctccttgggttcgtctacaaattggaaggaaatatgaatgaagccctggagtactatgagcgggccctgagactggctgctgactttgagaactctgtgagacaaggtccttaggcacccagatatcagccactttcacatttcatttcattttatgctaacatttactaatcatcttttctgcttactgttttcagaaacattataattcactgtaatgatgtaattcttgaataataaatctgacaaaat

SEQ ID NO: 14657 - DNA, 3489 bp, Homo sapiens
  source 1..3489: mol_type = unassigned DNA
actttcccttttgtaacgtcagctgaagggaaacaaacaaaaaggaaccagaggccacttgtatatataggtctcttcagcatttattggtggcagaagaggaagatttctgaagagtgcagctgcctgaaccgagccctgccgaacagctgagaattgcactgcaaccatgagtgagaacaataagaattccttggagagcagcctacggcaactaaaatgccatttcacctggaacttgatggagggagaaaactccttggatgattttgaagacaaagtattttaccggactgagtttcagaatcgtgaattcaaagccacaatgtgcaacctactggcctatctaaagcacctcaaagggcaaaacgaggcagccctggaatgcttacgtaaagctgaagagttaatccagcaagagcatgctgaccaggcagaaatcagaagtctggtcacctggggaaactatgcctgggtctactatcacatgggccgactctcagacgttcagatttatgtagacaaggtgaaacatgtctgtgagaagttttccagtccctatagaattgagagtccagagcttgactgtgaggaagggtggacacggttaaagtgtggaggaaaccaaaatgaaagagcgaaggtgtgctttgagaaggctctggaaaagaagccaaagaacccagaattcacctctggactggcaatagcaagctaccgtctggacaactggccaccatctcagaacgccattgaccctctgaggcaagccattcggctgaatcctgacaaccagtaccttaaagtcctcctggctctgaagcttcataagatgcgtgaagaaggtgaagaggaaggtgaaggagagaagttagttgaagaagccttggagaaagccccaggtgtaacagatgttcttcgcagtgcagccaagttttatcgaagaaaagatgagccagacaaagcgattgaactgcttaaaaaggctttagaatacataccaaacaatgcctacctgcattgccaaattgggtgctgctatagggcaaaagtcttccaagtaatgaatctaagagagaatggaatgtatgggaaaagaaagttactggaactaataggacacgctgtggctcatctgaagaaagctgatgaggccaatgataatctcttccgtgtctgttccattcttgccagcctccatgctctagcagatcagtatgaagacgcagagtattacttccaaaaggaattcagtaaagagcttactcctgtagcgaaacaactgctccatctgcggtatggcaactttcagctgtaccaaatgaagtgtgaagacaaggccatccaccactttatagagggtgtaaaaataaaccagaaatcaagggagaaagaaaagatgaaagacaaactgcaaaaaattgccaaaatgcgactttctaaaaatggagcagattctgaggctttgcatgtcttggcattccttcaggagctgaatgaaaaaatgcaacaagcagatgaagactctgagaggggtttggagtctggaagcctcatcccttcagcatcaagctggaatggggaatgaagaatagagatgtggtgcccactaggctactgctgaaagggagctgaaattcctccaccaagttggtattcaaaatatgtaatgactggtatggcaaaagattggactaagacactggccataccactggacagggttatgttaacacctgaattgctgggtcttgagagagcccaaggagttctgggagagggaccagattggggggtaggtccacgggcttggtgatagaattatttctcgattgacttcttgagtgcaatttgaactgtaacatttgcttagtcacctttagtggagtaatctactgggcttgtttctatatttatataaagcagccaaatccttcatgtaatattgaagtccatttttgcaatgttgttccatacttggagtcattttgcatcccatagaggttagtcctgcatagccagtaatgtgctaagttcatccaaaagctggcggaccaaagtctaaatagggctcagtatcccccatcgcttatctctgcctccttcctcctccttcccagtctatcatcaaccttgagtattctacacaatgtgaattcaagtgcctgattaattgaggtggcaacatagtttgagacgagggcagagaacaggaagatacatagctagaagcgacgggtacaaaaagcaatgtgtacaagaagactttcagcaagtatacagagagttcacctctactctgccctcctcatagtcataatgtagcaagtaaagaatgagaatggattctgtacaatacactagaaaccaacataatgtatttctttaaaacctgtgtgaaaaaataaatgttccaccagtagggataggggaaaagtaaccaaaagagagaaagagaaaggaatgctggtttatctttgtagattgtaatcgaatggagaaatttgcagtattttagccactattaggaattttttttttttgtaaaatgaagactgaactctgttcaaatgctttcatgaacctggtttgagacggtaggaaagcaacaaaacgtgggaacctggtgactaagggcctggtgcaaggacttgggaaatgtcattgataatagatggtggggttttcccccctttagaaatgttggatattaagtgatataaacacttcttttaactccgaaaatcttctgagaaatcacaaaattcacggtatgcttggaacgattgagattttctaggtagatgctgaatagcctagacatcaaagttggtgtgaaccaaaatagagtcagctgacccagcatcagccacactctgggttggaaaatgtttgcctgttggaattaatttaagcttaagtatatatcaacattattttattgtgcaattaaaacaatacaaattcatggttttttaaagttaaaaattctaaccactgtaacaacagtttttgtgttattttctgtattaaacatcttgttgcacgcatttgaggtcatcagggtgcaaaatttgtattcctgaaaatgtcatatattttcattaataaataacctaaatatgataaaacataaagcagtgttctggttcatctggaattttgctgtactttaaatctttcagactcagctactgataaatgaaacgttacacaggtgtgaaccaaatccaaataacctcgactggtctactatcataatcacctgaacagaacaaaactttttcctcagctttaagagtccagggcttcggataacagctgccatctgccacctgctaccattgacctacgtgaacacagacattctgtctccaccttgatggtgggtgggctgctccccttttctttgttaaattttgtgctttcatcacattttctctattctgacctctgttatgagaaataaaagtcactgattccatttta

SEQ ID NO: 14658 - DNA, 1834 bp, Homo sapiens
  source 1..1834: mol_type = unassigned DNA
gttaaaaccagactgcactccttctggctcctggttcattcaaggtctacatagttaaaggttgttccagagggatgtgtgtaattcctcccagtatttgatgttcctttattacttattttcacttgagccaacagcctgaactggtcaggctttgggctgatgccagctgctttatctggtagcactgttacataaaattaacatttattggtgatcactaggtgccaacattatgcgaagaactttacgtggacatcccatttaattctcagaagccgatcacaagctcttcacggggatttctgctgccgccaccgcccactcttacccccgccgcttctcgactctgttgttagccgaagactcgcctctcagccgcccgccgcacagacgcacgagtaaaaagtgcagctccatcggctgatcctcgctaagctccgactctgggcggcaccgggcgtcccacgatgccgaagaacaagaagcggaacactccccaccgcggtagcagtgctggcggcggcgggtcaggagcagccgcagcgacggcggcgacagcaggtggccagcatcgaaatgttcagccttttagtgatgaagatgcatcaattgaaacaatgagccattgcagtggttatagcgatccttccagttttgctgaagatggaccagaagtccttgatgaggaaggaactcaagaagacctagagtacaagttgaagggattaattgacctaaccctggataagagtgcgaagacaaggcaagcagctcttgaaggtattaaaaatgcactggcttcaaaaatgctgtatgaatttattctggaaaggagaatgactttaactgatagcattgaacgctgcctgaaaaaaggtaagagtgatgagcaacgtgcagctgcagcgttagcatctgttctttgtattcagctgggccctggaattgaaagtgaagagattttgaaaactcttggaccaatcctaaagaaaatcatttgtgatgggtcagctagtatgcaggctaggcaaacttgtgcaacttgctttggtgtttgctgttttattgccacagatgacattactgaactatactcaactctggaatgtttggaaaatatcttcactaaatcctatctcaaagagaaagacactactgttatttgcagcactcctaatacagtgcttcatatcagctctcttcttgcatggacactactgctgaccatatgcccaatcaatgaagtgaagaaaaagcttgagatgcatttccataagcttccaagcctcctctcttgtgatgatgtaaacatgagaatagctgctggtgaatctttggcacttctctttgaattggccagaggaatagagagtgactttttttatgaagacatggagtccttgacgcagatgcttagggccttggcaacagatggaaataaacaccgggccaaagtggacaagagaaagcagcggtcagttttcagagatgtcctgagggcagtggaggaacgggattttccaacagaaaccattaaatttggtcctgaacgcatgtatattgattgctgggtaaaaaaacacacctatgacacctttaaggaggttcttggatcagggatgcagtaccacttgcagtcaaatgaattccttcgaaatgtatttgaacttggacccccagtgatgcttgatgctgcaacgcttaaaacgatgaagatttctcgtttcgaaaggcatttatataactctgcagccttcaaagctcgaaccaaagctagaagcaaatgtcgagataagagagcagatgttggagaattcttctagattttcag

SEQ ID NO: 14659 - DNA, 2290 bp, Homo sapiens
  source 1..2290: mol_type = unassigned DNA
gctacttaaggcgtcgtggcctcccctgccccgccttagctcccgcgctagagagaaacatgtatcgttttcgatcacagctcttcacggggatttctgctgccgccaccgcccactcttacccccgccgcttctcgactctgttgttagccgaagactcgcctctcagccgcccgccgcacagacgcacgagtaaaaagtgcagctccatcggctgatcctcgctaagctccgactctgggcggcaccgggcgtcccacgatgccgaagaacaagaagcggaacactccccaccgcggtagcagtgctggcggcggcgggtcaggagcagccgcagcgacggcggcgacagcaggtggccagcatcgaaatgttcagccttttagtgatgaagatgcatcaattgaaacaatgagccattgcagtggttatagcgatccttccagttttgctgaagatggaccagaagtccttgatgaggaaggaactcaagaagacctagagtacaagttgaagggattaattgacctaaccctggataagagtgcgaagacaaggcaagcagctcttgaaggtattaaaaatgcactggcttcaaaaatgctgtatgaatttattctggaaaggagaatgactttaactgatagcattgaacgctgcctgaaaaaaggtaagagtgatgagcaacgtgcagctgcagcgttagcatctgttctttgtattcagctgggccctggaattgaaagtgaagagattttgaaaactcttggaccaatcctaaagaaaatcatttgtgatgggtcagctagtatgcaggctaggcaaacttgtgcaacttgctttggtgtttgctgttttattgccacagatgacattactgaactatactcaactctggaatgtttggaaaatatcttcactaaatcctatctcaaagagaaagacactactgttatttgcagcactcctaatacagtgcttcatatcagctctcttcttgcatggacactactgctgaccatatgcccaatcaatgaagtgaagaaaaagcttgagatgcatttccataagcttccaagcctcctctcttgtgatgatgtaaacatgagaatagctgctggtgaatctttggcacttctctttgaattggccagaggaatagagagtgactttttttatgaagacatggagtccttgacgcagatgcttagggccttggcaacagatggaaataaacaccgggccaaagtggacaagagaaagcagcggtcagttttcagagatgtcctgagggcagtggaggaacgggattttccaacagaaaccattaaatttggtcctgaacgcatgtatattgattgctgggtaaaaaaacacacctatgacacctttaaggaggttcttggatcagggatgcagtaccacttgcagtcaaatgaattccttcgaaatgtatttgaacttggacccccagtgatgcttgatgctgcaacgcttaaaacgatgaagatttctcgtttcgaaaggcatttatataactctgcagccttcaaagctcgaaccaaagctagaagcaaatgtcgagataagagagcagatgttggagaattcttctagattttcagaacttgaagactattttctaatttctatttttttttctatttcaatgtatttaaactctagacacagtttttatcctggattaacttagataacttttgtagcagtggttatattgcttataatttaatgtacaatactattgaaactggtgagttctgattattaaatattctctgtaaatcagtaaacatgtataaagtatttgtaatgtttggtcataatttatttatgaagacagcaaaagactgatttcatgatggggaaaacaattagccaaagtttaatttcttacactgtggttgtcaagaatactgatttactataatgatatatacatgcaagatatttaacttaatatcttagacaagagttctgggtacaattttgggatctagttcccctggaaaagctgctgtatttttaatttttaatggaatgtagcttttaaaatcctgtcactggcatcaacaaaaggaattataccatgagaccttatagctgtacttaaaagccattcagttcagctattgggagttcatgatgaattagcatatgccagaaaggttgctaaccttaacatctgagagcagtaacactgattttatctgctgtatgagactttgtgcattttactttgaaataaagatttttttccacactgaaa

SEQ ID NO: 14660 - DNA, 429 bp, Homo sapiens
  source 1..429: mol_type = unassigned DNA
agttccaaggcgggggcgcgccgaggcaggggtggggtcaccaggagaaaagcaagtgggcagaaaagcccgttgggaagagacggctgggaggaggccccggccccagccttactacgtttcccagaattcagtgaggccacgaagacaggctccctgggcgcggacggaagactggccgcatgggatttgtagctcttcacggggatttctgctgccgccaccgcccactcttacccccgccgcttctcgactctgttgttagccgaagactcgcctctcagccgcccgccgcacagacgcacgagtaaaaagtgcagctccatcggctgatcctcgctaagctccgactctgggcggcaccgggcgtcccacgatgccgaagaacaagaagcggaacactccccaccgcggtagcagtgctggcgg

SEQ ID NO: 14661 - DNA, 574 bp, Homo sapiens
  source 1..574: mol_type = unassigned DNA
agctgtaaatgggtcaggagaccagagtggacagagtaggccctggaatgcttgctcggaggcctgccatgaaggatttctgcttgcttccccaccctaccccgggggcaggatgactcagcacttcctattgttgtgaaggccaaccccaggaggccctaccaaggctgactgctgttaaaaccagactgcactccttctggctcctggttcattcaaggtctacatagttaaaggtgccaacattatgcgaagaactttacgtggacatcccatttaattctcagaagccgatcacaagctcttcacggggatttctgctgccgccaccgcccactcttacccccgccgcttctcgactctgttgttagccgaagactcgcctctcagccgcccgccgcacagacgcacgagtaaaaagtgcagctccatcggctgatcctcgctaagctccgactctgggcggcaccgggcgtcccacgatgccgaagaacaagaagcggaacactccccaccgcggtagcagtgctggcggcggcgggtcaggagcagccgcagcgacggcggcgacagc

SEQ ID NO: 14662 - DNA, 570 bp, Homo sapiens
  source 1..570: mol_type = unassigned DNA
atagctgccagctggaagccgactctcgtcatagggcatactcgccccactgtgcatcgccggtgcctacctcacccagttccaaggcgggggcgcgccgaggcaggggtggggtcaccaggagaaaagcaagtgggcagaaaagcccgttgggaagagacggctgggaggaggccccggccccagccttactacgtttcccagaattcagtgaggccacgaagacaggctccctgggcgcggacggaagactggccgcatgggatttgtagccgaagactcgcctctcagccgcccgccgcacagacgcacgagtaaaaagtgcagctccatcggctgatcctcgctaagctccgactctgggcggcaccgggcgtcccacgatgccgaagaacaagaagcggaacactccccaccgcggtagcagtgctggcggcggcgggtcaggagcagccgcagcgacggcggcgacagcaggtggccagcatcgaaatgttcagccttttagtgatgaagatgcatcaattgaaacaatgagccattgcagtggttatagcgatccttccagtt

SEQ ID NO: 14663 - DNA, 1597 bp, Homo sapiens
  source 1..1597: mol_type = unassigned DNA
acaatgctgggacggtgcctggtctgaggatatttcttaccactgtgtttcagcttttcctcatctgaatcaaacatttgaattctttctagaaggtggccagcatcgaaatgttcagccttttagtgatgaagatgcatcaattgaaacaatgagccattgcagtggttatagcgatccttccagttttgctgaagatggaccagaagtccttgatgaggaaggaactcaagaagacctagagtacaagttgaagggattaattgacctaaccctggataagagtgcgaagacaaggcaagcagctcttgaaggtattaaaaatgcactggcttcaaaaatgctgtatgaatttattctggaaaggagaatgactttaactgatagcattgaacgctgcctgaaaaaaggtaagagtgatgagcaacgtgcagctgcagcgttagcatctgttctttgtattcagctgggccctggaattgaaagtgaagagattttgaaaactcttggaccaatcctaaagaaaatcatttgtgatgggtcagctagtatgcaggctaggcaaacttgtgcaacttgctttggtgtttgctgttttattgccacagatgacattactgaactatactcaactctggaatgtttggaaaatatcttcactaaatcctatctcaaagagaaagacactactgttatttgcagcactcctaatacagtgcttcatatcagctctcttcttgcatggacactactgctgaccatatgcccaatcaatgaagtgaagaaaaagcttgagatgcatttccataagcttccaagcctcctctcttgtgatgatgtaaacatgagaatagctgctggtgaatctttggcacttctctttgaattggccagaggaatagagagtgactttttttatgaagacatggagtccttgacgcagatgcttagggccttggcaacagatggaaataaacaccgggccaaagtggacaagagaaagcagcggtcagttttcagagatgtcctgagggcagtggaggaacgggattttccaacagaaaccattaaatttggtcctgaacgcatgtatattgattgctgggtaaaaaaacacacctatgacacctttaaggaggttcttggatcagggatgcagtaccacttgcagtcaaatgaattccttcgaaatgtatttgaacttggacccccagtgatgcttgatgctgcaacgcttaaaacgatgaagatttctcgtttcgaaaggcatttatataactctgcagccttcaaagctcgaaccaaagctagaagcaaatgtcgagataagagagcagatgttggagaattcttctagattttcagaacttgaagactattttctaatttctatttttttttctatttcaatgtatttaaactctagacacagtttttatcctggattaacttagataacttttgtagcagtggttatattgcttataatttaatgtacaatactattgaaactggtgagttctgattattaaatattctctgtaaatcagtaaacatgtataaagtatttgtaatgtttggtcataatttatttatg

SEQ ID NO: 14664 - DNA, 1114 bp, Homo sapiens
  source 1..1114: mol_type = unassigned DNA
cccacgatgccgaagaacaagaagcggaacactccccaccgcggtagcagtgctggcggcggcgggtcaggagcagccgcagcgacggcggcgacagcaggtggccagcatcgaaatgttcagccttttagtgatgaagatgcatcaattgaaacaatgagccattgcagtggttatagcgatccttccagttttgctgaagatggaccagaagtccttgatgaggaaggaactcaagaagacctagagtacaagttgaagggattaattgacctaaccctggataagagtgcgaagacaaggcaagcagctcttgaaggtattaaaaatgcactggcttcaaaaatgctgtatgaatttattctggaaaggagaatgactttaactgatagcattgaacgctgcctgaaaaaagtgtgcaacttgctttggtgtttgctgttttattgccacagatgacattactgaactatactcaactctggaatgtttggaaaatatcttcactaaatcctatctcaaagagaaagacactactgttatttgcagcactcctaatacagtgcttcatatcagctctcttcttgcatggacactactgctgaccatatgcccaatcaatgaagtgaagaaaaagcttgagatgcatttccataagcttccaagcctcctctcttgtgatgatgtaaacatgagaatagctgctggtgaatctttggcacttctctttgaattggccagaggaatagagagtgactttttttatgaagacatggagtccttgacgcagatgcttagggccttggcaacagatggaaataaacaccgggccaaagtggacaagagaaagcagcggtcagttttcagagatgtcctgagggcagtggaggaacgggattttccaacagaaaccattaaatttggtcctgaacgcatgtatattgattgctgggtaaaaaaacacacctatgacacctttaaggaggttcttggatcagggatgcagtaccacttgcagtcaaatgaattccttcgaaatgtatttgaacttggacccccagtgatgcttgatgctgcaacgcttaaaacgatgaagatttctcgtttcgaaagg

SEQ ID NO: 14665 - DNA, 2261 bp, Homo sapiens
  source 1..2261: mol_type = unassigned DNA
atgggccccaaaaaatcttggcgaagtcacttttttccactgcctgaggtttggctgttgctcctgttatcccaagctctaagcccttcccatggtccccagacccaggcaggggtaggtctcgtctggagtgtcccgctgccaagtgccctgagaagccagtcctgccttggtgctccactgagggacgcttcggagttaaccaccgtgcacttgttcccgacgcggggctggggcgcgcgcagggcattgtgggtgcatagttcagccagcgcgtcgtcggctgctagccgccgtcgcctgcgcgctcaggcctctgggattagtagttttagcctcgtggatggcggggcgcctcgcgaagatggtggcgcgcgtggcgtgtggctcccgtcgtctggccaagtctcagcgcagcgcaccggccggcgtctcgttggcctggagcccacacccaccgggtccctgaccccgcgccccccgcgcccggttcccggcatgcctcgcgcccgtaagggcaacacgctccggaagggtggtcagcgccgtggaggaggtgcccggagcagtgcccaagctgactcgggttccagtgacgatgaggcagccagtgaggcccgcagcaccgccagtgaatgccccagccttctcagcaccactgcagaggacagccttgggggggatgtcgtggatgagcagggccagcaggaagaccttgaggaaaagctgaaggagtatgtggactgtctcacagacaagagtgccaagacccggcagggtgctcttgagagcctgcgcctggccctagcgtcccgcctactccccgacttcttgctggagcgccgcctcacgctagccgatgccctggaaaagtgcctcaagaaagggaagggcgaggaacaagccctggctgctgctgtgctaggcctgctctgcgtgcagctgggccctggacctaagggtgaggagctgtttcacagcctgcagcctctgctggtctctgtgctcagtgacagcacagctagccctgctgcccggctccactgtgcttctgcccttggcctgggctgctacgtggctgccgctgacatccaggacctggtctcttgccttgcctgcttagaaagtgttttcagccggttctatggcttggggggcagctccacaagtcctgtggttcctgccagcctgcacggcctgctctctgctgccctgcaggcctgggcattgctgctcaccatctgccctagcacccaaatcagccacatccttgacaggcagctgccccggctgccccagctcttgtccagtgaaagtgtgaacctgcggatcgctgccggtgaaaccattgcactgctctttgagcttgcccgggaccttgaggaggagtttgtttacgaggacatggaggccctctgcagtgtcctgcgcactctggccactgacagtaacaagtaccgtgccaaggctgatcgtcggcgccagcgctctactttccgcgccgtgctgcactccgtggagggcggtgaatgcgaagaagagatagtgcgcttcggctttgaggtgctctacatggacagctgggctcggcaccggatctacgctgccttcaaggaagtgctgggttcgggcatgcaccaccacctccagaacaatgagctactccgtgacatctttggcctgggccctgtgctgttgctggatgccactgccctgaaggcctgcaaggttccacgctttgagaagcacctgtacaatgctgctgccttcaaagcccggaccaaggctcgaagccgtgtgcgggacaagcgggcagacatcctgtgaagcaggacctgctgaagaggagactttctatgcccttggtccgtatttttaacagaagacagtgcaacaactggtctccaccagtatttgtcactttattttttttaatgacaaaaccaaaaacagacatggggtgggtagctgggggcccggacacttgggaccctgacccctttgtccctgcactcagccctgtggccccttcctgtcctgtctcaggccaggctaaatatgtgccttcctcagggctgtggggcaggcactagggggcctttcccttcctttcctttctcaggccttgctcccccaggatgacccactcttaggggggtggtggcatctggacaaatgccaccacagcaggtggggtggcaaagctacctggaatggatttgtgtgctgatttttaaggattattacagataattaaacag

SEQ ID NO: 14666 - DNA, 2109 bp, Homo sapiens
  source 1..2109: mol_type = unassigned DNA
gtcggctggtgggccccaggcgtggactaccattcccatggtgctctacgcgcagctagccgccgtcgcctgcgcgctcaggcctctgggattagtagttttagcctcgtggatgtgggcctgaatcggatggcctggaactcgccttcccggcgacctgtttggcagggcggggcgcctcgcgaagatggtggcgcgcgtggcgtgtggctcccgtcgtctggccaagtctcagcgcagcgcaccggccggcgtctcgttggcctggagcccacacccaccgggtccctgaccccgcgccccccgcgcccggttcccggcatgcctcgcgcccgtaagggcaacacgctccggaagggtggtcagcgccgtggaggaggtgcccggagcagtgcccaagctgactcgggttccagtgacgatgaggcagccagtgaggcccgcagcaccgccagtgaatgccccagccttctcagcaccactgcagaggacagccttgggggggatgtcgtggatgagcagggccagcaggaagaccttgaggaaaagctgaaggagtatgtggactgtctcacagacaagagtgccaagacccggcagggtgctcttgagagcctgcgcctggccctagcgtcccgcctactccccgacttcttgctggagcgccgcctcacgctagccgatgccctggaaaagtgcctcaagaaagggaagggcgaggaacaagccctggctgctgctgtgctaggcctgctctgcgtgcagctgggccctggacctaagggtgaggagctgtttcacagcctgcagcctctgctggtctctgtgctcagtgacagcacagctagccctgctgcccggctccactgtgcttctgcccttggcctgggctgctacgtggctgccgctgacatccaggacctggtctcttgccttgcctgcttagaaagtgttttcagccggttctatggcttggggggcagctccacaagtcctgtggttcctgccagcctgcacggcctgctctctgctgccctgcaggcctgggcattgctgctcaccatctgccctagcacccaaatcagccacatccttgacaggcagctgccccggctgccccagctcttgtccagtgaaagtgtgaacctgcggatcgctgccggtgaaaccattgcactgctctttgagcttgcccgggaccttgaggaggagtttgtttacgaggacatggaggccctctgcagtgtcctgcgcactctggccactgacagtaacaagtaccgtgccaaggctgatcgtcggcgccagcgctctactttccgcgccgtgctgcactccgtggagggcggtgaatgcgaagaagagatagtgcgcttcggctttgaggtgctctacatggacagctgggctcggcaccggatctacgctgccttcaaggaagtgctgggttcgggcatgcaccaccacctccagaacaatgagctactccgtgacatctttggcctgggccctgtgctgttgctggatgccactgccctgaaggcctgcaaggttccacgctttgagaagcacctgtacaatgctgctgccttcaaagcccggaccaaggctcgaagccgtgtgcgggacaagcgggcagacatcctgtgaagcaggacctgctgaagaggagactttctatgcccttggtccgtatttttaacagaagacagtgcaacaactggtctccaccagtatttgtcactttattttttttaatgacaaaaccaaaaacagacatggggtgggtagctgggggcccggacacttgggaccctgacccctttgtccctgcactcagccctgtggccccttcctgtcctgtctcaggccaggctaaatatgtgccttcctcagggctgtggggcaggcactagggggcctttcccttcctttcctttctcaggccttgctcccccaggatgacccactcttaggggggtggtggcatctggacaaatgccaccacagcaggtggggtggcaaagctacctggaatggatttgtgtgctgatttttaaggattattacagataattaaacagaacggtcagccttctgtggtcttaa

SEQ ID NO: 14667 - DNA, 1955 bp, Homo sapiens
  source 1..1955: mol_type = unassigned DNA
atggcctggaactcgccttcccggcgacctgtttggcagggcggggcgcctcgcgaagatggtggcgcgcgtggcgtgtggctcccgtcgtctggccaagtctcagcgcagcgcaccggccggcgtctcgttggcctggagcccacacccaccgggtccctgaccccgcgccccccgcgcccggttcccggcatgcctcgcgcccgtaagggcaacacgctccggaagggtggtcagcgccgtggaggaggtgcccggagcagtgcccaagctgactcgggttccagtgacgatgaggcagccagtgaggcccgcagcaccgccagtgaatgccccagccttctcagcaccactgcagaggacagccttgggggggatgtcgtggatgagcagggccagcaggaagaccttgaggaaaagctgaaggagtatgtggactgtctcacagacaagagtgccaagacccggcagggtgctcttgagagcctgcgcctggccctagcgtcccgcctactccccgacttcttgctggagcgccgcctcacgctagccgatgccctggaaaagtgcctcaagaaagggaagggcgaggaacaagccctggctgctgctgtgctaggcctgctctgcgtgcagctgggccctggacctaagggtgaggagctgtttcacagcctgcagcctctgctggtctctgtgctcagtgacagcacagctagccctgctgcccggctccactgtgcttctgcccttggcctgggctgctacgtggctgccgctgacatccaggacctggtctcttgccttgcctgcttagaaagtgttttcagccggttctatggcttggggggcagctccacaagtcctgtggttcctgccagcctgcacggcctgctctctgctgccctgcaggcctgggcattgctgctcaccatctgccctagcacccaaatcagccacatccttgacaggcagctgccccggctgccccagctcttgtccagtgaaagtgtgaacctgcggatcgctgccggtgaaaccattgcactgctctttgagcttgcccgggaccttgaggaggagtttgtttacgaggacatggaggccctctgcagtgtcctgcgcactctggccactgacagtaacaagtaccgtgccaaggctgatcgtcggcgccagcgctctactttccgcgccgtgctgcactccgtggagggcggtgaatgcgaagaagagatagtgcgcttcggctttgaggtgctctacatggacagctgggctcggcaccggatctacgctgccttcaaggaagtgctgggttcgggcatgcaccaccacctccagaacaatgagctactccgtgacatctttggcctgggccctgtgctgttgctggatgccactgccctgaaggcctgcaaggttccacgctttgagaagcacctgtacaatgctgctgccttcaaagcccggaccaaggctcgaagccgtgtgcgggacaagcgggcagacatcctgtgaagcaggacctgctgaagaggagactttctatgcccttggtccgtatttttaacagaagacagtgcaacaactggtctccaccagtatttgtcactttattttttttaatgacaaaaccaaaaacagacatggggtgggtagctgggggcccggacacttgggaccctgacccctttgtccctgcactcagccctgtggccccttcctgtcctgtctcaggccaggctaaatatgtgccttcctcagggctgtggggcaggcactagggggcctttcccttcctttcctttctcaggccttgctcccccaggatgacccactcttaggggggtggtggcatctggacaaatgccaccacagcaggtggggtggcaaagctacctggaatggatttgtgtgctgatttttaaggattattacagataattaaacag

SEQ ID NO: 14668 - DNA, 2275 bp, Homo sapiens
  source 1..2275: mol_type = unassigned DNA
atgggccccaaaaaatcttggcgaagtcacttttttccactgcctgaggtttggctgttgctcctgttatcccaagctctaagcccttcccatggtccccagacccaggcaggggtaggtctcgtctggagtgtcccgctgccaagtgccctgagaagccagtcctgccttggtgctccactgagggacgcttcggagttaaccaccgtgcacttgttcccgacgcggggctggggcgcgcgcagggcattgtgggtgcatagttcagccagcgcgtcgtcggctgctagccgccgtcgcctgcgcgctcaggcctctgggattagtagttttagcctcgtggatggcggggcgcctcgcgaagatggtggcgcgcgtggcgtgtggctcccgtcgtctggccaagtctcagcgcagcgcaccggccggcgtctcgttggcctggagcccacacccaccgggtccctgaccccgcgccccccgcgcccggttcccggcatgcctcgcgcccgtaagggcaacacgctccggaagggtggtcagcgccgtggaggaggtgcccggagcagtgcccaagctgactcgggttccagtgacgatgaggcagccagtgaggcccgcagcaccgccagtgaatgccccagccttctcagcaccactgcagaggacagccttgggggggatgtcgtggatgagcagggccagcaggaagaccttgaggaaaagctgaaggagtatgtggactgtctcacagacaagagtgccaagacccggcagggtgctcttgagagcctgcgcctggccctagcgtcccgcctactccccgacttcttgctggagcgccgcctcacgctagccgatgccctggaaaagtgcctcaagaaagggaagggcgaggaacaagccctggctgctgctgtgctaggcctgctctgcgtgcagctgggccctggacctaagggtgaggagctgtttcacagcctgcagcctctgctggtctctgtgctcagtgacagcacagctagccctgctgcccggctccactgtgcttctgcccttggcctgggctgctacgtggctgccgctgacatccaggacctggtctcttgccttgcctgcttagaaagtgttttcagccggttctatggcttggggggcagctccacaagtcctgtggttcctgccagcctgcacggcctgctctctgctgccctgcaggcctgggcattgctgctcaccatctgccctagcacccaaatcagccacatccttgacaggcagctgccccggctgccccagctcttgtccagtgaaagtgtgaacctgcggatcgctgccggtgaaaccattgcactgctctttgagcttgcccgggaccttgaggaggagtttgtttacgaggacatggaggccctctgcagtgtcctgcgcactctggccactgacagtaacaagtaccgtgccaaggctgatcgtcggcgccagcgctctactttccgcgccgtgctgcactccgtggagggcggtgaatgcgaagaagagatagtgcgcttcggctttgaggtgctctacatggacagctgggctcggcaccggatctacgctgccttcaaggaagtgctgggttcgggcatgcaccaccacctccagaacaatgagctactccgtgacatctttggcctgggccctgtgctgttgctggatgccactgccctgaaggcctgcaaggttccacgctttgagaagcacctgtacaatgctgctgccttcaaagcccggaccaaggctcgaagccgtgtgcgggacaagcgggcagacatcctgtgaagcaggacctgctgaagaggagactttctatgcccttggtccgtatttttaacagaagacagtgcaacaactggtctccaccagtatttgtcactttattttttttaatgacaaaaccaaaaacagacatggggtgggtagctgggggcccggacacttgggaccctgacccctttgtccctgcactcagccctgtggccccttcctgtcctgtctcaggccaggctaaatatgtgccttcctcagggctgtggggcaggcactagggggcctttcccttcctttcctttctcaggccttgctcccccaggatgacccactcttaggggggtggtggcatctggacaaatgccaccacagcaggtggggtggcaaagctacctggaatggatttgtgtgctgatttttaaggattattacagataattaaacagaacggtcagccttc

SEQ ID NO: 14669 - DNA, 4697 bp, Homo sapiens
  source 1..4697: mol_type = unassigned DNA
aaagggggaaaagaaagtgcggcggaaagtaagaggctcactggggaagactgccgggatccaggtctccggggtccgctttggccagaggcgcggaaggaagcagtgcccggcgacactgcacccatcccggctgcttttgctgcgccctctcagcttcccaagaaaggatgacacttctgtggtgtgtagtgagtctctacttttatggaatcctgcaaagtgatgcctcagaacgctgcgatgactggggactagacaccatgaggcaaatccaagtgtttgaagatgagccagctcgcatcaagtgcccactctttgaacacttcttgaaattcaactacagcacagcccattcagctggccttactctgatctggtattggactaggcaggaccgggaccttgaggagccaattaacttccgcctccccgagaaccgcattagtaaggagaaagatgtgctgtggttccggcccactctcctcaatgacactggcaactatacctgcatgttaaggaacactacatattgcagcaaagttgcatttcccttggaagttgttcaaaaagacagctgtttcaattcccccatgaaactcccagtgcataaactgtatatagaatatggcattcagaggatcacttgtccaaatgtagatggatattttccttccagtgtcaaaccgactatcacttggtatatgggctgttataaaatacagaattttaataatgtaatacccgaaggtatgaacttgagtttcctcattgccttaatttcaaataatggaaattacacatgtgttgttacatatccagaaaatggacgtacgtttcatctcaccaggactctgactgtaaaggtagtaggctctccaaaaaatgcagtgccccctgtgatccattcacctaatgatcatgtggtctatgagaaagaaccaggagaggagctactcattccctgtacggtctattttagttttctgatggattctcgcaatgaggtttggtggaccattgatggaaaaaaacctgatgacatcactattgatgtcaccattaacgaaagtataagtcatagtagaacagaagatgaaacaagaactcagattttgagcatcaagaaagttacctctgaggatctcaagcgcagctatgtctgtcatgctagaagtgccaaaggcgaagttgccaaagcagccaaggtgaagcagaaagtgccagctccaagatacacagtggaactggcttgtggttttggagccacagtcctgctagtggtgattctcattgttgtttaccatgtttactggctagagatggtcctattttaccgggctcattttggaacagatgaaaccattttagatggaaaagagtatgatatttatgtatcctatgcaaggaatgcggaagaagaagaatttgtattactgaccctccgtggagttttggagaatgaatttggatacaagctgtgcatctttgaccgagacagtctgcctgggggaattgtcacagatgagactttgagcttcattcagaaaagcagacgcctcctggttgttctaagccccaactacgtgctccagggaacccaagccctcctggagctcaaggctggcctagaaaatatggcctctcggggcaacatcaacgtcattttagtacagtacaaagctgtgaaggaaacgaaggtgaaagagctgaagagggctaagacggtgctcacggtcattaaatggaaaggggaaaaatccaagtatccacagggcaggttctggaagcagctgcaggtggccatgccagtgaagaaaagtcccaggcggtctagcagtgatgagcagggcctctcgtattcatctttgaaaaatgtatgaaaggaataatgaaaagggtaaaaagaacaaggggtgctccaggaagaaagagtccccccagtcttcattcgcagtttatggtttcataggcaaaaataatggtctaagcctcccaatagggataaatttagggtgactgtgtggctgactattctgcttcctcaggcaacactaaagtttagaaagatatcatcaacgttctgtcaccagtctctgatgccactatgttctttgcaggcaaagacttgttcaatgcgaatttccccttctacattgtctatccctgtttttatatgtctccattctttttaaaatcttaacatatggagcagcctttcctatgaatttaaatatgcctttaaaataagtcactgttgacagggtcatgagtttccgagtatagttttctttttatcttatttttactcgtccgttgaaaagataatcaaggcctacattttagctgaggataatgaacttttttcctcattcggctgtataatacataaccacagcaagactgacatccacttaggatgatacaaagcagtgtaactgaaaatgtttcttttaattgatttaaaggacttgtcttctataccacccttgtcctcatctcaggtaatttatgaaatctatgtaaacttgaaaaatatttcttaatttttgtttttgctccagtcaattcctgattatccacaggtcaacccacattttttcattccttctccctatctgcttatatcgcattgctcatttagagtttgcaggaggctccatactaggttcagtctgaaagaaatctcctaatggtgctatagagagggaggtaacagaaagactcttttagggcatttttctgactcatgaaaagagcacagaaaaggatgtttggcaatttgtcttttaagtcttaaccttgctaatgtgaatactgggaaagtgattttttctcactcgtttttgttgctccattgtaaagggcggaggtcagtcttagtggccttgagagttgcttttggcattaatattctaagagaattaactgtatttcctgtcacctattcactagtgcaggaaatatacttgctccaaataagtcagtatgagaagtcactgtcaatgaaagttgttttgtttgttttcagtaatattttgctgtttttaagacttggaaaactaagtgcagagtttacagagtggtaaatatctatgttacatgtagattatacatatatatacacacgtgtatatgagatatatatcttatatctccacaaacacaaattatatatatacatatccacacacatacattacatatatctgtgtatataaatccacatgcacatgaaatatatatatatatataatttgtgtgtgtgtatgtgtatgtatatgactttaaatagctatgggtacaatattaaaaaccactggaactcttgtccagtttttaaattatgtttttactggaatgtttttgtgtcagtgttttctgtacatattatttgttaattcacagctcacagagtgatagttgtcatagttcttgccttccctaagtttatataaataacttaagtattgctacagtttatctaggttgcagtggcatctgctgtgcacagagcttccatggtcactgctaagcagtagccagccatcgggcattaattgatttcctactatattcccagcagacacatttagaaactaagctatgttaacctcagtgctcaactatttgaactgttgagtgataaaggaaacaaatataactgtaaatgaatcttggtatcctgtgaaacagaataattcgtaatttaagaaagcccttatcccggtaacatgaatgttgatgaacaaatgtaaaattatatcctatatttaagtacccataataaatcatttccctctataagtgttattgattattttaaattgaaaaaagtttcacttggatgaaaaaagtagaaaagtaggtcattcttggatctacttttttttagccttattaatatttttccctattagaaaccacaattactccctctattaacccttcacttactagaccagaaaagaacttattccagataagctttgaatatcaattcttacataaactttaggcaaacagggaatagtctagtcaccaaaggaccattctcttgccaatgctgcattccttttgcacttttggattccatatttatcccaaatgctgttgggcacccctagaaataccttgatgttttttctatttatatgcctgcctttggtacttaattttacaaatgctgtaatataaagcatatcaagtttatgtgatacgtatcattgcaagagaatttgtttcaagatttttttttaatgttccagaagatggccaatagagaacattcaagggaaatggggaaacataatttagagaacaagaacaaaccatgtctcaaatttttttaaaaaaaattaatggttttaaatatatgctatagggacgttccatgcccaggttaacaaagaactgtgatatatagagtgtctaattacaaaatcatatacgatttatttaattctcttctgtattgtaacttagatgattcccaaggactctaataaaaaatcacttcattgtatttggaaacaaaaacatcattcattaattacttattttctttccataggttttaatattttgagagtgtcttttttatttcattcatgaacttttgtatttttcatttttcatttgatttgtaaatttacttatgttaaaaataaaccatttattttcagctttgaatttta

SEQ ID NO: 14670 - DNA, 3717 bp, Homo sapiens
  source 1..3717: mol_type = unassigned DNA
tgccgggatccaggtctccggggtccgctttggccagaggcgcggaaggaagcagtgcccggcgacactgcacccatcccggctgcttttgctgcgccctctcagcttcccaagaaaggcatcgtcatgtgatcatcacctaagaactagaacatcagcaggccctagaagcctcactcttgcccctccctttaatatctcaaaggatgacacttctgtggtgtgtagtgagtctctacttttatggaatcctgcaaagtgatgcctcagaacgctgcgatgactggggactagacaccatgaggcaaatccaagtgtttgaagatgagccagctcgcatcaagtgcccactctttgaacacttcttgaaattcaactacagcacagcccattcagctggccttactctgatctggtattggactaggcaggaccgggaccttgaggagccaattaacttccgcctccccgagaaccgcattagtaaggagaaagatgtgctgtggttccggcccactctcctcaatgacactggcaactatacctgcatgttaaggaacactacatattgcagcaaagttgcatttcccttggaagttgttcaaaaagacagctgtttcaattcccccatgaaactcccagtgcataaactgtatatagaatatggcattcagaggatcacttgtccaaatgtagatggatattttccttccagtgtcaaaccgactatcacttggtatatgggctgttataaaatacagaattttaataatgtaatacccgaaggtatgaacttgagtttcctcattgccttaatttcaaataatggaaattacacatgtgttgttacatatccagaaaatggacgtacgtttcatctcaccaggactctgactgtaaaggtagtaggctctccaaaaaatgcagtgccccctgtgatccattcacctaatgatcatgtggtctatgagaaagaaccaggagaggagctactcattccctgtacggtctattttagttttctgatggattctcgcaatgaggtttggtggaccattgatggaaaaaaacctgatgacatcactattgatgtcaccattaacgaaagtataagtcatagtagaacagaagatgaaacaagaactcagattttgagcatcaagaaagttacctctgaggatctcaagcgcagctatgtctgtcatgctagaagtgccaaaggcgaagttgccaaagcagccaaggtgaagcagaaagtgccagctccaagatacacagtggaactggcttgtggttttggagccacagtcctgctagtggtgattctcattgttgtttaccatgtttactggctagagatggtcctattttaccgggctcattttggaacagatgaaaccattttagatggaaaagagtatgatatttatgtatcctatgcaaggaatgcggaagaagaagaatttgtattactgaccctccgtggagttttggagaatgaatttggatacaagctgtgcatctttgaccgagacagtctgcctgggggaaatacagtggaagcagtttttgatttcattcagagaagcagaaggatgattgttgttctgagccctgactatgtgacagaaaagagcatcagcatgctggagtttaaactgggtgtcatgtgccagaactccattgccaccaagctcattgtggttgagtaccgtccccttgagcacccgcacccaggcattcttcagctcaaagagtctgtgtcttttgtgagctggaagggagaaaagtccaaacattctggctctaaattctggaaagctttgcggttggctcttcccctgagaagtctgagtgccagttctggctggaatgagagctgctcttcccagtctgacatcagtctggatcacgttcaaaggaggagaagtcgtttgaaagagcccccagaacttcagagctcagagagggctgcaggtagccctccagccccaggcacaatgtccaagcaccgagggaagtcctccgccacctgccgctgttgtgtcacctactgtgaaggagagaatcaccttaggaacaagagccgggcagagattcataaccagccccagtgggagacacacctctgtaagcctgttccccaagagtcagaaactcaatggatacaaaatggcaccagattggaaccccctgctccccagatctcagcccttgctcttcatcatttcacggacttatccaataacaacgacttttatatcctataattactgtgtgtggtgggtggtggctactatctctaccaaccctctgtatgtcatgaacctgtgggaaaatctgacatttttatcatctaatggactatcagatttctgtcccctttattgatttttaaaaactatttatttctaggagacaaaagacctgaaggacctgaatccagaattattgcctctaaaggcctcagaagagcacactcttcttgggccctagaaggtcagtatgtgaaagttgcctaaagtctgatcctctatcttgtccaatggtttaaaactgagctaagaatttaaatgtgtttcttttcagtgagttgatcaacctcacattataagtcagtcaggtgtacttgggctatgatgcttacagggtgtatgcattcccagggagcagcatggaaaggagctggttctggtggaagctgtaggacgaagctcaacagaaaacctacagcacatttttcctcaaagaaccaaacatacccacccagggatacatggcgttctctgtctcactgtaaactagtgttctctaaactgcctaacattgttagcatcaataaaattctatttttacgtcattttatttgtactaacaaatttttacatctctctcacccttctacttcctatgattgttgtattcttatctggagagtattccatttcagaaaatggagatttggtttaggtaccagaaaaactaagatgccttttttgtttctctctgatatgtaatgggagagatgtggaaaataaccaaaagagagggagaatgtgacttaaatgaaatggaagtttacaacaatctcatatttttagaactgacagatgaaaaattccgtattgtaagtgatgtagcgtagaaataggtgccttcgtcccattcaggcttctgagaagggataataaattcaagtgcctacaaggatcagaaggtaagagaaaagagaaaatatggccagataccagcttattttacatgctctccatctagaactgatgtgaatagggacataggcacagatagttatttcttctctgtaaacattttcataaactcatataaggcacatggcatttgatttccaagtcaggtagatcattggccctctaagcaactgaagaacacatatttcttaaaaagggtcagcttcaggccgggtgtggtggctcatgcctataatcccagcactttgggaagtcaagacttgtggatcaactgaggtcagttgttcaagagcagcctggccaacattgtgaaaccccatctctacaaaaatacaaaattagccaggtatggtggtgggcacctgtaatcccagctactcaggaggctgaggcaggagaaactcttgaacctaggaggtggaggttgcagtgagccgagatcgtgccactgcactccagacttggtgacagagcaagactccatctt

SEQ ID NO: 14671 - DNA, 4778 bp, Homo sapiens
  source 1..4778: mol_type = unassigned DNA
aaagggggaaaagaaagtgcggcggaaagtaagaggctcactggggaagactgccgggatccaggtctccggggtccgctttggccagaggcgcggaaggaagcagtgcccggcgacactgcacccatcccggctgcttttgctgcgccctctcagcttcccaagaaaggtgagtctcgcgccgccgtgagggctcagaagtcaccaagccgcagaatctcagggtagacggattcttagagatcttacaggatgacacttctgtggtgtgtagtgagtctctacttttatggaatcctgcaaagtgatgcctcagaacgctgcgatgactggggactagacaccatgaggcaaatccaagtgtttgaagatgagccagctcgcatcaagtgcccactctttgaacacttcttgaaattcaactacagcacagcccattcagctggccttactctgatctggtattggactaggcaggaccgggaccttgaggagccaattaacttccgcctccccgagaaccgcattagtaaggagaaagatgtgctgtggttccggcccactctcctcaatgacactggcaactatacctgcatgttaaggaacactacatattgcagcaaagttgcatttcccttggaagttgttcaaaaagacagctgtttcaattcccccatgaaactcccagtgcataaactgtatatagaatatggcattcagaggatcacttgtccaaatgtagatggatattttccttccagtgtcaaaccgactatcacttggtatatgggctgttataaaatacagaattttaataatgtaatacccgaaggtatgaacttgagtttcctcattgccttaatttcaaataatggaaattacacatgtgttgttacatatccagaaaatggacgtacgtttcatctcaccaggactctgactgtaaaggtagtaggctctccaaaaaatgcagtgccccctgtgatccattcacctaatgatcatgtggtctatgagaaagaaccaggagaggagctactcattccctgtacggtctattttagttttctgatggattctcgcaatgaggtttggtggaccattgatggaaaaaaacctgatgacatcactattgatgtcaccattaacgaaagtataagtcatagtagaacagaagatgaaacaagaactcagattttgagcatcaagaaagttacctctgaggatctcaagcgcagctatgtctgtcatgctagaagtgccaaaggcgaagttgccaaagcagccaaggtgaagcagaaagtgccagctccaagatacacagtggaactggcttgtggttttggagccacagtcctgctagtggtgattctcattgttgtttaccatgtttactggctagagatggtcctattttaccgggctcattttggaacagatgaaaccattttagatggaaaagagtatgatatttatgtatcctatgcaaggaatgcggaagaagaagaatttgtattactgaccctccgtggagttttggagaatgaatttggatacaagctgtgcatctttgaccgagacagtctgcctgggggaattgtcacagatgagactttgagcttcattcagaaaagcagacgcctcctggttgttctaagccccaactacgtgctccagggaacccaagccctcctggagctcaaggctggcctagaaaatatggcctctcggggcaacatcaacgtcattttagtacagtacaaagctgtgaaggaaacgaaggtgaaagagctgaagagggctaagacggtgctcacggtcattaaatggaaaggggaaaaatccaagtatccacagggcaggttctggaagcagctgcaggtggccatgccagtgaagaaaagtcccaggcggtctagcagtgatgagcagggcctctcgtattcatctttgaaaaatgtatgaaaggaataatgaaaagggtaaaaagaacaaggggtgctccaggaagaaagagtccccccagtcttcattcgcagtttatggtttcataggcaaaaataatggtctaagcctcccaatagggataaatttagggtgactgtgtggctgactattctgcttcctcaggcaacactaaagtttagaaagatatcatcaacgttctgtcaccagtctctgatgccactatgttctttgcaggcaaagacttgttcaatgcgaatttccccttctacattgtctatccctgtttttatatgtctccattctttttaaaatcttaacatatggagcagcctttcctatgaatttaaatatgcctttaaaataagtcactgttgacagggtcatgagtttccgagtatagttttctttttatcttatttttactcgtccgttgaaaagataatcaaggcctacattttagctgaggataatgaacttttttcctcattcggctgtataatacataaccacagcaagactgacatccacttaggatgatacaaagcagtgtaactgaaaatgtttcttttaattgatttaaaggacttgtcttctataccacccttgtcctcatctcaggtaatttatgaaatctatgtaaacttgaaaaatatttcttaatttttgtttttgctccagtcaattcctgattatccacaggtcaacccacattttttcattccttctccctatctgcttatatcgcattgctcatttagagtttgcaggaggctccatactaggttcagtctgaaagaaatctcctaatggtgctatagagagggaggtaacagaaagactcttttagggcatttttctgactcatgaaaagagcacagaaaaggatgtttggcaatttgtcttttaagtcttaaccttgctaatgtgaatactgggaaagtgattttttctcactcgtttttgttgctccattgtaaagggcggaggtcagtcttagtggccttgagagttgcttttggcattaatattctaagagaattaactgtatttcctgtcacctattcactagtgcaggaaatatacttgctccaaataagtcagtatgagaagtcactgtcaatgaaagttgttttgtttgttttcagtaatattttgctgtttttaagacttggaaaactaagtgcagagtttacagagtggtaaatatctatgttacatgtagattatacatatatatacacacgtgtatatgagatatatatcttatatctccacaaacacaaattatatatatacatatccacacacatacattacatatatctgtgtatataaatccacatgcacatgaaatatatatatatatataatttgtgtgtgtgtatgtgtatgtatatgactttaaatagctatgggtacaatattaaaaaccactggaactcttgtccagtttttaaattatgtttttactggaatgtttttgtgtcagtgttttctgtacatattatttgttaattcacagctcacagagtgatagttgtcatagttcttgccttccctaagtttatataaataacttaagtattgctacagtttatctaggttgcagtggcatctgctgtgcacagagcttccatggtcactgctaagcagtagccagccatcgggcattaattgatttcctactatattcccagcagacacatttagaaactaagctatgttaacctcagtgctcaactatttgaactgttgagtgataaaggaaacaaatataactgtaaatgaatcttggtatcctgtgaaacagaataattcgtaatttaagaaagcccttatcccggtaacatgaatgttgatgaacaaatgtaaaattatatcctatatttaagtacccataataaatcatttccctctataagtgttattgattattttaaattgaaaaaagtttcacttggatgaaaaaagtagaaaagtaggtcattcttggatctacttttttttagccttattaatatttttccctattagaaaccacaattactccctctattaacccttcacttactagaccagaaaagaacttattccagataagctttgaatatcaattcttacataaactttaggcaaacagggaatagtctagtcaccaaaggaccattctcttgccaatgctgcattccttttgcacttttggattccatatttatcccaaatgctgttgggcacccctagaaataccttgatgttttttctatttatatgcctgcctttggtacttaattttacaaatgctgtaatataaagcatatcaagtttatgtgatacgtatcattgcaagagaatttgtttcaagatttttttttaatgttccagaagatggccaatagagaacattcaagggaaatggggaaacataatttagagaacaagaacaaaccatgtctcaaatttttttaaaaaaaattaatggttttaaatatatgctatagggacgttccatgcccaggttaacaaagaactgtgatatatagagtgtctaattacaaaatcatatacgatttatttaattctcttctgtattgtaacttagatgattcccaaggactctaataaaaaatcacttcattgtatttggaaacaaaaacatcattcattaattacttattttctttccataggttttaatattttgagagtgtcttttttatttcattcatgaacttttgtatttttcatttttcatttgatttgtaaatttacttatgttaaaaataaaccatttattttcagctttgaatttt

SEQ ID NO: 14672 - DNA, 2048 bp, Homo sapiens
  source 1..2048: mol_type = unassigned DNA
agactgccgggatccaggtctccggggtccgctttggccagaggcgcggaaggaagcagtgcccggcgacactgcacccatcccggctgcttttgctgcgccctctcagcttcccaagaaaggcatcgtcatgtgatcatcacctaagaactagaacatcagcaggccctagaagcctcactcttgcccctccctttaatatctcaaaggatgacacttctgtggtgtgtagtgagtctctacttttatggaatcctgcaaagtgatgcctcagaacgctgcgatgactggggactagacaccatgaggcaaatccaagtgtttgaagatgagccagctcgcatcaagtgcccactctttgaacacttcttgaaattcaactacagcacagcccattcagctggccttactctgatctggtattggactaggcaggaccgggaccttgaggagccaattaacttccgcctccccgagaaccgcattagtaaggagaaagatgtgctgtggttccggcccactctcctcaatgacactggcaactatacctgcatgttaaggaacactacatattgcagcaaagttgcatttcccttggaagttgttcaaaaagacagctgtttcaattcccccatgaaactcccagtgcataaactgtatatagaatatggcattcagaggatcacttgtccaaatgtagatggatattttccttccagtgtcaaaccgactatcacttggtatatgggctgttataaaatacagaattttaataatgtaatacccgaaggtatgaacttgagtttcctcattgccttaatttcaaataatggaaattacacatgtgttgttacatatccagaaaatggacgtacgtttcatctcaccaggactctgactgtaaaggtagtaggctctccaaaaaatgcagtgccccctgtgatccattcacctaatgatcatgtggtctatgagaaagaaccaggagaggagctactcattccctgtacggtctattttagttttctgatggattctcgcaatgaggtttggtggaccattgatggaaaaaaacctgatgacatcactattgatgtcaccattaacgaaagtataagtcatagtagaacagaagatgaaacaagaactcagattttgagcatcaagaaagttacctctgaggatctcaagcgcagctatgtctgtcatgctagaagtgccaaaggcgaagttgccaaagcagccaaggtgaagcagaaaggtaatagatgcggtcagtgatgaatctctcagctccaaattaacattgtggtgaataaggacaaaaggagagattgagaacaagagagctccagcacctagcccgacggcatctaacccatagtaatgaatcaaacttaaatgaaaaatatgaaagttttcatctatgtaagatactcaaaatattgtttctgatattgttagtaccgtaatgcccaaatgtagctaaaaaaatcgacgtgagtacagtgagacacaattttgtgtctgtacaattatgaaaaattaaaaacaaagaaaatattcaaagctaccaaagatagaaaaaactggtagagccacatattgttggtgaattattaagacccttttaaaaatcattcatggtagacttcaagagtcataaaaaagattgcatcatctgacctaagactttcggaatttttcctgaacaaataacagaaagggaattatataccttttaatattattagaagcattatctgtagttgtaaaacattattaatagcagccatccaattgtatgcaactaattaaggtattgaatgtttattttccaaaaatgcataattataatattattttaaacactatgtatcaatatttaagcaggtttataatataccagcagccacaattgctaaaatgaaaatcatttaaattatgattttaaatggtataaacatgatttctatgttgatagtactatattattctacaataaatggaaattataaagccttcttgtcagaagtgctgctcctaaa

SEQ ID NO: 14673 - DNA, 534 bp, Homo sapiens
  source 1..534: mol_type = unassigned DNA
ctcactggggaagactgccgggatccaggtctccggggtccgctttggccagaggcgcggaaggaagcagtgcccggcgacactgcacccatcccggctgcttttgctgcgccctctcagcttcccaagaaagtccttttgcagattgctcagcacaggacatgataattttcatctcggattttggaggaattgatgacacttctgtggtgtgtagtgagtctctacttttatggaatcctgcaaagtgatgcctcagaacgctgcgatgactggggactagacaccatgaggcaaatccaagtgtttgaagatgagccagctcgcatcaagtgcccactctttgaacacttcttgaaattcaactacagcacagcccattcagctggccttactctgatctggtattggactaggcaggaccgggaccttgaggagccaattaacttccgcctccccgagaaccgcattagtaaggagaaagatgtgctgtggttccggcccactctcctcaatgacactggcaactatacc

SEQ ID NO: 14674 - DNA, 1957 bp, Homo sapiens
  source 1..1957: mol_type = unassigned DNA
tgccgggatccaggtctccggggtccgctttggccagaggcgcggaaggaagcagtgcccggcgacactgcacccatcccggctgcttttgctgcgccctctcagcttcccaagaaaggatgacacttctgtggtgtgtagtgagtctctacttttatggaatcctgcaaagtgatgcctcagaacgctgcgatgactggggactagacaccatgaggcaaatccaagtgtttgaagatgagccagctcgcatcaagtgcccactctttgaacacttcttgaaattcaactacagcacagcccattcagctggccttactctgatctggtattggactaggcaggaccgggaccttgaggagccaattaacttccgcctccccgagaaccgcattagtaaggagaaagatgtgctgtggttccggcccactctcctcaatgacactggcaactatacctgcatgttaaggaacactacatattgcagcaaagttgcatttcccttggaagttgttcaaaaagacagctgtttcaattcccccatgaaactcccagtgcataaactgtatatagaatatggcattcagaggatcacttgtccaaatgtagatggatattttccttccagtgtcaaaccgactatcacttggtatatgggctgttataaaatacagaattttaataatgtaatacccgaaggtatgaacttgagtttcctcattgccttaatttcaaataatggaaattacacatgtgttgttacatatccagaaaatggacgtacgtttcatctcaccaggactctgactgtaaaggtagtaggctctccaaaaaatgcagtgccccctgtgatccattcacctaatgatcatgtggtctatgagaaagaaccaggagaggagctactcattccctgtacggtctattttagttttctgatggattctcgcaatgaggtttggtggaccattgatggaaaaaaacctgatgacatcactattgatgtcaccattaacgaaagtataagtcatagtagaacagaagatgaaacaagaactcagattttgagcatcaagaaagttacctctgaggatctcaagcgcagctatgtctgtcatgctagaagtgccaaaggcgaagttgccaaagcagccaaggtgaagcagaaaggtaatagatgcggtcagtgatgaatctctcagctccaaattaacattgtggtgaataaggacaaaaggagagattgagaacaagagagctccagcacctagcccgacggcatctaacccatagtaatgaatcaaacttaaatgaaaaatatgaaagttttcatctatgtaagatactcaaaatattgtttctgatattgttagtaccgtaatgcccaaatgtagctaaaaaaatcgacgtgagtacagtgagacacaattttgtgtctgtacaattatgaaaaattaaaaacaaagaaaatattcaaagctaccaaagatagaaaaaactggtagagccacatattgttggtgaattattaagacccttttaaaaatcattcatggtagacttcaagagtcataaaaaagattgcatcatctgacctaagactttcggaatttttcctgaacaaataacagaaagggaattatataccttttaatattattagaagcattatctgtagttgtaaaacattattaatagcagccatccaattgtatgcaactaattaaggtattgaatgtttattttccaaaaatgcataattataatattattttaaacactatgtatcaatatttaagcaggtttataatataccagcagccacaattgctaaaatgaaaatcatttaaattatgattttaaatggtataaacatgatttctatgttgatagtactatattattctacaataaatggaaattataaagccttcttgtcagaagtgctgctcctaaa

SEQ ID NO: 14675 - DNA, 2244 bp, Homo sapiens
  source 1..2244: mol_type = unassigned DNA
aaaagaaagtgcggcggaaagtaagaggctcactggggaagactgccgggatccaggtctccggggtccgctttggccagaggcgcggaaggaagcagtgcccggcgacactgcacccatcccggctgcttttgctgcgccctctcagcttcccaagaaagggctttgacctgaagcttgaaattgagtttgggacaataatgtgtctcatggggaattgcatggactccttatcataagccaaatgctgaggtaaagctgcggaattgagtcgtcctccaagaagggagagaaaatgatgtcttgtgacatttccagataactggcatcgtcatgtgatcatcacctaagaactagaacatcagcaggccctagaagcctcactcttgcccctccctttaatatctcaaaggatgacacttctgtggtgtgtagtgagtctctacttttatggaatcctgcaaagtgatgcctcagaacgctgcgatgactggggactagacaccatgaggcaaatccaagtgtttgaagatgagccagctcgcatcaagtgcccactctttgaacacttcttgaaattcaactacagcacagcccattcagctggccttactctgatctggtattggactaggcaggaccgggaccttgaggagccaattaacttccgcctccccgagaaccgcattagtaaggagaaagatgtgctgtggttccggcccactctcctcaatgacactggcaactatacctgcatgttaaggaacactacatattgcagcaaagttgcatttcccttggaagttgttcaaaaagacagctgtttcaattcccccatgaaactcccagtgcataaactgtatatagaatatggcattcagaggatcacttgtccaaatgtagatggatattttccttccagtgtcaaaccgactatcacttggtatatgggctgttataaaatacagaattttaataatgtaatacccgaaggtatgaacttgagtttcctcattgccttaatttcaaataatggaaattacacatgtgttgttacatatccagaaaatggacgtacgtttcatctcaccaggactctgactgtaaaggtagtaggctctccaaaaaatgcagtgccccctgtgatccattcacctaatgatcatgtggtctatgagaaagaaccaggagaggagctactcattccctgtacggtctattttagttttctgatggattctcgcaatgaggtttggtggaccattgatggaaaaaaacctgatgacatcactattgatgtcaccattaacgaaagtataagtcatagtagaacagaagatgaaacaagaactcagattttgagcatcaagaaagttacctctgaggatctcaagcgcagctatgtctgtcatgctagaagtgccaaaggcgaagttgccaaagcagccaaggtgaagcagaaagtgccagctccaagatacacagtggaactggcttgtggttttggagccacagtcctgctagtggtgattctcattgttgtttaccatgtttactggctagagatggtcctattttaccgggctcattttggaacagatgaaaccattttagatggaaaagagtatgatatttatgtatcctatgcaaggaatgcggaagaagaagaatttgtattactgaccctccgtggagttttggagaatgaatttggatacaagctgtgcatctttgaccgagacagtctgcctgggggaattgtcacagatgagactttgagcttcattcagaaaagcagacgcctcctggttgttctaagccccaactacgtgctccagggaacccaagccctcctggagctcaaggctggcctagaaaatatggcctctcggggcaacatcaacgtcattttagtacagtacaaagctgtgaaggaaacgaaggtgaaagagctgaagagggctaagacggtgctcacggtcattaaatggaaaggggaaaaatccaagtatccacagggcaggttctggaagcagctgcaggtggccatgccagtgaagaaaagtcccaggcggtctagcagtgatgagcagggcctctcgtattcatctttgaaaaatgtatgaaaggaataatgaaaagggtaaaaagaacaaggggtgctccaggaagaaagagtccccccagtcttcattcgcagtttatggtttcataggcaaaaataatggtctaagcctcccaata

SEQ ID NO: 14676 - DNA, 2234 bp, Homo sapiens
  source 1..2234: mol_type = unassigned DNA
aaagggggaaaagaaagtgcggcggaaagtaagaggctcactggggaagactgccgggatccaggtctccggggtccgctttggccagaggcgcggaaggaagcagtgcccggcgacactgcacccatcccggctgcttttgctgcgccctctcagcttcccaagaaaggatgacacttctgtggtgtgtagtgagtctctacttttatggaatcctgcaaagtgatgcctcagaacgctgcgatgactggggactagacaccatgaggcaaatccaagtgtttgaagatgagccagctcgcatcaagtgcccactctttgaacacttcttgaaattcaactacagcacagcccattcagctggccttactctgatctggtattggactaggcaggaccgggaccttgaggagccaattaacttccgcctccccgagaaccgcattagtaaggagaaagatgtgctgtggttccggcccactctcctcaatgacactggcaactatacctgcatgttaaggaacactacatattgcagcaaagttgcatttcccttggaagttgttcaaaaagacagctgtttcaattcccccatgaaactcccagtgcataaactgtatatagaatatggcattcagaggatcacttgtccaaatgtagatggatattttccttccagtgtcaaaccgactatcacttggtatatgggctgttataaaatacagaattttaataatgtaatacccgaaggtatgaacttgagtttcctcattgccttaatttcaaataatggaaattacacatgtgttgttacatatccagaaaatggacgtacgtttcatctcaccaggactctgactgtaaaggtagtaggctctccaaaaaatgcagtgccccctgtgatccattcacctaatgatcatgtggtctatgagaaagaaccaggagaggagctactcattccctgtacggtctattttagttttctgatggattctcgcaatgaggtttggtggaccattgatggaaaaaaacctgatgacatcactattgatgtcaccattaacgaaagtataagtcatagtagaacagaagatgaaacaagaactcagattttgagcatcaagaaagttacctctgaggatctcaagcgcagctatgtctgtcatgctagaagtgccaaaggcgaagttgccaaagcagccaaggtgaagcagaaagtgccagctccaagatacacagtggaactggcttgtggttttggagccacagtcctgctagtggtgattctcattgttgtttaccatgtttactggctagagatggtcctattttaccgggctcattttggaacagatgaaaccattttagatggaaaagagtatgatatttatgtatcctatgcaaggaatgcggaagaagaagaatttgtattactgaccctccgtggagttttggagaatgaatttggatacaagctgtgcatctttgaccgagacagtctgcctgggggaaatacagtggaagcagtttttgatttcattcagagaagcagaaggatgattgttgttctgagccctgactatgtgacagaaaagagcatcagcatgctggagtttaaactgggtgtcatgtgccagaactccattgccaccaagctcattgtggttgagtaccgtccccttgagcacccgcacccaggcattcttcagctcaaagagtctgtgtcttttgtgagctggaagggagaaaagtccaaacattctggctctaaattctggaaagctttgcggttggctcttcccctgagaagtctgagtgccagttctggctggaatgagagctgctcttcccagtctgacatcagtctggatcacgttcaaaggaggagaagtcgtttgaaagagcccccagaacttcagagctcagagagggctgcaggtagccctccagccccaggcacaatgtccaagcaccgagggaagtcctccgccacctgccgctgttgtgtcacctactgtgaaggagagaatcaccttaggaacaagagccgggcagagattcataaccagccccagtgggagacacacctctgtaagcctgttccccaagagtcagaaactcaatggatacaaaatggcaccagattggaaccccctgctccccagatctcagcccttgctcttcatcatttcacggacttatccaataacaacgacttttatatcctataa

SEQ ID NO: 14677 - DNA, 4769 bp, Homo sapiens
  source 1..4769: mol_type = unassigned DNA
aaaagaaagtgcggcggaaagtaagaggctcactggggaagactgccgggatccaggtctccggggtccgctttggccagaggcgcggaaggaagcagtgcccggcgacactgcacccatcccggctgcttttgctgcgccctctcagcttcccaagaaaggcatcgtcatgtgatcatcacctaagaactagaacatcagcaggccctagaagcctcactcttgcccctccctttaatatctcaaaggatgacacttctgtggtgtgtagtgagtctctacttttatggaatcctgcaaagtgatgcctcagaacgctgcgatgactggggactagacaccatgaggcaaatccaagtgtttgaagatgagccagctcgcatcaagtgcccactctttgaacacttcttgaaattcaactacagcacagcccattcagctggccttactctgatctggtattggactaggcaggaccgggaccttgaggagccaattaacttccgcctccccgagaaccgcattagtaaggagaaagatgtgctgtggttccggcccactctcctcaatgacactggcaactatacctgcatgttaaggaacactacatattgcagcaaagttgcatttcccttggaagttgttcaaaaagacagctgtttcaattcccccatgaaactcccagtgcataaactgtatatagaatatggcattcagaggatcacttgtccaaatgtagatggatattttccttccagtgtcaaaccgactatcacttggtatatgggctgttataaaatacagaattttaataatgtaatacccgaaggtatgaacttgagtttcctcattgccttaatttcaaataatggaaattacacatgtgttgttacatatccagaaaatggacgtacgtttcatctcaccaggactctgactgtaaaggtagtaggctctccaaaaaatgcagtgccccctgtgatccattcacctaatgatcatgtggtctatgagaaagaaccaggagaggagctactcattccctgtacggtctattttagttttctgatggattctcgcaatgaggtttggtggaccattgatggaaaaaaacctgatgacatcactattgatgtcaccattaacgaaagtataagtcatagtagaacagaagatgaaacaagaactcagattttgagcatcaagaaagttacctctgaggatctcaagcgcagctatgtctgtcatgctagaagtgccaaaggcgaagttgccaaagcagccaaggtgaagcagaaagtgccagctccaagatacacagtggaactggcttgtggttttggagccacagtcctgctagtggtgattctcattgttgtttaccatgtttactggctagagatggtcctattttaccgggctcattttggaacagatgaaaccattttagatggaaaagagtatgatatttatgtatcctatgcaaggaatgcggaagaagaagaatttgtattactgaccctccgtggagttttggagaatgaatttggatacaagctgtgcatctttgaccgagacagtctgcctgggggaattgtcacagatgagactttgagcttcattcagaaaagcagacgcctcctggttgttctaagccccaactacgtgctccagggaacccaagccctcctggagctcaaggctggcctagaaaatatggcctctcggggcaacatcaacgtcattttagtacagtacaaagctgtgaaggaaacgaaggtgaaagagctgaagagggctaagacggtgctcacggtcattaaatggaaaggggaaaaatccaagtatccacagggcaggttctggaagcagctgcaggtggccatgccagtgaagaaaagtcccaggcggtctagcagtgatgagcagggcctctcgtattcatctttgaaaaatgtatgaaaggaataatgaaaagggtaaaaagaacaaggggtgctccaggaagaaagagtccccccagtcttcattcgcagtttatggtttcataggcaaaaataatggtctaagcctcccaatagggataaatttagggtgactgtgtggctgactattctgcttcctcaggcaacactaaagtttagaaagatatcatcaacgttctgtcaccagtctctgatgccactatgttctttgcaggcaaagacttgttcaatgcgaatttccccttctacattgtctatccctgtttttatatgtctccattctttttaaaatcttaacatatggagcagcctttcctatgaatttaaatatgcctttaaaataagtcactgttgacagggtcatgagtttccgagtatagttttctttttatcttatttttactcgtccgttgaaaagataatcaaggcctacattttagctgaggataatgaacttttttcctcattcggctgtataatacataaccacagcaagactgacatccacttaggatgatacaaagcagtgtaactgaaaatgtttcttttaattgatttaaaggacttgtcttctataccacccttgtcctcatctcaggtaatttatgaaatctatgtaaacttgaaaaatatttcttaatttttgtttttgctccagtcaattcctgattatccacaggtcaacccacattttttcattccttctccctatctgcttatatcgcattgctcatttagagtttgcaggaggctccatactaggttcagtctgaaagaaatctcctaatggtgctatagagagggaggtaacagaaagactcttttagggcatttttctgactcatgaaaagagcacagaaaaggatgtttggcaatttgtcttttaagtcttaaccttgctaatgtgaatactgggaaagtgattttttctcactcgtttttgttgctccattgtaaagggcggaggtcagtcttagtggccttgagagttgcttttggcattaatattctaagagaattaactgtatttcctgtcacctattcactagtgcaggaaatatacttgctccaaataagtcagtatgagaagtcactgtcaatgaaagttgttttgtttgttttcagtaatattttgctgtttttaagacttggaaaactaagtgcagagtttacagagtggtaaatatctatgttacatgtagattatacatatatatacacacgtgtatatgagatatatatcttatatctccacaaacacaaattatatatatacatatccacacacatacattacatatatctgtgtatataaatccacatgcacatgaaatatatatatatatataatttgtgtgtgtgtatgtgtatgtatatgactttaaatagctatgggtacaatattaaaaaccactggaactcttgtccagtttttaaattatgtttttactggaatgtttttgtgtcagtgttttctgtacatattatttgttaattcacagctcacagagtgatagttgtcatagttcttgccttccctaagtttatataaataacttaagtattgctacagtttatctaggttgcagtggcatctgctgtgcacagagcttccatggtcactgctaagcagtagccagccatcgggcattaattgatttcctactatattcccagcagacacatttagaaactaagctatgttaacctcagtgctcaactatttgaactgttgagtgataaaggaaacaaatataactgtaaatgaatcttggtatcctgtgaaacagaataattcgtaatttaagaaagcccttatcccggtaacatgaatgttgatgaacaaatgtaaaattatatcctatatttaagtacccataataaatcatttccctctataagtgttattgattattttaaattgaaaaaagtttcacttggatgaaaaaagtagaaaagtaggtcattcttggatctacttttttttagccttattaatatttttccctattagaaaccacaattactccctctattaacccttcacttactagaccagaaaagaacttattccagataagctttgaatatcaattcttacataaactttaggcaaacagggaatagtctagtcaccaaaggaccattctcttgccaatgctgcattccttttgcacttttggattccatatttatcccaaatgctgttgggcacccctagaaataccttgatgttttttctatttatatgcctgcctttggtacttaattttacaaatgctgtaatataaagcatatcaagtttatgtgatacgtatcattgcaagagaatttgtttcaagatttttttttaatgttccagaagatggccaatagagaacattcaagggaaatggggaaacataatttagagaacaagaacaaaccatgtctcaaatttttttaaaaaaaattaatggttttaaatatatgctatagggacgttccatgcccaggttaacaaagaactgtgatatatagagtgtctaattacaaaatcatatacgatttatttaattctcttctgtattgtaacttagatgattcccaaggactctaataaaaaatcacttcattgtatttggaaacaaaaacatcattcattaattacttattttctttccataggttttaatattttgagagtgtcttttttatttcattcatgaacttttgtatttttcatttttcatttgatttgtaaatttacttatgttaaaaataaaccatttattttcagctttg

SEQ ID NO: 14678 - DNA, 523 bp, Homo sapiens
  source 1..523: mol_type = unassigned DNA
agatatttcttgggtagtagaaaaagaaatacttcacagagctgtcaaatctccacatcttcagcattaaatatcatgcaaccaaatgatgacacttctgtggtgtgtagtgagtctctacttttatggaatcctgcaaagtgatgcctcagaacgctgcgatgactggggactagacaccatgaggcaaatccaagtgtttgaagatgagccagctcgcatcaagtgcccactctttgaacacttcttgaaattcaactacagcacagcccattcagctggccttactctgatctggtattggactaggcaggaccgggaccttgaggagccaattaacttccgcctccccgagaaccgcattagtaaggagaaagatgtgctgtggttccggcccactctcctcaatgacactggcaactatacctgcatgttaaggaacactacatattgcagcaaagttgcatttcccttggaagttgttcaaaaagacagctgtttcaattcccccatgaaactccca

SEQ ID NO: 14679 - DNA, 2091 bp, Homo sapiens
  source 1..2091: mol_type = unassigned DNA
atgaaagctccgattccacacttgattctcttatacgctacttttactcagagtttgaaggttgtgaccaaaagaggctccgccgatggatgcactgactggtctatcgatatcaagaaatatcaagttttggtgggagagcctgttcgaatcaaatgtgcactcttttatggttatatcagaacaaattactcccttgcccaaagtgctggactcagtttgatgtggtacaaaagttctggtcctggagactttgaagagccaatagcctttgacggaagtagaatgagcaaagaagaagactccatttggttccggccaacattgctacaggacagtggtctctacgcctgtgtcatcagaaactccacttactgtatgaaagtatccatctcactgacagtgggtgaaaatgacactggactctgctataattccaagatgaagtattttgaaaaagctgaacttagcaaaagcaaggaaatttcatgccgtgacatagaggattttctactgccaaccagagaacctgaaatcctttggtacaaggaatgcaggacaaaaacatggaggccaagtattgtattcaaaagagatactctgcttataagagaagtcagagaagatgacattggaaattatacctgtgaattaaaatatggaggctttgttgtgagaagaactactgaattaactgttacagcccctctgactgataagccacccaagcttttgtatcctatggaaagtaaactgacaattcaggagacccagctgggtgactctgctaatctaacctgcagagctttctttgggtacagcggagatgtcagtcctttaatttactggatgaaaggagaaaaatttattgaagatctggatgaaaatcgagtttgggaaagtgacattagaattcttaaggagcatcttggggaacaggaagtttccatctcattaattgtggactctgtggaagaaggtgacttgggaaattactcctgttatgttgaaaatggaaatggacgtcgacacgccagcgttctccttcataaacgagagctaatgtacacagtggaacttgctggaggccttggtgctatactcttgctgcttgtatgtttggtgaccatctacaagtgttacaagatagaaatcatgctcttctacaggaatcattttggagctgaagagctcgatggagacaataaagattatgatgcatacttatcatacaccaaagtggatcctgaccagtggaatcaagagactggggaagaagaacgttttgcccttgaaatcctacctgatatgcttgaaaagcattatggatataagttgtttataccagatagagatttaatcccaactggaacatacattgaagatgtggcaagatgtgtagatcaaagcaagcggctgattattgtcatgaccccaaattacgtagttagaaggggctggagcatctttgagctggaaaccagacttcgaaatatgcttgtgactggagaaattaaagtgattctaattgaatgcagtgaactgagaggaattatgaactaccaggaggtggaggccctgaagcacaccatcaagctcctgacggtcattaaatggcatggaccaaaatgcaacaagttgaactccaagttctggaaacgtttacagtatgaaatgccttttaagaggatagaacccattacacatgagcaggctttagatgtcagtgagcaagggccttttggggagctgcagactgtctcggccatttccatggccgcggccacctccacagctctagccactgcccatccagatctccgttctacctttcacaacacgtaccattcacaaatgcgtcagaaacactactaccgaagctatgagtacgacgtacctcctaccggcaccctgcctcttacctccataggcaatcagcatacctactgtaacatccctatgacactcatcaacgggcagcggccacagacaaaatcgagcagggagcagaatccagatgaggcccacacaaacagtgccatcctgccgctgttgccaagggagaccagtatatccagtgtgatatggtga

SEQ ID NO: 14680 - DNA, 3667 bp, Homo sapiens
  source 1..3667: mol_type = unassigned DNA
gagacaccttcccaaacagcaggggttgtgtgctttcacatagcagtactgtacaaggaaaaccccgtcggatctgttattgcgggatacttgtgaaatatacataggattctttcttatggctgcatcccggatctggaaattttacttggggaccaggaggatttgaaaggctgcatgtactcagaagatttgcaagcaacactccaattcttgtcatagagctcgcagacttctcacttatcggcttttttccttccttattttttaagaattattcttattttcccctctctttttctgctctctcctctctcagtctctccttttctatctgcctcttcatttttctcctagtctgtttttttttttcctgctctgcacctggattgtatcttcagcaaacaatcgggcactttgagaactaactggagacagtcttgtagggaagatctgtatggaattatctgcttttatggtgaacttggcatttgtgaatgggaatcttgttcacaatattaattgctagcaaaaacaagaaaaagaacacaggagtaaaacgtggatttttctgaatacgcattgtgatgaccagcaattaccttaccgactaatatccagaggagaataatttggaagactgttgtggggaacggcctttaagagctggaagatgaaagctccgattccacacttgattctcttatacgctacttttactcagagtttgaaggttgtgaccaaaagaggctccgccgatggatgcactgactggtctatcgatatcaagaaatatcaagttttggtgggagagcctgttcgaatcaaatgtgcactcttttatggttatatcagaacaaattactcccttgcccaaagtgctggactcagtttgatgtggtacaaaagttctggtcctggagactttgaagagccaatagcctttgacggaagtagaatgagcaaagaagaagactccatttggttccggccaacattgctacaggacagtggtctctacgcctgtgtcatcagaaactccacttactgtatgaaagtatccatctcactgacagtgggtgaaaatgacactggactctgctataattccaagatgaagtattttgaaaaagctgaacttagcaaaagcaaggaaatttcatgccgtgacatagaggattttctactgccaaccagagaacctgaaatcctttggtacaaggaatgcaggacaaaaacatggaggccaagtattgtattcaaaagagatactctgcttataagagaagtcagagaagatgacattggaaattatacctgtgaattaaaatatggaggctttgttgtgagaagaactactgaattaactgttacagcccctctgactgataagccacccaagcttttgtatcctatggaaagtaaactgacaattcaggagacccagctgggtgactctgctaatctaacctgcagagctttctttgggtacagcggagatgtcagtcctttaatttactggatgaaaggagaaaaatttattgaagatctggatgaaaatcgagtttgggaaagtgacattagaattcttaaggagcatcttggggaacaggaagtttccatctcattaattgtggactctgtggaagaaggtgacttgggaaattactcctgttatgttgaaaatggaaatggacgtcgacacgccagcgttctccttcataaacgagagctaatgtacacagtggaacttgctggaggccttggtgctatactcttgctgcttgtatgtttggtgaccatctacaagtgttacaagatagaaatcatgctcttctacaggaatcattttggagctgaagagctcgatggagacaataaagattatgatgcatacttatcatacaccaaagtggatcctgaccagtggaatcaagagactggggaagaagaacgttttgcccttgaaatcctacctgatatgcttgaaaagcattatggatataagttgtttataccagatagagatttaatcccaactggaacatacattgaagatgtggcaagatgtgtagatcaaagcaagcggctgattattgtcatgaccccaaattacgtagttagaaggggctggagcatctttgagctggaaaccagacttcgaaatatgcttgtgactggagaaattaaagtgattctaattgaatgcagtgaactgagaggaattatgaactaccaggaggtggaggccctgaagcacaccatcaagctcctgacggtcattaaatggcatggaccaaaatgcaacaagttgaactccaagttctggaaacgtttacagtatgaaatgccttttaagaggatagaacccattacacatgagcaggctttagatgtcagtgagcaagggccttttggggagctgcagactgtctcggccatttccatggccgcggccacctccacagctctagccactgcccatccagatctccgttctacctttcacaacacgtaccattcacaaatgcgtcagaaacactactaccgaagctatgagtacgacgtacctcctaccggcaccctgcctcttacctccataggcaatcagcatacctactgtaacatccctatgacactcatcaacgggcagcggccacagacaaaatcgagcagggagcagaatccagatgaggcccacacaaacagtgccatcctgccgctgttgccaagggagaccagtatatccagtgtgatatggtgacagaaaagcaagggacatcccgtccctgggaggttgagtggaatctgcagtccagtgcctggaactaaatcctcgactgctgctgttaaaaaacatgcattagaatctctagaacacgaggaaaaacagggtcttgtacatatgttttttggaatttctttgtagcatcagtgtcctcctgttttaccatgtcttttaccattacattttttgactttgttttatatgtcgttggaatttgtaaatttacattttttttaaagaagagactgatgtgtagatagaaaaccctttttttgcttcattagtttagttttagaatgggtttttattttatttccttttttaaaattttactttgcttttaacatttccttggggtgcttggacaaatctatccgatgggacaaggagcaccggattctttctcgggttctgcctagcatcaactgggccacgtcggccttcagagaacagtgcaacaaatgccagcattgccattcgggggaaaaaaaaaaaaaaaaaaaaaagatgagaagaacacttgttcataggagggccccaccagtcagagccctgaatctcttccttgtcccacctcattccccacctctacctttctaatggcggcatgatgtgtaaactctgtgcaggggtgggggcgggtctaactgtcttaacattcaagtcactgctcttcagaatacactctagacccaaaggtgtgctaatcacttcacagtgaccactacagagtactaagaagagaagatcaagggcatgaaattggggaagagtgttatttccgttttttaaatgagttgatgtacccttatatatatatacatatatatataaatataaatatatataaaaacaacaaaacaaaacaaaaaaagaaaa

SEQ ID NO: 14681 - DNA, 2061 bp, Homo sapiens
  source 1..2061: mol_type = unassigned DNA
atgaagccaccatttcttttggcccttgtggtctgttctgtagtcagcacaaatctgaagatggtgtcaaagagaaattctgtggatggctgcattgactggtcagtggatctcaagacatacatggctttggcaggtgaaccagtccgagtgaaatgtgcccttttctacagttatattcgtaccaactatagcacggcccagagcactgggctcaggcttatgtggtacaaaaacaaaggtgatttggaagagcccatcatcttttcagaggtcaggatgagcaaagaggaagattcaatatggtttcactcagctgaggcacaagacagtggattctacacttgtgttttaagaaactcaacatattgcatgaaggtgtcaatgtccttgactgttgcagagaatgaatcaggcctgtgctacaacagcaggatccgctatttagaaaaatctgaagtcactaaaagaaaggagatctcctgtccagacatggatgactttaaaaagtccgatcaggagcctgatgttgtgtggtataaggaatgcaagccaaaaatgtggagaagcataataatacagaaaggaaatgctcttctgatccaagaagttcaagaagaagatggaggaaattacacatgtgaacttaaatatgaaggaaaacttgtaagacgaacaactgaattgaaagttacagctttactcacagacaagcctcccaagccattgttccccatggagaatcagccaagtgttatagatgtccagctgggtaagcctctgaacatcccctgcaaagcattcttcggattcagtggagagtctgggccaatgatctactggatgaaaggagaaaagtttattgaagaactggcaggtcacattagagaaggtgaaataaggcttctcaaagagcatcttggagaaaaagaagttgaattggcactcatctttgactcagttgtggaagctgacctggcgaattatacctgccatgttgaaaaccgaaatggacggaaacatgccagtgttttgctgcgtaaaaaggatttaatctataaaattgagcttgcagggggcctgggagcaatcttcctcctccttgtactgctggtggtcatttacaaatgctacaacattgaattgatgctcttctacaggcagcactttggagctgatgaaactaatgatgacaacaaggaatatgatgcctatctctcttacacaaaagtggaccaagatactttagactgtgacaatcctgaagaagagcagtttgctcttgaagtactgccagatgtcctggaaaaacactatggatataaactcttcatcccagaaagagacctgattccaagtggaacatacatggaagatctcacaagatatgttgaacaaagcagaagacttattatcgtgctaactccagactatattctcagacggggatggagtattttcgaactggaaagcagactccataacatgctagtcagtggagaaatcaaagtgattttgattgagtgtacagaattaaaagggaaagtgaattgccaggaagtggaatcactaaagcgtagcatcaaacttctgtccctgatcaagtggaagggatccaaaagcagcaaattaaattctaagttttggaagcacttagtatatgaaatgcccatcaagaaaaaagaaatgctacctcggtgccatgttctggactccgcagaacaaggactttttggagaactccagcctataccctctattgccatgaccagtacttcagccactctggtgtcatctcaggctgatctccctgaattccacccttcagattcaatgcaaatcaggcactgttgcagaggttataaacatgagataccagccacgaccttgccagtaccttccttaggcaaccaccatacttattgtaacctgcctctgacgctactcaacggacagctaccccttaataacaccctgaaagatacccaggaatttcacaggaacagttctttgctgcctttatcctccaaagagcttagctttaccagtgatatttggtag

SEQ ID NO: 14682 - DNA, 2985 bp, Homo sapiens
  source 1..2985: mol_type = unassigned DNA
gtgaggcgagcctggagctcatttccaggcgcccttccctcttcggaactaagggagacttgtgggcttttgcacactggctgtagggttcccgggaaagactggagcagcgaacaggagggagagaggtggacaggcagagtctgcacctgccgcctgcacctccgttagggcgacagggcagctggtgtttcgctcctggagtgtgcctacctcgcaaggggggcgagggccacaggctgaggcgcccgcgtcccggagtgcaccgcttggccgaggcaaggtgttgctggggcaaggctgctccgaagcgaagtcgcgcaaaaggaagagtctgggaggcaggcgacttaggagagtctagtcactgagagacagaggcagcatctgccattctaactacggagctgagtaatttagaaaccctccttaactctccctttccagctctccccaaagtccacagaagctctgctgaactctagaaatcttccctggctggggggaagtttactagtatcctctttggctaagacagggagtggaaaaaacaggcggggctgtactgtccgctgtttggggagacgcggtcttcctcgcgcccccttcagccactccgactgcctgggaagtcccagcccgcgctctccggaacccggctcgccgtctcgccctggacatggaactacgcatctgagacctgctggacgttttgctggccgttttgcaagactcagctgtcaagaaaagtgaaggatgaagccaccatttcttttggcccttgtggtctgttctgtagtcagcacaaatctgaagatggtgtcaaagagaaattctgtggatggctgcattgactggtcagtggatctcaagacatacatggctttggcaggtgaaccagtccgagtgaaatgtgcccttttctacagttatattcgtaccaactatagcacggcccagagcactgggctcaggcttatgtggtacaaaaacaaaggtgatttggaagagcccatcatcttttcagaggtcaggatgagcaaagaggaagattcaatatggtttcactcagctgaggcacaagacagtggattctacacttgtgttttaagaaactcaacatattgcatgaaggtgtcaatgtccttgactgttgcagagaatgaatcaggcctgtgctacaacagcaggatccgctatttagaaaaatctgaagtcactaaaagaaaggagatctcctgtccagacatggatgactttaaaaagtccgatcaggagcctgatgttgtgtggtataaggaatgcaagccaaaaatgtggagaagcataataatacagaaaggaaatgctcttctgatccaagaagttcaagaagaagatggaggaaattacacatgtgaacttaaatatgaaggaaaacttgtaagacgaacaactgaattgaaagttacagctttactcacagacaagcctcccaagccattgttccccatggagaatcagccaagtgttatagatgtccagctgggtaagcctctgaacatcccctgcaaagcattcttcggattcagtggagagtctgggccaatgatctactggatgaaaggagaaaagtttattgaagaactggcaggtcacattagagaaggtgaaataaggcttctcaaagagcatcttggagaaaaagaagttgaattggcactcatctttgactcagttgtggaagctgacctggcgaattatacctgccatgttgaaaaccgaaatggacggaaacatgccagtgttttgctgcgtaaaaaggatttaatctataaaattgagcttgcagggggcctgggagcaatcttcctcctccttgtactgctggtggtcatttacaaatgctacaacattgaattgatgctcttctacaggcagcactttggagctgatgaaactaatgatgacaacaaggaatatgatgcctatctctcttacacaaaagtggaccaagatactttagactgtgacaatcctgaagaagagcagtttgctcttgaagtactgccagatgtcctggaaaaacactatggatataaactcttcatcccagaaagagacctgattccaagtggaacatacatggaagatctcacaagatatgttgaacaaagcagaagacttattatcgtgctaactccagactatattctcagacggggatggagtattttcgaactggaaagcagactccataacatgctagtcagtggagaaatcaaagtgattttgattgagtgtacagaattaaaagggaaagtgaattgccaggaagtggaatcactaaagcgtagcatcaaacttctgtccctgatcaagtggaagggatccaaaagcagcaaattaaattctaagttttggaagcacttagtatatgaaatgcccatcaagaaaaaagaaatgctacctcggtgccatgttctggactccgcagaacaaggactttttggagaactccagcctataccctctattgccatgaccagtacttcagccactctggtgtcatctcaggctgatctccctgaattccacccttcagattcaatgcaaatcaggcactgttgcagaggttataaacatgagataccagccacgaccttgccagtaccttccttaggcaaccaccatacttattgtaacctgcctctgacgctactcaacggacagctaccccttaataacaccctgaaagatacccaggaatttcacaggaacagttctttgctgcctttatcctccaaagagcttagctttaccagtgatatttggtagtgaaaaatctgaattcctctgaacagctagataagcatagagaatttctgttataccaagcataaagtacacctaataacgttgtgttaaaaaagtgtttgaagaaaaaggtacaaaaatggcttttatacttaaatatttttgtttacatttccagaatagtggggg

SEQ ID NO: 14683 - DNA, 1561 bp, Homo sapiens
  source 1..1561: mol_type = unassigned DNA
gaggttttcttggctgtctacataaggctgaagtgcattatttaaactgtagcatccgtgtcactgctggctcactagctggtatcctagagcttttgggacatctgacatggtggctttgagagctgtcttcctgctctggccagccaccataagctcttcacctttagttcatcttaaagggacacgaatgaaaccagaagcattcattttttcaacgaatggtgtgcttctagaatgcgagacaacaaggaatatgatgcctatctctcttacacaaaagtggaccaagatactttagactgtgacaatcctgaagaagagcagtttgctcttgaagtactgccagatgtcctggaaaaacactatggatataaactcttcatcccagaaagagacctgattccaagtggaacatacatggaagatctcacaagatatgttgaacaaagcagaagacttattatcgtgctaactccagactatattctcagacggggatggagtattttcgaactggaaagcagactccataacatgctagtcagtggagaaatcaaagtgattttgattgagtgtacagaattaaaagggaaagtgaattgccaggaagtggaatcactaaagcgtagcatcaaacttctgtccctgatcaagtggaagggatccaaaagcagcaaattaaattctaagttttggaagcacttagtatatgaaatgcccatcaagaaaaaagaaatgctacctcggtgccatgttctggactccgcagaacaaggactttttggagaactccagcctataccctctattgccatgaccagtacttcagccactctggtgtcatctcaggctgatctccctgaattccacccttcagattcaatgcaaatcaggcactgttgcagaggttataaacatgagataccagccacgaccttgccagtaccttccttaggcaaccaccatacttattgtaacctgcctctgacgctactcaacggacagctaccccttaataacaccctgaaagatacccaggaatttcacaggaacagttctttgctgcctttatcctccaaagagcttagctttaccagtgatatttggtagtgaaaaatctgaattcctctgaacagctagataagcatagagaatttctgttataccaagcataaagtacacctaataacgttgtgttaaaaaagtgtttgaagaaaaaggtacaaaaatggcttttatacttaaatatttttgtttacatttccagaatagtggggggaaagaaggacctgcttttgtagtatggcaccttgttccaatgtacagttttgatttcttcctgaaaacaaaaattttaaaatcctgttgtcttagagtagcttttatgatagcacatggactgcatgcttagtaggtgagctgtcttgcccatatttaaaaagatttcagtattcacatggtatttgaaataaagaaaatttaaagactttaattgaatttgaaaattctgaaccaagtttaagggaaaaaatgacttctatagagttctgaaaactca

SEQ ID NO: 14684 - DNA, 1578 bp, Homo sapiens
  source 1..1578: mol_type = unassigned DNA
cccgtgaggaggaaaaggtgtgtccgctgccacccagtgtgagcgggtgacaccacccggttaggaaatcccagctcccaagagggtataaatccctgctttactgctgagctcctgctggaggtgaaagtctggcctggcagccttccccaggtgagcagcaacaaggccacgtgctgctgggtctcagtcctccacttcccgtgtcctctggaagttgtcaggagcaatgttgcgcttgtacgtgttggtaatgggagtttctgccttcacccttcagcctgcggcacacacaggggctgccagaagctgccggtttcgtgggaggcattacaagcgggagttcaggctggaaggggagcctgtagccctgaggtgcccccaggtgccctactggttgtgggcctctgtcagcccccgcatcaacctgacatggcataaaaatgactctgctaggacggtcccaggagaagaagagacacggatgtgggcccaggacggtgctctgtggcttctgccagccttgcaggaggactctggcacctacgtctgcactactagaaatgcttcttactgtgacaaaatgtccattgagctcagagtttttgagaatacagatgctttcctgccgttcatctcatacccgcaaattttaaccttgtcaacctctggggtattagtatgccctgacctgagtgaattcacccgtgacaaaactgacgtgaagattcaatggtacaaggattctcttcttttggataaagacaatgagaaatttctaagtgtgagggggaccactcacttactcgtacacgatgtggccctggaagatgctggctattaccgctgtgtcctgacatttgcccatgaaggccagcaatacaacatcactaggagtattgagctacgcatcaagaaaaaaaaagaagagaccattcctgtgatcatttcccccctcaagaccatatcagcttctctggggtcaagactgacaatcccgtgtaaggtgtttctgggaaccggcacacccttaaccaccatgctgtggtggacggccaatgacacccacatagagagcgcctacccgggaggccgcgtgaccgaggggccacgccaggaatattcagaaaataatgagaactacattgaagtgccattgatttttgatcctgtcacaagagaggatttgcacatggattttaaatgtgttgtccataataccctgagttttcagacactacgcaccacagtcaaggaagcctcctccacgttctcctggggcattgtgctggccccactttcactggccttcttggttttggggggaatatggatgcacagacggtgcaaacacagaactggaaaagcagatggtctgactgtgctatggcctcatcatcaagactttcaatcctatcccaagtgaaataaatggaatgaaataattcaaacacaaactccgtacgtcttctcttatggaagtggctgtgtctttttgagggactctgttctttgcctcagttgtctaccaaaggtgccacatttatagtggctttgtagtaaaggactaaagtctta

SEQ ID NO: 14685 - DNA, 1405 bp, Homo sapiens
  source 1..1405: mol_type = unassigned DNA
gtgggatgggagatactgttgtggtcacctctggaaaatacattctgctactcttaaaaactagtgacgctcatacaaatcaacagaaagagcttctgaaggaagactttaaagctgcttctgccacgtgctgctgggtctcagtcctccacttcccgtgtcctctggaagttgtcaggagcaatgttgcgcttgtacgtgttggtaatgggagtttctgccttcacccttcagcctgcggcacacacaggggctgccagaagctgccggtttcgtgggaggcattacaagcgggagttcaggctggaaggggagcctgtagccctgaggtgcccccaggtgccctactggttgtgggcctctgtcagcccccgcatcaacctgacatggcataaaaatgactctgctaggacggtcccaggagaagaagagacacggatgtgggcccaggacggtgctctgtggcttctgccagccttgcaggaggactctggcacctacgtctgcactactagaaatgcttcttactgtgacaaaatgtccattgagctcagagtttttgagaatacagatgctttcctgccgttcatctcatacccgcaaattttaaccttgtcaacctctggggtattagtatgccctgacctgagtgaattcacccgtgacaaaactgacgtgaagattcaatggtacaaggattctcttcttttggataaagacaatgagaaatttctaagtgtgagggggaccactcacttactcgtacacgatgtggccctggaagatgctggctattaccgctgtgtcctgacatttgcccatgaaggccagcaatacaacatcactaggagtattgagctacgcatcaagaaaaaaaaagaagagaccattcctgtgatcatttcccccctcaagaccatatcagcttctctggggtcaagactgacaatcccgtgtaaggtgtttctgggaaccggcacacccttaaccaccatgctgtggtggacggccaatgacacccacatagagagcgcctacccgggaggccgcgtgaccgaggggccacgccaggaatattcagaaaataatgagaactacattgaagtgccattgatttttgatcctgtcacaagagaggatttgcacatggattttaaatgtgttgtccataataccctgagttttcagacactacgcaccacagtcaaggaagcctcctccacgttctcctggggcattgtgctggccccactttcactggccttcttggttttggggggaatatggatgcacagacggtgcaaacacagaactggaaaagcagatggtctgactgtgctatggcctcatcatcaagactttcaatcctatcccaagtgaaataaatggaatgaaataattcaaa

SEQ ID NO: 14686 - DNA, 792 bp, Homo sapiens
  source 1..792: mol_type = unassigned DNA
gactcagagatgagacagttgcctaaaaacttctgggaacaaggccacgtgctgctgggtctcagtcctccacttcccgtgtcctctggaagttgtcaggagcaatgttgcgcttgtacgtgttggtaatgggagtttctgccttcacccttcagcctgcggcacacacaggggctgccagaagctgccggtttcgtgggaggcattacaagcgggagttcaggctggaaggggagcctgtagccctgaggtgcccccaggtgccctactggttgtgggcctctgtcagcccccgcatcaacctgacatggcataaaaatgactctgctaggacggtcccaggagaagaagagacacggatgtgggcccaggacggtgctctgtggcttctgccagccttgcaggaggactctggcacctacgtctgcactactagaaatgcttcttactgtgacaaaatgtccattgagctcagagtttttgagaatacagatgctttcctgccgttcatctcatacccgcaaattttaaccttgtcaacctctggggtattagtatgccctgacctgagtgaattcacccgtgacaaaactgacgtgaagattcaatggtacaaggattctcttcttttggataaagacaatgagaaatttctaagtgtgagggggaccactcacttactcgtacacgatgtggccctggaagatgctggctattaccgctgtgtcctgacatttgcccatgaaggccagcaatacaacatcactaggagtattgagctacgcatcaaga

SEQ ID NO: 14687 - DNA, 2058 bp, Homo sapiens
  source 1..2058: mol_type = unassigned DNA
aaagagaggctggctgttgtatttagtaaagctataaagctgtaagagaaattggctttctgagttgtgaaactgtgggcagaaagttgaggaagaaagaactcaagtacaacccaatgaggttgagatataggctactcttcccaactcagtcttgaagagtatcaccaactgcctcatgtgtggtgaccttcactgtcgtatgccagtgactcatctggagtaatctcaacaacgagttaccaatacttgctcttgattgataaacagaatggggttttggatcttagcaattctcacaattctcatgtattccacagcagcaaagtttagtaaacaatcatggggcctggaaaatgaggctttaattgtaagatgtcctagacaaggaaaacctagttacaccgtggattggtattactcacaaacaaacaaaagtattcccactcaggaaagaaatcgtgtgtttgcctcaggccaacttctgaagtttctaccagctgcagttgctgattctggtatttatacctgtattgtcagaagtcccacattcaataggactggatatgcgaatgtcaccatatataaaaaacaatcagattgcaatgttccagattatttgatgtattcaacagtatctggatcagaaaaaaattccaaaatttattgtcctaccattgacctctacaactggacagcacctcttgagtggtttaagaattgtcaggctcttcaaggatcaaggtacagggcgcacaagtcatttttggtcattgataatgtgatgactgaggacgcaggtgattacacctgtaaatttatacacaatgaaaatggagccaattatagtgtgacggcgaccaggtccttcacggtcaaggatgagcaaggcttttctctgtttccagtaatcggagcccctgcacaaaatgaaataaaggaagtggaaattggaaaaaacgcaaacctaacttgctctgcttgttttggaaaaggcactcagttcttggctgccgtcctgtggcagcttaatggaacaaaaattacagactttggtgaaccaagaattcaacaagaggaagggcaaaatcaaagtttcagcaatgggctggcttgtctagacatggttttaagaatagctgacgtgaaggaagaggatttattgctgcagtacgactgtctggccctgaatttgcatggcttgagaaggcacaccgtaagactaagtaggaaaaatccaattgatcatcatagcatctactgcataattgcagtatgtagtgtatttttaatgctaatcaatgtcctggttatcatcctaaaaatgttctggattgaggccactctgctctggagagacatagctaaaccttacaagactaggaatgatggaaagctctatgatgcttatgttgtctacccacggaactacaaatccagtacagatggggccagtcgtgtagagcactttgttcaccagattctgcctgatgttcttgaaaataaatgtggctataccttatgcatttatgggagagatatgctacctggagaagatgtagtcactgcagtggaaaccaacatacgaaagagcaggcggcacattttcatcctgacccctcagatcactcacaataaggagtttgcctacgagcaggaggttgccctgcactgtgccctcatccagaacgacgccaaggtgatacttattgagatggaggctctgagcgagctggacatgctgcaggctgaggcgcttcaggactccctccagcatcttatgaaagtacaggggaccatcaagtggagggaggaccacattgccaataaaaggtccctgaattctaaattctggaagcacgtgaggtaccaaatgcctgtgccaagcaaaattcccagaaaggcctctagtttgactcccttggctgcccagaagcaatagtgcctgctgtgatgtgcaaaggcatctgagtttgaagctttcctgacttctcctagctggcttatgcccctgcactgaagtgtgaggagcaggaatattaaagggattcaggcctc

SEQ ID NO: 14688 - DNA, 3994 bp, Homo sapiens
  source 1..3994: mol_type = unassigned DNA
gtacatgatgcaccagcatttttgaacaagtcatagatttggccacaaatcaaatttcaggatgggaggagtgtctcccctttaaaatagaagagagtgagtagtctatgaggagggacctacaaagactggaaactattcttagctccgtcactgactccaagttcatcccctctgtctttcagtttggttgagatataggctactcttcccaactcagtcttgaagagtatcaccaactgcctcatgtgtggtgaccttcactgtcgtatgccagtgactcatctggagtaatctcaacaacgagttaccaatacttgctcttgattgataaacagaatggggttttggatcttagcaattctcacaattctcatgtattccacagcagcaaagtttagtaaacaatcatggggcctggaaaatgaggctttaattgtaagatgtcctagacaaggaaaacctagttacaccgtggattggtattactcacaaacaaacaaaagtattcccactcaggaaagaaatcgtgtgtttgcctcaggccaacttctgaagtttctaccagctgcagttgctgattctggtatttatacctgtattgtcagaagtcccacattcaataggactggatatgcgaatgtcaccatatataaaaaacaatcagattgcaatgttccagattatttgatgtattcaacagtatctggatcagaaaaaaattccaaaatttattgtcctaccattgacctctacaactggacagcacctcttgagtggtttaagaattgtcaggctcttcaaggatcaaggtacagggcgcacaagtcatttttggtcattgataatgtgatgactgaggacgcaggtgattacacctgtaaatttatacacaatgaaaatggagccaattatagtgtgacggcgaccaggtccttcacggtcaaggatgagcaaggcttttctctgtttccagtaatcggagcccctgcacaaaatgaaataaaggaagtggaaattggaaaaaacgcaaacctaacttgctctgcttgttttggaaaaggcactcagttcttggctgccgtcctgtggcagcttaatggaacaaaaattacagactttggtgaaccaagaattcaacaagaggaagggcaaaatcaaagtttcagcaatgggctggcttgtctagacatggttttaagaatagctgacgtgaaggaagaggatttattgctgcagtacgactgtctggccctgaatttgcatggcttgagaaggcacaccgtaagactaagtaggaaaaatccaagtaaggagtgtttctgagactttgatcacctgaactttctctagcaagtgtaagcagaatggagtgtggttccaagagatccatcaagacaatgggaatggcctgtgccataaaatgtgcttctcttcttcgggatgttgtttgctgtctgatctttgtagactgttcctgtttgctgggagcttctctgctgcttaaattgttcgtcctcccccactccctcctatcgttggtttgtctagaacactcagctgcttctttggtcatccttgttttctaactttatgaactccctctgtgtcactgtatgtgaaaggaaatgcaccaacaaccgtaaactgaacgtgttcttttgtgctcttttataacttgcattacatgttgtaagcatggtccgttctatacctttttctggtcataatgaacactcattttgttagcgagggtggtaaagtgaacaaaaaggggaagtatcaaactactgccatttcagtgagaaaatcctaggtgctactttataataagacatttgttaggccattcttgcattgatataaagaaatacctgagactgggtgatttatatgaaaagaggtttaattggctcacagttctgcaggctgtatgggaagcatggcggcatctgcttctggggacacctcaggagctttactcatggcagaaggcaaagcaaaggcaggcacttcacacagtaaaagcaggagcgagagagaggtgccacactgaaacagccagatctcatgagaagtcactcactattgcaaggacagcatcaaagagatggtgctaaaccattcatgatgaactcacccccatgatccaatcacctcccaccaggctccacctcgaatactggggattaccattcagcatgagatttgggcaggaacacagacccaaaccataccacacacattatcattgttaaactttgtaaagtatttaaggtacatggaacacacgggaagtctggtagctcagcccatttctttattgcatctgttattcaccatgtaattcaggtaccacgtattccagggagcctttcttggccctcagtttgcagtatacacactttccaagtactcttgtagcatcctgtttgtatcatagcactggtcacattgccttacctaaatctgtttgacagtctgctcaacacgactgcaagctccatgagggcagggacatcatctcttccatctttgggtccttagtgcaatacctggcagctagccagtgctcagctaaatatttgttgactgaataaatgaatgcacaaccaaattattgataccaaatgttttttttgtgtacatttctacttctctagctataagtcttaattatacaacaaaatactatttttatatttatgtttggtaaattcaataactttcctcatcatttggaaagtcaaattgtttattgcttccctacagttttttctgaatctagcaggattttaatgatatcattataatttgacacaataaaaggacaacatgaaactgatgaatctttattgggttaatttcagacactatataatcttttaaaaatgtaacattcttttttatatataaataattggtggcatcacaaatagccaaagcagggtggagagagtgatccttcctgggtgcaggcaagaaggggatatgttttctacagagttttcaaaacagtgataaagctgtctacaagtcattgtgctttttatcatcactatgcccagacaatgtgaaacatcagagatgaagtgctcttcccacagaggtggactgatccttctccccactcccttggtgtgtctctgaatgcaatgttgtcttggaaaacagctttccaagcatttcactcctgagcacttgccagtttcctcacttgttcttcacatatccaggcaaagacatcctgtttgctatatgaagcattgtatcccgtataaaaggaaggaaagagagaaatatatttttacactcatcactcctcaggggctgtacaatcatgtagaaattgtttaatgtgcctgtcaaatagccaaagagtgttaaaccctgagttcccacccatgtgtgtggtatggttaggattcatccagatacacagagagaggcacaacaggaggagaaaggataggggtgtggggacagcgggcccccaatatggtgtaatcgtggcaggtctctgcctgaagtgctatgtggggtttttcttgttttaattttgactttaacccctgatttgtaagtttttcataaaataaacagaatcataactcatgtagatggctataagtgccgtagtgttctgtgggtctctggtgtctgccagtgataagtgtggcaccccaggaaggctgtggaccccatcaaggtgctatgtgagggccatgcttggggtggtggtgggcccagtagaccctgcagccatccatccagcctgcccactcacactgcccttgtgtactcctgctttgctacgttatcattgatcaatgtccctggttacctatgtgtttgaattatcttcgtgttacaggtgtttaatgattttgctccttctagcttatttgtatttcacctgtttttctttaaatcaacatggttacactctgtttcagcaactgtataaattaaacacaaattattactactgcta

SEQ ID NO: 14689 - DNA, 1051 bp, Homo sapiens
  source 1..1051: mol_type = unassigned DNA
aaagagaggctggctgttgtatttagtaaagctataaagctgtaagagaaattggctttctgagttgtgaaactgtgggcagaaagttgaggaagaaagaactcaagtacaacccaatgaggttgagatataggctactcttcccaactcagtcttgaagagtatcaccaactgcctcatgtgtggtgaccttcactgtcgtatgccagtgactcatctggagtaatctcaacaacgagttaccaatacttgctcttgattgataaacagaatggggttttggatcttagcaattctcacaattctcatgtattccacagcagcaaagtttagtaaacaatcatggggcctggaaaatgaggctttaattgtaagatgtcctagacaaggaaaacctagttacaccgtggattggtattactcacaaacaaacaaaagtattcccactcaggaaagaaatcgtgtgtttgcctcaggccaacttctgaagtttctaccagctgcagttgctgattctggtatttatacctgtattgtcagaagtcccacattcaataggactggatatgcgaatgtcaccatatataaaaaacaatcagattgcaatgttccagattatttgatgtattcaacagtatctggatcagaaaaaaattccaaaatttattgtcctaccattgacctctacaactggacagcacctcttgagtggtttaagaattgtcaggctcttcaaggatcaaggtacagggcgcacaagtcatttttggtcattgataatgtgatgactgaggacgcaggtgattacacctgtaaatttatacacaatgaaaatggagccaattatagtgtgacggcgaccaggtccttcacggtcaaggtttggtgtcagagtttctgcaaattaaaaaagagcttaatctttagtaatactcattggattcaaagtctaatgagaggctttgtgatggtatactatggtgtacataaatgttgtcgagtggtttttaatctttgtttgcaatactttcaacatcatcaatggccttga

SEQ ID NO: 14690 - DNA, 898 bp, Homo sapiens
  source 1..898: mol_type = unassigned DNA
gagttgtgaaactgtgggcagaaagttgaggaagaaagaactcaagtacaacccaatgagggccaacttctgaagtttctaccagctgcagttgctgattctggtatttatacctgtattgtcagaagtcccacattcaataggactggatatgcgaatgtcaccatatataaaaaacaatcagattgcaatgttccagattatttgatgtattcaacagtatctggatcagaaaaaaattccaaaatttattgtcctaccattgacctctacaactggacagcacctcttgagtggtttaagaattgtcaggctcttcaaggatcaaggtacagggcgcacaagtcatttttggtcattgataatgtgatgactgaggacgcaggtgattacacctgtaaatttatacacaatgaaaatggagccaattatagtgtgacggcgaccaggtccttcacggtcaaggatgagcaaggcttttctctgtttccagtaatcggagcccctgcacaaaatgaaataaaggaagtggaaattggaaaaaacgcaaacctaacttgctctgcttgttttggaaaaggcactcagttcttggctgccgtcctgtggcagcttaatggaacaaaaattacagactttggtgaaccaagaattcaacaagaggaagggcaaaatcaaagtttcagcaatgggctggcttgtctagacatggttttaagaatagctgacgtgaaggaagaggatttattgctgcagtacgactgtctggccctgaatttgcatggcttgagaaggcacaccgtaagactaagtaggaaaaatccaagtaaggagtgtttctgagactttgatcacctgaactttctctagcaagtgtaagcagaatggagtgtggttc

SEQ ID NO: 14691 - DNA, 2693 bp, Homo sapiens
  source 1..2693: mol_type = unassigned DNA
aggagggacctacaaagactggaaactattcttagctccgtcactgactccaagttcatcccctctgtctttcagtttggttgagatataggctactcttcccaactcagtcttgaagagtatcaccaactgcctcatgtgtggtgaccttcactgtcgtatgccagtgactcatctggagtaatctcaacaacgagttaccaatacttgctcttgattgataaacagaatggggttttggatcttagcaattctcacaattctcatgtattccacagcagcaaagtttagtaaacaatcatggggcctggaaaatgaggctttaattgtaagatgtcctagacaaggaaaacctagttacaccgtggattggtattactcacaaacaaacaaaagtattcccactcaggaaagaaatcgtgtgtttgcctcaggccaacttctgaagtttctaccagctgcagttgctgattctggtatttatacctgtattgtcagaagtcccacattcaataggactggatatgcgaatgtcaccatatataaaaaacaatcagattgcaatgttccagattatttgatgtattcaacagtatctggatcagaaaaaaattccaaaatttattgtcctaccattgacctctacaactggacagcacctcttgagtggtttaagaattgtcaggctcttcaaggatcaaggtacagggcgcacaagtcatttttggtcattgataatgtgatgactgaggacgcaggtgattacacctgtaaatttatacacaatgaaaatggagccaattatagtgtgacggcgaccaggtccttcacggtcaaggatgagcaaggcttttctctgtttccagtaatcggagcccctgcacaaaatgaaataaaggaagtggaaattggcactcagttcttggctgccgtcctgtggcagcttaatggaacaaaaattacagactttggtgaaccaagaattcaacaagaggaagggcaaaatcaaagtttcagcaatgggctggcttgtctagacatggttttaagaatagctgacgtgaaggaagaggatttattgctgcagtacgactgtctggccctgaatttgcatggcttgagaaggcacaccgtaagactaagtaggaaaaatccaagtaaggagtgtttctgagactttgatcacctgaactttctctagcaagtgtaagcagaatggagtgtggttccaagagatccatcaagacaatgggaatggcctgtgccataaaatgtgcttctcttcttcgggatgttgtttgctgtctgatctttgtagactgttcctgtttgctgggagcttctctgctgcttaaattgttcgtcctcccccactccctcctatcgttggtttgtctagaacactcagctgcttctttggtcatccttgttttctaactttatgaactccctctgtgtcactgtatgtgaaaggaaatgcaccaacaaccgtaaactgaacgtgttcttttgtgctcttttataacttgcattacatgttgtaagcatggtccgttctatacctttttctggtcataatgaacactcattttgttagcgagggtggtaaagtgaacaaaaaggggaagtatcaaactactgccatttcagtgagaaaatcctaggtgctactttataataagacatttgttaggccattcttgcattgatataaagaaatacctgagactgggtgatttatatgaaaagaggtttaattggctcacagttctgcaggctgtatgggaagcatggcggcatctgcttctggggacacctcaggagctttactcatggcagaaggcaaagcaaaggcaggcacttcacacagtaaaagcaggagcgagagagaggtgccacactgaaacagccagatctcatgagaagtcactcactattgcaaggacagcatcaaagagatggtgctaaaccattcatgatgaactcacccccatgatccaatcacctcccaccaggctccacctcgaatactggggattaccattcagcatgagatttgggcaggaacacagacccaaaccataccacacacattatcattgttaaactttgtaaagtatttaaggtacatggaacacacgggaagtctggtagctcagcccatttctttattgcatctgttattcaccatgtaattcaggtaccacgtattccagggagcctttcttggccctcagtttgcagtatacacactttccaagtactcttgtagcatcctgtttgtatcatagcactggtcacattgccttacctaaatctgtttgacagtctgctcaacacgactgcaagctccatgagggcagggacatcatctcttccatctttgggtccttagtgcaatacctggcagctagccagtgctcagctaaatatttgttgactgaataaatgaatgcacaaccaaattattgataccaaatgttttttttgtgtacatttctacttctctagctataagtcttaattatacaacaaaatactatttttatatttatgtttggtaaattcaataactttcctcatcatttggaaagtcaaattgtttattgcttccctacagttttttctgaatctagcaggattttaatgatatcattataatttgacacaataaaaggacaacatgaaactga

SEQ ID NO: 14692 - DNA, 545 bp, Homo sapiens
  source 1..545: mol_type = unassigned DNA
gtgaaactgtgggcagaaagttgaggaagaaagaactcaagtacaacccaatgagggcataaggaaatcggaggcatgtttctgtctggctataacagttctcctactagatcctgaggccaaactattcacatgccattgttcctgaataccattgtggacataatcatctaattttggctattccatgcagagatatgctgctgtgactgctgacttgaatgttacgggatccccagcaggatctgggattctctctgttcttgaatgcgttgtttagttgagatataggctactcttcccaactcagtcttgaagagtatcaccaactgcctcatgtgtggtgaccttcactgtcgtatgccagtgactcatctggagtaatctcaacaacgagttaccaatacttgctcttgattgataaacagaatggggttttggatcttagcaattctcacaattctcatgtattccacagcagcaaagtttagtaaacaatcatggggcctggaaaatgaggctttaattgtaagatgtcctagaca

SEQ ID NO: 14693 - DNA, 2615 bp, Homo sapiens
  source 1..2615: mol_type = unassigned DNA
cccgcccacggtggcggggaaatacctaggcatggaagtggcatgacagggctcgtgtccctgtcatattttccactctccacgaggtcctgcgcgcttcaatcctgcaggcagcccggtttggggatgtggtccttgctgctctgcgggttgtccatcgcccttccactgtctgtcacagcagatggatgcaaggacatttttatgaaaaatgagatactttcagcaagccagccttttgcttttaattgtacattccctcccataacatctggggaagtcagtgtaacatggtataaaaattctagcaaaatcccagtgtccaaaatcatacagtctagaattcaccaggacgagacttggattttgtttctccccatggaatggggggactcaggagtctaccaatgtgttataaagggtagagacagctgtcatagaatacatgtaaacctaactgtttttgaaaaacattggtgtgacacttccataggtggtttaccaaatttatcagatgagtacaagcaaatattacatcttggaaaagatgatagtctcacatgtcatctgcacttcccgaagagttgtgttttgggtccaataaagtggtataaggactgtaacgagattaaaggggagcggttcactgttttggaaaccaggcttttggtgagcaatgtctcggcagaggacagagggaactacgcgtgtcaagccatactgacacactcagggaagcagtacgaggttttaaatggcatcactgtgagcattacagaaagagctggatatggaggaagtgtccctaaaatcatttatccaaaaaatcattcaattgaagtacagcttggtaccactctgattgtggactgcaatgtaacagacaccaaggataatacaaatctacgatgctggagagtcaataacactttggtggatgattactatgatgaatccaaacgaatcagagaaggggtggaaacccatgtctcttttcgggaacataatttgtacacagtaaacatcaccttcttggaagtgaaaatggaagattatggccttcctttcatgtgccacgctggagtgtccacagcatacattatattacagctcccagctccggattttcgagcttacttgataggagggcttatcgccttggtggctgtggctgtgtctgttgtgtacatatacaacatttttaagatcgacattgttctttggtatcgaagtgccttccattctacagagaccatagtagatgggaagctgtatgacgcctatgtcttataccccaagccccacaaggaaagccagaggcatgccgtggatgccctggtgttgaatatcctgcccgaggtgttggagagacaatgtggatataagttgtttatattcggcagagatgaattccctggacaagccgtggccaatgtcatcgatgaaaacgttaagctgtgcaggaggctgattgtcattgtggtccccgaatcgctgggctttggcctgttgaagaacctgtcagaagaacaaatcgcggtctacagtgccctgatccaggacgggatgaaggttattctcattgagctggagaaaatcgaggactacacagtcatgccagagtcaattcagtacatcaaacagaagcatggtgccatccggtggcatggggacttcacggagcagtcacagtgtatgaagaccaagttttggaagacagtgagataccacatgccgcccagaaggtgtcggccgtttcctccggtccagctgctgcagcacacaccttgctaccgcaccgcaggcccagaactaggctcaagaagaaagaagtgtactctcacgactggctaagacttgctggactgacacctatggctggaagatgacttgttttgctccatgtctcctcattcctacacctattttctgctgcaggatgaggctagggttagcattctagacacccagttgagctcaggcgtagagaagaggaggatgggataagaactggggccatccccatgtcatggtgggtgagagctggggccatccccgtggtcatggagggtgagagctgggggttatccccatggtcatggagggtgagggctggtcgggggaggcatccccaagtcatggtgggtgagagctcggagcatccccatgtcatggtgggtgagatctgggggtatccctgtgtcatggtgggtgagggcgggtggtcatccacatggtcatagtgggtgagagctgggggtatccctacatcatggtgggtgagagctgggagcatccccatgtcatggtgggcgagatctggggggtatccccacgtcatggtggatgagagctgggggaatcaccatgtcatggtgggtgagatcttgggggatcacctgtcatggtgggtgagagctggggggatcacctgtcatggtgggtgagagttgggattcatccccatgtcatggtgggctgagcccacatggaagcctgtgcttggacagcgtatgcccttttctctgtttttccacaatgaacaattaaactgtaaatgttaaaaatatcagtaatttgtgaaataaattttattctcatttgagcaacataaa

SEQ ID NO: 14694 - DNA, 557 bp, Homo sapiens
  source 1..557: mol_type = unassigned DNA
ctttctcctttcccgctggcccttgccagcccggtttggggatgtggtccttgctgctctgcgggttgtccatcgcccttccactgtctgtcacagcagatggatgcaaggacatttttatgaaaaatgagatactttcagcaagccagccttttgcttttaattgtacattccctcccataacatctggggaagtcagtgtaacatggtataaaaattctagcaaaatcccagtgtccaaaatcatacagtctagaattcaccaggacgagacttggattttgtttctccccatggaatggggggactcaggagtctaccaatgtgttataaagggtagagacagctgtcatagaatacatgtaaacctaactgtttttgaaaaacattggtgtgacacttccataggtggtttaccaaatttatcagatgagtacaagcaaatattacatcttggaaaagatgatagtctcacatgtcatctgcacttcccgaagagttgtgttttgggtccaataaagtggtataaggactgtaacgagattaaaggggagcgg

SEQ ID NO: 14695 - DNA, 1480 bp, Homo sapiens
  source 1..1480: mol_type = unassigned DNA
ggaagtggcatgacagggctcgtgtccctgtcatattttccactctccacgaggtcctgcgcgcttcaatcctgcagcccggtttggggatgtggtccttgctgctctgcgggttgtccatcgcccttccactgtctgtcacagcaggactgtaacgagattaaaggggagcggttcactgttttggaaaccaggcttttggtgagcaatgtctcggcagaggacagagggaactacgcgtgtcaagccatactgacacactcagggaagcagtacgaggttttaaatggcatcactgtgagcattaaaagagctggatatggaggaagtgtccctaaaatcatttatccaaaaaatcattcaattgaagtacagcttggtaccactctgattgtggactgcaatgtaacagacaccaaggataatacaaatctacgatgctggagagtcaataacactttggtggatgattactatgatgaatccaaacgaatcagagaaggggtggaaacccatgtctcttttcgggaacataatttgtacacagtaaacatcaccttcttggaagtgaaaatggaagattatggccttcctttcatgtgccacgctggagtgtccacagcatacattatattacagctcccagctccggattttcgagcttacttgataggagggcttatcgccttggtggctgtggctgtgtctgttgtgtacatatacaacatttttaagatcgacattgttctttggtatcgaagtgccttccattctacagagaccatagtagatgggaagctgtatgacgcctatgtcttataccccaagccccacaaggaaagccagaggcatgccgtggatgccctggtgttgaatatcctgcccgaggtgttggagagacaatgtggatataagttgtttatattcggcagagatgaattccctggacaagccgtggccaatgtcatcgatgaaaacgttaagctgtgcaggaggctgattgtcattgtggtccccgaatcgctgggctttggcctgttgaagaacctgtcagaagaacaaatcgcggtctacagtgccctgatccaggacgggatgaaggttattctcattgagctggagaaaatcgaggactacacagtcatgccagagtcaattcagtacatcaaacagaagcatggtgccatccggtggcatggggacttcacggagcagtcacagtgtatgaagaccaagttttggaagacagtgagataccacatgccgcccagaaggtgtcggccgtttcctccggtccagctgctgcagcacacaccttgctaccgcaccgcaggcccagaactaggctcaagaagaaagaagtgtactctcacgactggctaagacttgctggactgacacctatggctggaagatgacttgttttgctccatgtctcctcattcctacacctattttctgctgcaggatgaggctaggg

SEQ ID NO: 14696 - DNA, 1769 bp, Homo sapiens
  source 1..1769: mol_type = unassigned DNA
ctttctcctttcccgctggcccttgccagcccggtttggggatgtggtccttgctgctctgcgggttgtccatcgcccttccactgtctgtcacagcagatggatgcaaggacatttttatgaaaaatgagatactttcagcaagccagccttttgcttttaattgtacattccctcccataacatctggggaagtcagtgtaacatggtataaaaattctagcaaaatcccagtgtccaaaatcatacagtctagaattcaccaggacgagacttggattttgtttctccccatggaatggggggactcaggagtctaccaatgtgttataaagggtagagacagctgtcatagaatacatgtaaacctaactgtttttgaaaaacattggtgtgacacttccataggtggtttaccaaatttatcagatgagtacaagcaaatattacatcttggaaaagatgatagtctcacatgtcatctgcacttcccgaagagttgtgttttgggtccaataaagtggtataaggactgtaacgagattaaaggggagcggttcactgttttggaaaccaggcttttggtgagcaatgtctcggcagaggacagagggaactacgcgtgtcaagccatactgacacactcagggaagcagtacgaggttttaaatggcatcactgtgagcattacagaaagagctggatatggaggaagtgtccctaaaatcatttatccaaaaaatcattcaattgaagtacagcttggtaccactctgattgtggactgcaatgtaacagacaccaaggataatacaaatctacgatgctggagagtcaataacactttggtggatgattactatgatgaatccaaacgaatcagagaaggggtggaaacccatgtctcttttcgggaacataatttgtacacagtaaacatcaccttcttggaagtgaaaatggaagattatggccttcctttcatgtgccacgctggagtgtccacagcatacattatattacagctcccagctccggattttcgagcttacttgataggagggcttatcgccttggtggctgtggctgtgtctgttgtgtacatatacaacatttttaagatcgacattgttctttggtatcgaagtgccttccattctacagagaccatagtagatgggaagctgtatgacgcctatgtcttataccccaagccccacaaggaaagccagaggcatgccgtggatgccctggtgttgaatatcctgcccgaggtgttggagagacaatgtggatataagttgtttatattcggcagagatgaattccctggacaagccgtggccaatgtcatcgatgaaaacgttaagctgtgcaggaggctgattgtcattgtggtccccgaatcgctgggctttggcctgttgaagaacctgtcagaagaacaaatcgcggtctacagtgccctgatccaggacgggatgaaggttattctcattgagctggagaaaatcgaggactacacagtcatgccagagtcaattcagtacatcaaacagaagcatggtgccatccggtggcatggggacttcacggagcagtcacagtgtatgaagaccaagttttggaagacagtgagataccacatgccgcccagaaggtgtcggccgtttcctccggtccagctgctgcagcacacaccttgctaccgcaccgcaggcccagaactaggctcaagaagaaagaagtgtactctcacgactggctaa

SEQ ID NO: 14697 - DNA, 3695 bp, Homo sapiens
  source 1..3695: mol_type = unassigned DNA
gacgtcagccctgcggggcgctggcggagcgggcggcggagctgtcagtcccagcccaagggtagctggaggcgcgcaggccggctccgctccggccccggacgatgcggcgcgcccaggatgctgccgtgcctcgtagtgctgctggcggcgctcctcagcctccgtcttggctcagacgctcatgggacagagctgcccagccctccgtctgtgtggtttgaagcagaatttttccaccacatcctccactggacacccatcccaaatcagtctgaaagtacctgctatgaagtggcgctcctgaggtatggaatagagtcctggaactccatctccaactgtagccagaccctgtcctatgaccttaccgcagtgaccttggacctgtaccacagcaatggctaccgggccagagtgcgggctgtggacggcagccggcactccaactggaccgtcaccaacacccgcttctctgtggatgaagtgactctgacagttggcagtgtgaacctagagatccacaatggcttcatcctcgggaagattcagctacccaggcccaagatggcccccgcaaatgacacatatgaaagcatcttcagtcacttccgagagtatgagattgccattcgcaaggtgccgggaaacttcacgttcacacacaagaaagtaaaacatgaaaacttcagcctcctaacctctggagaagtgggagagttctgtgtccaggtgaaaccatctgtcgcttcccgaagtaacaaggggatgtggtctaaagaggagtgcatctccctcaccaggcagtatttcaccgtgaccaacgtcatcatcttctttgcctttgtcctgctgctctccggagccctcgcctactgcctggccctccagctgtatgtgcggcgccgaaagaagctacccagtgtcctgctcttcaagaagcccagccccttcatcttcatcagccagcgtccctccccagagacccaagacaccatccacccgcttgatgaggaggcctttttgaaggtgtccccagagctgaagaacttggacctgcacggcagcacagacagtggctttggcagcaccaagccatccctgcagactgaagagccccagttcctcctccctgaccctcacccccaggctgacagaacgctgggaaacagggagccccctgtgctgggggacagctgcagtagtggcagcagcaatagcacagacagcgggatctgcctgcaggagcccagcctgagccccagcacagggcccacctgggagcaacaggtggggagcaacagcaggggccaggatgacagtggcattgacttagttcaaaactctgagggccgggctggggacacacagggtggctcggccttgggccaccacagtcccccggagcctgaggtgcctggggaagaagacccagctgctgtggcattccagggttacctgaggcagaccagatgtgctgaagagaaggcaaccaagacaggctgcctggaggaagaatcgcccttgacagatggccttggccccaaattcgggagatgcctggttgatgaggcaggcttgcatccaccagccctggccaagggctatttgaaacaggatcctctagaaatgactctggcttcctcaggggccccaacgggacagtggaaccagcccactgaggaatggtcactcctggccttgagcagctgcagtgacctgggaatatctgactggagctttgcccatgaccttgcccctctaggctgtgtggcagccccaggtggtctcctgggcagctttaactcagacctggtcaccctgcccctcatctctagcctgcagtcaagtgagtgactcgggctgagaggctgcttttgattttagccatgcctgctcctctgcctggaccaggaggagggcccctggggcagaagttaggcacgaggcagtctgggcacttttctgcaagtccactggggctggccccagccaggccctgcagggctggtcagggtgtctggggcaggaggaggccaactcactgaactagtgcagggtatgtgggtggcactgacctgttctgttgactggggccctgcagactctggcagagctgagaagggcagggaccttctccctcctaggaactctttcctgtatcataaaggattatttgctcaggggaaccatggggctttctggagttgtggtgaggccaccaggctgaagtcagctcagacccagacctccctgcttaggccactcgagcatcagagcttccagcaggaggaagggctgtaggaatggaagcttcagggccttgctgctggggtcatttttaggggaaaaaggaggatatgatggtcacatggggaacctcccctcatcgggcctctggggcaggaagcttgtcactggaagatcttaaggtatatattttctggacactcaaacacatcataatggattcactgaggggagacaaagggagccgagaccctggatggggcttccagctcagaacccatccctctggtgggtacctctggcacccatctgcaaatatctccctctctccaacaaatggagtagcatccccctggggcacttgctgaggccaagccactcacatcctcactttgctgccccaccatcttgctgacaacttccagagaagccatggttttttgtattggtcataactcagccctttgggcggcctctgggcttgggcaccagctcatgccagccccagagggtcagggttggaggcctgtgcttgtgtttgctgctaatgtccagctacagacccagaggataagccactgggcactgggctggggtccctgccttgttggtgttcagctgtgtgattttggactagccacttgtcagagggcctcaatctcccatctgtgaaataaggactccacctttaggggaccctccatgtttgctgggtattagccaagctggtcctgggagaatgcagatactgtccgtggactaccaagctggcttgtttcttatgccagaggctaacagatccaatgggagtccatggtgtcatgccaagacagtatcagacacagccccagaagggggcattatgggccctgcctccccataggccatttggactctgccttcaaacaaaggcagttcagtccacaggcatggaagctgtgaggggacaggcctgtgcgtgccatccagagtcatctcagccctgcctttctctggagcattctgaaaacagatattctggcccagggaatccagccatgacccccacccctctgccaaagtactcttaggtgccagtctggtaactgaactccctctggaggcaggcttgagggaggattcctcagggttcccttgaaagctttatttatttattttgttcatttatttattggagaggcagcattgcacagtgaaagaattctggatatctcaggagccccgaaattctagctctgactttgctgtttccagtggtatgaccttggagaagtcacttatcctcttggagcctcagtttcctcatctgcagaataatgactgacttgtctaattcgtagggatgtgaggttctgctgaggaaatgggtatgaatgtgccttgaacacaaagctctgtcaataagtgatacatgttttttattccaataaattgtcaagaccaca

SEQ ID NO: 14698 - DNA, 2239 bp, Homo sapiens
  source 1..2239: mol_type = unassigned DNA
agcccaagggtagctggaggcgcgcaggccggctccgctccggccccggacgatgcggcgcgcccaggatgctgccgtgcctcgtagtgctgctggcggcgctcctcagcctccgtcttggctcagacgctcatggtaaggctccgggacgcggcccttccctgccctgccctctccgcgcccgctccattaaagttctccatccagtggagagccctggctggctggccctctggcagagcggtgcccgggtgctcccttactctggcaaacctggatctcaggctcacctgttgtggaagtggaagaggctgaaattgacaggaactgacggattgggaaggatagagaagtatgcgcaaggccaaacccccaacccgcaaacctcatcatccacccacttctagatgagccggacagagctgcccagccctccgtctgtgtggtttgaagcagaatttttccaccacatcctccactggacacccatcccaaatcagtctgaaagtacctgctatgaagtggcgctcctgaggtatggaatagagtcctggaactccatctccaactgtagccagaccctgtcctatgaccttaccgcagtgaccttggacctgtaccacagcaatggctaccgggccagagtgcgggctgtggacggcagccggcactccaactggaccgtcaccaacacccgcttctctgtggatgaagtgactctgacagttggcagtgtgaacctagagatccacaatggcttcatcctcgggaagattcagctacccaggcccaagatggcccccgcaaatgacacatatgaaagcatcttcagtcacttccgagagtatgagattgccattcgcaaggtgccgggaaacttcacgttcacacacaagaaagtaaaacatgaaaacttcagcctcctaacctctggagaagtgggagagttctgtgtccaggtgaaaccatctgtcgcttcccgaagtaacaaggggatgtggtctaaagaggagtgcatctccctcaccaggcagtatttcaccgtgaccaacgtcatcatcttctttgcctttgtcctgctgctctccggagccctcgcctactgcctggccctccagctgtatgtgcggcgccgaaagaagctacccagtgtcctgctcttcaagaagcccagccccttcatcttcatcagccagcgtccctccccagagacccaagacaccatccacccgcttgatgaggaggcctttttgaaggtgtccccagagctgaagaacttggacctgcacggcagcacagacagtggctttggcagcaccaagccatccctgcagactgaagagccccagttcctcctccctgaccctcacccccaggctgacagaacgctgggaaacagggagccccctgtgctgggggacagctgcagtagtggcagcagcaatagcacagacagcgggatctgcctgcaggagcccagcctgagccccagcacagggcccacctgggagcaacaggtggggagcaacagcaggggccaggatgacagtggcattgacttagttcaaaactctgagggccgggctggggacacacagggtggctcggccttgggccaccacagtcccccggagcctgaggtgcctggggaagaagacccagctgctgtggcattccagggttacctgaggcagaccagatgtgctgaagagaaggcaaccaagacaggctgcctggaggaagaatcgcccttgacagatggccttggccccaaattcgggagatgcctggttgatgaggcaggcttgcatccaccagccctggccaagggctatttgaaacaggatcctctagaaatgactctggcttcctcagggcccaacgggacagtggaaccagcccactgaggaatggtcactcctggccttgagcagctgcagtgacctgggaatatctgactggagctttgcccatgaccttgcccctctaggctgtgtggcagccccaggtggtctcctgggcagctttaactcagacctggtcaccctgcccctcatctctagcctgcagtcaagtgagtgactcgggctgagaggctgcttttgattttagccatgcctgctcctctgcctggaccaggaggagggcccctggggcagaagttaggcacgaggcagtctgggcacttttctgcaagtccactggggctggccccagccaggccctgcagggctggtca

SEQ ID NO: 14699 - DNA, 2275 bp, Homo sapiens
  source 1..2275: mol_type = unassigned DNA
agtcccagcccaagggtagctggaggcgcgcaggccggctccgctccggccccggacgatgcggcgcgcccaggatgctgccgtgcctcgtagtgctgctggcggcgctcctcagcctccgtcttggctcagacgctcatgtggagagccctggctggctggccctctggcagagcggtgcccgggtgctcccttactctggcaaacctggatctcaggctcacctgttgtggaagtggaagaggctgaaattgacaggaactgacggattgggaaggatagagaagtatgcgcaaggccaaacccccaacccgcaaacctcatcatccacccacttctagatgagccggacagagctgcccagccctccgtctgtgtggtttgaagcagaatttttccaccacatcctccactggacacccatcccaaatcagtctgaaagtacctgctatgaagtggcgctcctgaggtatggaatagagtcctggaactccatctccaactgtagccagaccctgtcctatgaccttaccgcagtgaccttggacctgtaccacagcaatggctaccgggccagagtgcgggctgtggacggcagccggcactccaactggaccgtcaccaacacccgcttctctgtggatgaagtgactctgacagttggcagtgtgaacctagagatccacaatggcttcatcctcgggaagattcagctacccaggcccaagatggcccccgcaaatgacacatatgaaagcatcttcagtcacttccgagagtatgagattgccattcgcaaggtgccgggaaacttcacgttcacacacaagaaagtaaaacatgaaaacttcagcctcctaacctctggagaagtgggagagttctgtgtccaggtgaaaccatctgtcgcttcccgaagtaacaaggggatgtggtctaaagaggagtgcatctccctcaccaggcagtatttcaccgtgaccaacgtcatcatcttctttgcctttgtcctgctgctctccggagccctcgcctactgcctggccctccagctgtatgtgcggcgccgaaagaagctacccagtgtcctgctcttcaagaagcccagccccttcatcttcatcagccagcgtccctccccagagacccaagacaccatccacccgcttgatgaggaggcctttttgaaggtgtccccagagctgaagaacttggacctgcacggcagcacagacagtggctttggcagcaccaagccatccctgcagactgaagagccccagttcctcctccctgaccctcacccccaggctgacagaacgctgggaaacagggagccccctgtgctgggggacagctgcagtagtggcagcagcaatagcacagacagcgggatctgcctgcaggagcccagcctgagccccagcacagggcccacctgggagcaacaggtggggagcaacagcaggggccaggatgacagtggcattgacttagttcaaaactctgagggccgggctggggacacacagggtggctcggccttgggccaccacagtcccccggagcctgaggtgcctggggaagaagacccagctgctgtggcattccagggttacctgaggcagaccagatgtgctgaagagaaggcaaccaagacaggctgcctggaggaagaatcgcccttgacagatggccttggccccaaattcgggagatgcctggttgatgaggcaggcttgcatccaccagccctggccaagggctatttgaaacaggatcctctagaaatgactctggcttcctcaggggccccaacgggacagtggaaccagcccactgaggaatggtcactcctggccttgagcagctgcagtgacctgggaatatctgactggagctttgcccatgaccttgcccctctaggctgtgtggcagccccaggtggtctcctgggcagctttaactcagacctggtcaccctgcccctcatctctagcctgcagtcaagtgagtgactcgggctgagaggctgcttttgattttagccatgcctgctcctctgcctggaccaggaggagggcccctggggcagaagttaggcacgaggcagtctgggcacttttctgcaagtccactggggctggccccagccaggccctgcagggctggtcagggtgtctggggcaggaggaggccaactcactgaactagtgcagggtatgtgggtggcactgacctgttctgttgactggggccctgcagactctggcag

SEQ ID NO: 14700 - DNA, 1779 bp, Homo sapiens
  source 1..1779: mol_type = unassigned DNA
agtcccagcccaagggtagctggaggcgcgcaggccggctccgctccggccccggacgatgcggcgcgcccaggatgctgccgtgcctcgtagtgctgctggcggcgctcctcagcctccgtcttggctcagacgctcatgggacagagctgcccagccctccgtctgtgtggtttgaagcagaatttttccaccacatcctccactggacacccatcccaaatcagtctgaaagtacctgctatgaagtggcgctcctgagtgactctgacagttggcagtgtgaacctagagatccacaatggcttcatcctcgggaagattcagctacccaggcccaagatggcccccgcaaatgacacatatgaaagcatcttcagtcacttccgagagtatgagattgccattcgcaaggtgccgggaaacttcacgttcacacacaagaaagtaaaacatgaaaacttcagcctcctaacctctggagaagtgggagagttctgtgtccaggtgaaaccatctgtcgcttcccgaagtaacaaggggatgtggtctaaagaggagtgcatctccctcaccaggcagtatttcaccgtgaccaacgtcatcatcttctttgcctttgtcctgctgctctccggagccctcgcctactgcctggccctccagctgtatgtgcggcgccgaaagaagctacccagtgtcctgctcttcaagaagcccagccccttcatcttcatcagccagcgtccctccccagagacccaagacaccatccacccgcttgatgaggaggcctttttgaaggtgtccccagagctgaagaacttggacctgcacggcagcacagacagtggctttggcagcaccaagccatccctgcagactgaagagccccagttcctcctccctgaccctcacccccaggctgacagaacgctgggaaacagggagccccctgtgctgggggacagctgcagtagtggcagcagcaatagcacagacagcgggatctgcctgcaggagcccagcctgagccccagcacagggcccacctgggagcaacaggtggggagcaacagcaggggccaggatgacagtggcattgacttagttcaaaactctgagggccgggctggggacacacagggtggctcggccttgggccaccacagtcccccggagcctgaggtgcctggggaagaagacccagctgctgtggcattccagggttacctgaggcagaccagatgtgctgaagagaaggcaaccaagacaggctgcctggaggaagaatcgcccttgacagatggccttggccccaaattcgggagatgcctggttgatgaggcaggcttgcatccaccagccctggccaagggctatttgaaacaggatcctctagaaatgactctggcttcctcaggggccccaacgggacagtggaaccagcccactgaggaatggtcactcctggccttgagcagctgcagtgacctgggaatatctgactggagctttgcccatgaccttgcccctctaggctgtgtggcagccccaggtggtctcctgggcagctttaactcagacctggtcaccctgcccctcatctctagcctgcagtcaagtgagtgactcgggctgagaggctgcttttgattttagccatgcctgctcctctgcctggaccaggaggagggcccctggggcagaagttaggcacgaggcagtctgggcacttttctgcaagtccactggggctggccccagccaggccctgca

SEQ ID NO: 14701 - DNA, 1723 bp, Homo sapiens
  source 1..1723: mol_type = unassigned DNA
gggggctgtagctggtgagaggaagtcctagaggctatggacactctgctgctgggatcaccgagatgagcagcagctgctcagggctgagcagggtcctggtggccgtggctacagccctggtgtctgcctcctccccctgcccccaggcctggggccccccaggggtccagtatgggcagccaggcaggtccgtgaagctgtgttgtcctggagtgactgccggggacccagtgtcctggtttcgggatggggagccaaagctgctccagggacctgactctgggctagggcatgaactggtcctggcccaggcagacagcactgatgagggcacctacatctgccagaccctggatggtgcacttgggggcacagtgaccctgcagctgggctaccctccagcccgccctgttgtctcctgccaagcagccgactatgagaacttctcttgcacttggagtcccagccagatcagcggtttacccacccgctacctcacctcctacaggaagaagacagtcctaggagctgatagccagaggaggagtccatccacagggccctggccatgcccacaggatcccctaggggctgcccgctgtgttgtccacggggctgagttctggagccagtaccggattaatgtgactgaggtgaacccactgggtgccagcacacgcctgctggatgtgagcttgcagagcatcttgcgccctgacccaccccagggcctgcgggtagagtcagtaccaggttacccccgacgcctgcgagccagctggacataccctgcctcctggccgtgccagccccacttcctgctcaagttccgtttgcagtaccgtccggcgcagcatccagcctggtccacggtggagccagctggactggaggaggtgatcacagatgctgtggctgggctgccccatgctgtacgagtcagtgcccgggactttctagatgctggcacctggagcacctggagcccggaggcctggggaactccgagcactgggaccataccaaaggagataccagcatggggccagctacacacgcagccagaggtggagcctcaggtggacagccctgctcctccaaggccctccctccaaccacaccctcggctacttgatcacagggactctgtggagcaggtagctgtgctggcgtctttgggaatcctttctttcctgggactggtggctggggccctggcactggggctctggctgaggctgagacggggtgggaaggatggatccccaaagcctgggttcttggcctcagtgattccagtggacaggcgtccaggagctccaaacctgtagaggacccaggagggcttcggcagattccacctataattctgtcttgctggtgtggatagaaaccaggcaggacagtagatccctatggttggatctcagctggaagttctgtttggagcccatttctgtgagaccctgtatttcaaatttgcagctgaaaggtgcttgtacctctgatttcaccccagagttggagttctgctcaaggaacgtgtgtaatgtgtacatctgtgtccatgtgtgaccatgtgtctgtgaggcagggaacatgtattctctgcatgcatgtatgtaggtgcctggggagtgtgtgtgggtccttggctcttggcctttccccttgcaggggttgtgcaggtgtgaataaagagaataaggaagttcttgga

SEQ ID NO: 14702 - DNA, 1453 bp, Homo sapiens
  source 1..1453: mol_type = unassigned DNA
gggggctgtagctggtgagaggaagtcctagaggctatggacactctgctgctgggatcaccgagatgagcagcagctgctcagggctgagcagggtcctggtggccgtggctacagccctggtgtctgcctcctccccctgcccccaggcctggggccccccaggggtccagtatgggcagccaggcaggtccgtgaagctgtgttgtcctggagtgactgccggggacccagtgtcctggtttcgggatggggagccaaagctgctccagggacctgactctgggctagggcatgaactggtcctggcccaggcagacagcactgatgagggcacctacatctgccagaccctggatggtgcacttgggggcacagtgaccctgcagctgggctaccctccagcccgccctgttgtctcctgccaagcagccgactatgagaacttctcttgcacttggagtcccagccagatcagcggtttacccacccgctacctcacctcctacaggaagaagacagtcctaggagctgatagccagaggaggagtccatccacagggccctggccatgcccacaggatcccctaggggctgcccgctgtgttgtccacggggctgagttctggagccagtaccggattaatgtgactgaggtgaacccactgggtgccagcacacgcctgctggatgtgagcttgcagagcatcttgcgccctgacccaccccagggcctgcgggtagagtcagtaccaggttacccccgacgcctgcgagccagctggacataccctgcctcctggccgtgccagccccacttcctgctcaagttccgtttgcagtaccgtccggcgcagcatccagcctggtccacggtggagccagctggactggaggaggtgatcacagatgctgtggctgggctgccccatgctgtacgagtcagtgcccgggactttctagatgctggcacctggagcacctggagcccggaggcctggggaactccgagcactgggaccataccaaaggagataccagcatggggccagctacacacgcagccagaggtggagcctcaggtggacagccctgctcctccaaggccctccctccaaccacaccctcggctacttgatcacagggactctgtggagcaggtagctgtgctggcgtctttgggaatcctttctttcctgggactggtggctggggccctggcactggggctctggtaagtgactgccattggtccctcagcctctgatcctcacacatgctctgatgcccatagaccacattcatctccacccttcatgactgcccgctgaacctgtctgattctggaactacctccccatacctccatcccccatgccccacttgattttaactgattcctctcctgaccctttactaataaaccctttggcggagactgagataacccaca

SEQ ID NO: 14703 - DNA, 1700 bp, Homo sapiens
  source 1..1700: mol_type = unassigned DNA
gagggcgagggcagagggcgctggcggcagcggccgcggaagatgagcagcagctgctcagggctgagcagggtcctggtggccgtggctacagccctggtgtctgcctcctccccctgcccccaggcctggggccccccaggggtccagtatgggcagccaggcaggtccgtgaagctgtgttgtcctggagtgactgccggggacccagtgtcctggtttcgggatggggagccaaagctgctccagggacctgactctgggctagggcatgaactggtcctggcccaggcagacagcactgatgagggcacctacatctgccagaccctggatggtgcacttgggggcacagtgaccctgcagctgggctaccctccagcccgccctgttgtctcctgccaagcagccgactatgagaacttctcttgcacttggagtcccagccagatcagcggtttacccacccgctacctcacctcctacaggaagaagacagtcctaggagctgatagccagaggaggagtccatccacagggccctggccatgcccacaggatcccctaggggctgcccgctgtgttgtccacggggctgagttctggagccagtaccggattaatgtgactgaggtgaacccactgggtgccagcacacgcctgctggatgtgagcttgcagagcatcttgcgccctgacccaccccagggcctgcgggtagagtcagtaccaggttacccccgacgcctgcgagccagctggacataccctgcctcctggccgtgccagccccacttcctgctcaagttccgtttgcagtaccgtccggcgcagcatccagcctggtccacggtggagccagctggactggaggaggtgatcacagatgctgtggctgggctgccccatgctgtacgagtcagtgcccgggactttctagatgctggcacctggagcacctggagcccggaggcctggggaactccgagcactgggaccataccaaaggagataccagcatggggccagctacacacgcagccagaggtggagcctcaggtggacagccctgctcctccaaggccctccctccaaccacaccctcggctacttgatcacagggactctgtggagcaggtagctgtgctggcgtctttgggaatcctttctttcctgggactggtggctggggccctggcactggggctctggctgaggctgagacggggtgggaaggatggatccccaaagcctgggttcttggcctcagtgattccagtggacaggcgtccaggagctccaaacctgtagaggacccaggagggcttcggcagattccacctataattctgtcttgctggtgtggatagaaaccaggcaggacagtagatccctatggttggatctcagctggaagttctgtttggagcccatttctgtgagaccctgtatttcaaatttgcagctgaaaggtgcttgtacctctgatttcaccccagagttggagttctgctcaaggaacgtgtgtaatgtgtacatctgtgtccatgtgtgaccatgtgtctgtgaggcagggaacatgtattctctgcatgcatgtatgtaggtgcctggggagtgtgtgtgggtccttggctcttggcctttccccttgcaggggttgtgcaggtgtgaataaagagaataaggaagttcttgga

SEQ ID NO: 14704 - DNA, 3008 bp, Homo sapiens
  source 1..3008: mol_type = unassigned DNA
atctaccccaaatttctgaacaaaattaatattcagtattatatctagcctatagattctcttactcttggtgtaatgacagcattcccagtttaggaaactgttttaaaatcttgtgtcttggttgtggctgaggctttgggaaggccagagccccctttgccaccacccctagggtgtcagctccaagcctgggcctgagggtttgatggggagcgggtgagctggatcctgatcccagtggtcagtggccagatcctgggctgctggccagaaccctggctttgtgagtggctgcagcttggctctgctccagcccacaggggctaaaggggcgggtagggagtgtgtagggagcgtgtacgtggctttgtgtccttggctcctccagactctcacatgtgcgggcaccatatacttctgctgcccttgtgccccaatcattgcacaaacagaaacagctctgacagagaagggactgctagagttaggaaccctagggcctggaaggaaggtatggctctcagagtgacctggggtctattcagtcccctctggacctgtttccctggcaacgctgtgggaacaacagtctatgcaacacaggagacctgatgccactggtgtcctccaaattttaaggcgaaggcaggcattgtgaatgatgcagggatggccagaatggtttttgccttcgttctttccccaggggaaccaagcctgtgggtggggaaatcacactaaggctggacagtgactgaatctggcccaggagaaacttggctgcctgccttccagaccagggtttttcttccctgagatcctggaggggaagtacctggaacttgggagtgttgccctggtctggaagatctgatagacatagtatgcacacatttccctcgagcttcccatgactggggagtagatgagaaccctgagtgggtggctggtttcttgaggcatacatatacccgacacaccttacacctctgatttggctgcattttggaatcatctgggaagttttaaacaatactggtgcctaggtccaacctccagagactctgatttaattggtatggggtggggttttgcagttttcaaaccacaatatccagcaaagtttgagaaccactgccctacacagccctccttcttctttatcttatctggagtcaggggcaccttcagcttctccaatcacctggccagtggctcttgtttccagtcctgctgttccagggtggataggccttcaggcggagacccaggaatccagctccagactctgtcccaagcagcctcttcagtccgggacgggacaggaagtgtccggcggaggtgggggtggagatgagcagcagctgctcagggctgagcagggtcctggtggccgtggctacagccctggtgtctgcctcctccccctgcccccaggcctggggccccccaggggtccagtatgggcagccaggcaggtccgtgaagctgtgttgtcctggagtgactgccggggacccagtgtcctggtttcgggatggggagccaaagctgctccagggacctgactctgggctagggcatgaactggtcctggcccaggcagacagcactgatgagggcacctacatctgccagaccctggatggtgcacttgggggcacagtgaccctgcagctgggctaccctccagcccgccctgttgtctcctgccaagcagccgactatgagaacttctcttgcacttggagtcccagccagatcagcggtttacccacccgctacctcacctcctacaggaagaagacagtcctaggagctgatagccagaggaggagtccatccacagggccctggccatgcccacaggatcccctaggggctgcccgctgtgttgtccacggggctgagttctggagccagtaccggattaatgtgactgaggtgaacccactgggtgccagcacacgcctgctggatgtgagcttgcagagcatcttgcgccctgacccaccccagggcctgcgggtagagtcagtaccaggttacccccgacgcctgcgagccagctggacataccctgcctcctggccgtgccagccccacttcctgctcaagttccgtttgcagtaccgtccggcgcagcatccagcctggtccacggtggagccagctggactggaggaggtgatcacagatgctgtggctgggctgccccatgctgtacgagtcagtgcccgggactttctagatgctggcacctggagcacctggagcccggaggcctggggaactccgagcactgggaccataccaaaggagataccagcatggggccagctacacacgcagccagaggtggagcctcaggtggacagccctgctcctccaaggccctccctccaaccacaccctcggctacttgatcacagggactctgtggagcaggtagctgtgctggcgtctttgggaatcctttctttcctgggactggtggctggggccctggcactggggctctggctgaggctgagacggggtgggaaggatggatccccaaagcctgggttcttggcctcagtgattccagtggacaggcgtccaggagctccaaacctgtagaggacccaggagggcttcggcagattccacctataattctgtcttgctggtgtggatagaaaccaggcaggacagtagatccctatggttggatctcagctggaagttctgtttggagcccatttctgtgagaccctgtatttcaaatttgcagctgaaaggtgcttgtacctctgatttcaccccagagttggagttctgctcaaggaacgtgtgtaatgtgtacatctgtgtccatgtgtgaccatgtgtctgtgaggcagggaacatgtattctctgcatgcatgtatgtaggtgcctggggagtgtgtgtgggtccttggctcttggcctttccccttgcaggggttgtgcaggtgtgaataaagagaataaggaagtt

SEQ ID NO: 14705 - DNA, 944 bp, Homo sapiens
  source 1..944: mol_type = unassigned DNA
gtgatttctaacagccttaccccacttggtgcatcaatttttctcctaggaagcctcagttttggagaggaagagccaggctttagcctcccatctcaggggtcggggatttttgactctacctctccccacagatgagcagcagctgctcagggctgagcagggtcctggtggccgtggctacagccctggtgtctgcctcctccccctgcccccaggcctggggccccccaggggtccagtatgggcagccaggcaggtccgtgaagctgtgttgtcctggagtgactgccggggacccagtgtcctggtttcgggatggggagccaaagctgctccagggacctgactctgggctagggcatgaactggtcctggcccaggcagacagcactgatgagggcacctacatctgccagaccctggatggtgcacttgggggcacagtgaccctgcagctgggctaccctccagcccgccctgttgtctcctgccaagcagccgactatgagaacttctcttgcacttggagtcccagccagatcagcggtttacccacccgctacctcacctcctacaggaagaagacagtcctaggagctgatagccagaggaggagtccatccacagggccctggccatgcccacaggatcccctaggggctgcccgctgtgttgtccacggggctgagttctggagccagtaccggattaatgtgactgaggtgaacccactgggtgccagcacacgcctgctggatgtgagcttgcagagcatcttgcgccctgacccaccccagggcctgcgggtagagtcagtaccaggttacccccgacgcctgcgagccagctggacataccctgcctcctggccgtgccagccccacttcctgctcaagttccgtttgcagtaccgtccggcgcagcatccagcctggtccacg

SEQ ID NO: 14706 - DNA, 537 bp, Homo sapiens
  source 1..537: mol_type = unassigned DNA
aaagcactgggtatacagtgggaaaggggacctcagatgagcagcagctgctcagggctgagcagggtcctggtggccgtggctacagccctggtgtctgcctcctccccctgcccccaggcctggggccccccaggggtccagtatgggcagccaggcaggtccgtgaagctgtgttgtcctggagtgactgccggggacccagtgtcctggtttcgggatggggagccaaagctgctccagggacctgactctgggctagggcatgaactggtcctggcccaggcagacagcactgatgagggcacctacatctgccagaccctggatggtgcacttgggggcacagtgaccctgcagctgggctaccctccagcccgccctgttgtctcctgccaagcagccgactatgagaacttctcttgcacttggagtcccagccagatcagcggtttacccacccgctacctcacctcctacaggaagaagacagtcctaggagctgatagccagaggaggagtccatccacagggccc

SEQ ID NO: 14707 - DNA, 575 bp, Homo sapiens
  source 1..575: mol_type = unassigned DNA
agagggggcggggcagggaaggggaaggaggggatggctctggggtcccagaactgagtggagtaggagacgggggctgtagctggtgagaggaagtcctagaggctatggacactctgctgctgggatcaccgaggtagggtggggctaagcaggatgagcagcagctgctcagggctgagcagggtcctggtggccgtggctacagccctggtgtctgcctcctccccctgcccccaggcctggggccccccaggggtccagtatgggcagccaggcaggtccgtgaagctgtgttgtcctggagtgactgccggggacccagtgtcctggtttcgggatggggagccaaagctgctccagggacctgactctgggctagggcatgaactggtcctggcccaggcagacagcactgatgagggcacctacatctgccagaccctggatggtgcacttgggggcacagtgaccctgcagctgggctaccctccagcccgccctgttgtctcctgccaagcagccgactatgagaacttctcttgcacttggagtcccagccagatcagcggttt

SEQ ID NO: 14708 - DNA, 2906 bp, Homo sapiens
  source 1..2906: mol_type = unassigned DNA
gactgggtcaggcgcctccttcacttgctgtgagtcccttatcacaactgatcactccgtggggtcaccgctgctctggcgtctacctcccccaacaggttggggtttctaggagggcagctccagaggttgcagaacactccgctgcctctccagagccaggcacacagcaggcgctccataaatgttcgttggtcttttctccttgctcagcttcaatgtgttccggagtggggacggggtggctgaacctcgcaggtggcagagaggctcccctggggctgtggggctctacgtggatccgatggagccgctggtgacctgggtggtccccctcctcttcctcttcctgctgtccaggcagggcgctgcctgcagaaccagtgagtgctgttttcaggacccgccatatccggatgcagactcaggctcggcctcgggccctagggacctgagatgctatcggatatccagtgatcgttacgagtgctcctggcagtatgagggtcccacagctggggtcagccacttcctgcggtgttgccttagctccgggcgctgctgctacttcgccgccggctcagccaccaggctgcagttctccgaccaggctggggtgtctgtgctgtacactgtcacactctgggtggaatcctgggccaggaaccagacagagaagtctcctgaggtgaccctgcagctctacaactcagttaaatatgagcctcctctgggagacatcaaggtgtccaagttggccgggcagctgcgtatggagtgggagaccccggataaccaggttggtgctgaggtgcagttccggcaccggacacccagcagcccatggaagttgggcgactgcggacctcaggatgatgatactgagtcctgcctctgccccctggagatgaatgtggcccaggaattccagctccgacgacggcagctggggagccaaggaagttcctggagcaagtggagcagccccgtgtgcgttccccctgaaaaccccccacagcctcaggtgagattctcggtggagcagctgggccaggatgggaggaggcggctgaccctgaaagagcagccaacccagctggagcttccagaaggctgtcaagggctggcgcctggcacggaggtcacttaccgactacagctccacatgctgtcctgcccgtgtaaggccaaggccaccaggaccctgcacctggggaagatgccctatctctcgggtgctgcctacaacgtggctgtcatctcctcgaaccaatttggtcctggcctgaaccagacgtggcacattcctgccgacacccacacagaaccagtggctctgaatatcagcgtcggaaccaacgggaccaccatgtattggccagcccgggctcagagcatgacgtattgcattgaatggcagcctgtgggccaggacgggggccttgccacctgcagcctgactgcgccgcaagacccggatccggctggaatggcaacctacagctggagtcgagagtctggggcaatggggcaggaaaagtgttactacattaccatctttgcctctgcgcaccccgagaagctcaccttgtggtctacggtcctgtccacctaccactttgggggcaatgcctcagcagctgggacaccgcaccacgtctcggtgaagaatcatagcttggactctgtgtctgtggactgggcaccatccctgctgagcacctgtcccggcgtcctaaaggagtatgttgtccgctgccgagatgaagacagcaaacaggtgtcagagcatcccgtgcagcccacagagacccaagttaccctcagtggcctgcgggctggtgtagcctacacggtgcaggtgcgagcagacacagcgtggctgaggggtgtctggagccagccccagcgcttcagcatcgaagtgcaggtttctgattggctcatcttcttcgcctccctggggagcttcctgagcatccttctcgtgggcgtccttggctaccttggcctgaacagggccgcacggcacctgtgcccgccgctgcccacaccctgtgccagctccgccattgagttccctggagggaaggagacttggcagtggatcaacccagtggacttccaggaagaggcatccctgcaggaggccctggtggtagagatgtcctgggacaaaggcgagaggactgagcctctcgagaagacagagctacctgagggtgcccctgagctggccctggatacagagttgtccttggaggatggagacaggtgcaaggccaagatgtgatcgttgaggctcagagagggtgagtgactcgcccgaggctacgtagcacacacaggagtcacatttggacccaaataacccagagctcctccaggctccagtgcacctgcctcctctctgccccgtgcctgttgccacccatcctgcgggggaaccctagatgctgccatgaaatggaagctgctgcaccctgctgggcctggcatccgtggggcaggagcagaccctgccatttacctgttctggcgtagaatggactgggaatgggggcaaggggggctcagatggatccctggaccctgggctgggcatccacccccaggagcactggatggggagtctggactcaagggctccctgcagcattgcggggtcttgtagcttggaggatccaggcatatagggaagggggctgtaaactttgtgggaaaaatgacggtcctcccatcccaccccccaccccaccctcacccccctataaaatgggggtggtgataatgaccttacacagctgttcaaaatcatcgtaaatgagcctcctcttgggtatttttttcctgtttgaagcttgaatgtcctgctcaaaatctcaaaacacgagccttggaattca

SEQ ID NO: 14709 - DNA, 1856 bp, Homo sapiens
  source 1..1856: mol_type = unassigned DNA
ggtggctgaacctcgcaggtggcagagaggctcccctggggctgtggggctctacgtggatccgatggagccgctggtgacctgggtggtccccctcctcttcctcttcctgctgtccaggcagggcgctgcctgcagaaccagtgagtgctgttttcaggacccgccatatccggatgcagactcaggctcggcctcgggccctagggacctgagatgctatcggatatccagtgatcgttacgagtgctcctggcagtatgagggtcccacagctggggtcagccacttcctgcggtgttgccttagctccgggcgctgctgctacttcgccgccggctcagccaccaggctgcagttctccgaccaggctggggtgtctgtgctgtacactgtcacactctgggtggaatcctgggccaggaaccagacagagaagtctcctgaggtgaccctgcagctctacaactcagttaaatatgagcctcctctgggagacatcaaggtgtccaagttggccgggcagctgcgtatggagtgggagaccccggataaccaggttggtgctgaggtgcagttccggcaccggacacccagcagcccatggaagttgggcgactgcggacctcaggatgatgatactgagtcctgcctctgccccctggagatgaatgtggcccaggaattccagctccgacgacggcagctggggagccaaggaagttcctggagcaagtggagcagccccgtgtgcgttccccctgaaaaccccccacagcctcaggtgagattctcggtggagcagctgggccaggatgggaggaggcggctgaccctgaaagagcagccaacccagctggagcttccagaaggctgtcaagggctggcgcctggcacggaggtcacttaccgactacagctccacatgctgtcctgcccgtgtaaggccaaggccaccaggaccctgcacctggggaagatgccctatctctcgggtgctgcctacaacgtggctgtcatctcctcgaaccaatttggtcctggcctgaaccagacgtggcacattcctgccgacacccacacagatggcatgatctcagctcactgcaacctccgccttccagattcaagagattctcctgcttcagcctcccgagtagctgggattacaggcatctgccaccatacccggctaattttgtatttttagtagagacggggtttcaccacgttggccaggctggtctcgaactcctgacctcaagtgatccacctgccttggcctcccaaagtgttgggattataggcgtgagccaccatgcccagcctaatttttgtatttttagtagagatggagtttcaccatgttgcccaggctggtctcaaactcctgccctcaggtgatccacccacctcagcctctcaaagtgctgggattacaggtgtgagccactgtggccgacctactatttttattatttttgagctaggttctcagtctgttggcagactggagtgcaatcatggctcactgcagccttgaactcccagactcaagtgatccttccacctcagcctctggagtagctgggactacagacatgcaccaccacacctggttaattttttatttttattttttgtagagacaggtgtctctctacgttgcccaggctggtctcgaactcctgggctcaagtgatccacccatctccacctcccaaagtgctaggattacaggcgtgagccaccgtacccagcctggtcccatatcatagtgaaatggtgcctgtaaagctctcagcattggcttggcacatgcagttggtactcaataaacggctgttgctatcccc

SEQ ID NO: 14710 - DNA, 2100 bp, Homo sapiens
  source 1..2100: mol_type = unassigned DNA
ggtggctgaacctcgcaggtggcagagaggctcccctggggctgtggggctctacgtggatccgatggagccgctggtgacctgggtggtccccctcctcttcctcttcctgctgtccaggcagggcgctgcctgcagaaccagtgagtgctgttttcaggacccgccatatccggatgcagactcaggctcggcctcgggccctagggacctgagatgctatcggatatccagtgatcgttacgagtgctcctggcagtatgagggtcccacagctggggtcagccacttcctgcggtgttgccttagctccgggcgctgctgctacttcgccgccggctcagccaccaggctgcagttctccgaccaggctggggtgtctgtgctgtacactgtcacactctgggtggaatcctgggccaggaaccagacagagaagtctcctgaggtgaccctgcagctctacaactcagttaaatatgagcctcctctgggagacatcaaggtgtccaagttggccgggcagctgcgtatggagtgggagaccccggataaccaggttggtgctgaggtgcagttccggcaccggacacccagcagcccatggaagttgggcgactgcggacctcaggatgatgatactgagtcctgcctctgccccctggagatgaatgtggcccaggaattccagctccgacgacggcagctggggagccaaggaagttcctggagcaagtggagcagccccgtgtgcgttccccctgaaaaccccccacagcctcaggtgagattctcggtggagcagctgggccaggatgggaggaggcggctgaccctgaaagagcagccaacccagctggagcttccagaaggctgtcaagggctggcgcctggcacggaggtcacttaccgactacagctccacatgctgtcctgcccgtgtaaggccaaggccaccaggaccctgcacctggggaagatgccctatctctcgggtgctgcctacaacgtggctgtcatctcctcgaaccaatttggtcctggcctgaaccagacgtggcacattcctgccgacacccacacagaaccagtggctctgaatatcagcgtcggaaccaacgggaccaccatgtattggccagcccgggctcagagcatgacgtattgcattgaatggcagcctgtgggccaggacgggggccttgccacctgcagcctgactgcgccgcaagacccggatccggctggaatggcaacctacagctggagtcgagagtctggggcaatggggcaggaaaagtgttactacattaccatctttgcctctgcgcaccccgagaagctcaccttgtggtctacggtcctgtccacctaccactttgggggcaatgcctcagcagctgggacaccgcaccacgtctcggtgaagaatcatagcttggactctgtgtctgtggactgggcaccatccctgctgagcacctgtcccggcgtcctaaaggagtatgttgtccgctgccgagatgaagacagcaaacaggtgtcagagcatcccgtgcagcccacagagacccaagttaccctcagtggcctgcgggctggtgtagcctacacggtgcaggtgcgagcagacacagcgtggctgaggggtgtctggagccagccccagcgcttcagcatcgaagtgcaggtttctgattggctcatcttcttcgcctccctggggagcttcctgagcatccttctcgtgggcgtccttggctaccttggcctgaacagggccgcacggcacctgtgcccgccgctgcccacaccctgtgccagctccgccattgagttccctggagggaaggagacttggcagtggatcaacccagtggacttccaggaagaggcatccctgcaggaggccctggtggtagagatgtcctgggacaaaggcgagaggactgagcctctcgagaagacagagctacctgagggtgcccctgagctggccctggatacagagttgtccttggaggatggagacaggtgcaaggccaagatgtgatcgttgaggctcagagagggtgagtgactcgcccgaggctacgtagc

SEQ ID NO: 14711 - DNA, 4040 bp, Homo sapiens
  source 1..4040: mol_type = unassigned DNA
tgcagagcacagagaaaggacatctgcgaggaaagttccctgatggctgtcaacaaagtgccacgtctctatggctgtgaacgctgagcacacgattttatcgcgcctatcatatcttggtgcataaacgcacctcacctcggtcaacccttgctccgtcttatgagacaggctttattatccgcattttatatgaggggaaactgacggtggagagagaattatcttgctcaaggcgacacagcagagcccacaggtggcagaatcccacccgagcccgcttcgacccgcggggtggaaaccacgggcgcccgcccggctgcgcttccagagctgaactgagaagcgagtcctctccgccctgcggccaccgcccagccccgacccccgccccggcccgatcctcactcgccgccagctccccgcgcccaccccggagttggtggcgcagaggcgggaggcggaggcgggagggcgggcgctggcaccgggaacgcccgagcgccggcagagagcgcggagagcgcgacacgtgcggcccagagcaccggggccacccggtccccgcaggcccgggaccgcgcccgctggcaggcgacacgtggaagaatacggagttctataccagagttgattgttgatggcacatacttttagaggatgctcattggcatttatgtttataatcacgtggctgttgattaaagcaaaaatagatgcgtgcaagagaggcgatgtgactgtgaagccttcccatgtaattttacttggatccactgtcaatattacatgctctttgaagcccagacaaggctgctttcactattccagacgtaacaagttaatcctgtacaagtttgacagaagaatcaattttcaccatggccactccctcaattctcaagtcacaggtcttccccttggtacaaccttgtttgtctgcaaactggcctgtatcaatagtgatgaaattcaaatatgtggagcagagatcttcgttggtgttgctccagaacagcctcaaaatttatcctgcatacagaagggagaacaggggactgtggcctgcacctgggaaagaggacgagacacccacttatacactgagtatactctacagctaagtggaccaaaaaatttaacctggcagaagcaatgtaaagacatttattgtgactatttggactttggaatcaacctcacccctgaatcacctgaatccaatttcacagccaaggttactgctgtcaatagtcttggaagctcctcttcacttccatccacattcacattcttggacatagtgaggcctcttcctccgtgggacattagaatcaaatttcaaaaggcttctgtgagcagatgtaccctttattggagagatgagggactggtactgcttaatcgactcagatatcggcccagtaacagcaggctctggaatatggttaatgttacaaaggccaaaggaagacatgatttgctggatctgaaaccatttacagaatatgaatttcagatttcctctaagctacatctttataagggaagttggagtgattggagtgaatcattgagagcacaaacaccagaagaagagcctactgggatgttagatgtctggtacatgaaacggcacattgactacagtagacaacagatttctcttttctggaagaatctgagtgtctcagaggcaagaggaaaaattctccactatcaggtgaccttgcaggagctgacaggagggaaagccatgacacagaacatcacaggacacacctcctggaccacagtcattcctagaaccggaaattgggctgtggctgtgtctgcagcaaattcaaaaggcagttctctgcccactcgtattaacataatgaacctgtgtgaggcagggttgctggctcctcgccaggtctctgcaaactcagagggcatggacaacattctggtgacttggcagcctcccaggaaagatccctctgctgttcaggagtacgtggtggaatggagagagctccatccagggggtgacacacaggtccctctaaactggctacggagtcgaccctacaatgtgtctgctctgatttcagagaacataaaatcctacatctgttatgaaatccgtgtgtatgcactctcaggggatcaaggaggatgcagctccatcctgggtaactctaagcacaaagcaccactgagtggcccccacattaatgccatcacagaggaaaaggggagcattttaatttcatggaacagcattccagtccaggagcaaatgggctgcctcctccattataggatatactggaaggaacgggactccaactcccagcctcagctctgtgaaattccctacagagtctcccaaaattcacatccaataaacagcctgcagccccgagtgacatatgtcctgtggatgacagctctgacagctgctggtgaaagttcccacggaaatgagagggaattttgtctgcaaggtaaagccaattggatggcgtttgtggcaccaagcatttgcattgctatcatcatggtgggcattttctcaacgcattacttccagcaaaaggtgtttgttctcctagcagccctcagacctcagtggtgtagcagagaaattccagatccagcaaatagcacttgcgctaagaaatatcccattgcagaggagaagacacagctgcccttggacaggctcctgatagactggcccacgcctgaagatcctgaaccgctggtcatcagtgaagtccttcatcaagtgaccccagttttcagacatcccccctgctccaactggccacaaagggaaaaaggaatccaaggtcatcaggcctctgagaaagacatgatgcacagtgcctcaagcccaccacctccaagagctctccaagctgagagcagacaactggtggatctgtacaaggtgctggagagcaggggctccgacccaaagcccgaaaacccagcctgtccctggacggtgctcccagcaggtgaccttcccacccatgatggctacttaccctccaacatagatgacctcccctcacatgaggcacctctcgctgactctctggaagaactggagcctcagcacatctccctttctgttttcccctcaagttctcttcacccactcaccttctcctgtggtgataagctgactctggatcagttaaagatgaggtgtgactccctcatgctctgagtggtgaggcttcaagccttaaagtcagtgtgccctcaaccagcacagcctgccccaattcccccagcccctgctccagcagctgtcatctctgggtgccaccatcggtctggctgcagctagaggacaggcaagccagctctgggggagtcttaggaactgggagttggtcttcactcagatgcctcatcttgcctttcccagggccttaaaattacatccttcactgtgtggacctagagactccaacttgaattcctagtaactttcttggtatgctggccagaaagggaaatgaggaggagagtagaaaccacagctcttagtagtaatggcatacagtctagaggaccattcatgcaatgactatttctaaagcacctgctacacagcaggctgtacacagcagatcagtactgttcaacagaacttcctgagatgatggaaatgttctacctctgcactcactgtccagtacattagacactaggcacattggctgttaatcacttggaatgtgtttagcttgactgaggaattaaattttgattgtaaatttaaatcgccacacatggctagtggctactgtattggagtgcacagctctagatggctcctagattattgagagccttcaaaacaaatcaacctagttctatagatgaagacataaaagacactggtaaacaccaaggtaaaagggcccccaaggtggtcatgactggtctcatttgcagaagtctaagaatgtacctttttctggccgggcgtggtagctcatgcctgtaatcccagcactttgggaggctga

SEQ ID NO: 14712 - DNA, 3940 bp, Homo sapiens
  source 1..3940: mol_type = unassigned DNA
tgcagagcacagagaaaggacatctgcgaggaaagttccctgatggctgtcaacaaagtgccacgtctctatggctgtgaacgctgagcacacgattttatcgcgcctatcatatcttggtgcataaacgcacctcacctcggtcaacccttgctccgtcttatgagacaggctttattatccgcattttatatgaggggaaactgacggtggagagagaattatcttgctcaaggcgacacagcagagcccacaggtggcagaatcccacccgagcccgcttcgacccgcggggtggaaaccacgggcgcccgcccggctgcgcttccagagctgaactgagaagcgagtcctctccgccctgcggccaccgcccagccccgacccccgccccggcccgatcctcactcgccgccagctccccgcgcccaccccggagttggtggcgcagaggcgggaggcggaggcgggagggcgggcgctggcaccgggaacgcccgagcgccggcagagagcgcggagagcgcgacacgtgcggcccagagcaccggggccacccggtccccgcaggcccgggaccgcgcccgctggcaggcgacacgtggaagaatacggagttctataccagagttgattgttgatggcacatacttttagaggatgctcattggcatttatgtttataatcacgtggctgttgattaaagcaaaaatagatgcgtgcaagagaggcgatgtgactgtgaagccttcccatgtaattttacttggatccactgtcaatattacatgctctttgaagcccagacaaggctgctttcactattccagacgtaacaagttaatcctgtacaagtttgacagaagaatcaattttcaccatggccactccctcaattctcaagtcacaggtcttccccttggtacaaccttgtttgtctgcaaactggcctgtatcaatagtgatgaaattcaaatatgtggagcagagatcttcgttggtgttgctccagaacagcctcaaaatttatcctgcatacagaagggagaacaggggactgtggcctgcacctgggaaagaggacgagacacccacttatacactgagtatactctacagctaagtggaccaaaaaatttaacctggcagaagcaatgtaaagacatttattgtgactatttggactttggaatcaacctcacccctgaatcacctgaatccaatttcacagccaaggttactgctgtcaatagtcttggaagctcctcttcacttccatccacattcacattcttggacatagtgaggcctcttcctccgtgggacattagaatcaaatttcaaaaggcttctgtgagcagatgtaccctttattggagagatgagggactggtactgcttaatcgactcagatatcggcccagtaacagcaggctctggaatatggttaatgttacaaaggccaaaggaagacatgatttgctggatctgaaaccatttacagaatatgaatttcagatttcctctaagctacatctttataagggaagttggagtgattggagtgaatcattgagagcacaaacaccagaagaagagcctactgggatgttagatgtctggtacatgaaacggcacattgactacagtagacaacagatttctcttttctggaagaatctgagtgtctcagaggcaagaggaaaaattctccactatcaggtgaccttgcaggagctgacaggagggaaagccatgacacagaacatcacaggacacacctcctggaccacagtcattcctagaaccggaaattgggctgtggctgtgtctgcagcaaattcaaaaggcagttctctgcccactcgtattaacataatgaacctgtgtgaggcagggttgctggctcctcgccaggtctctgcaaactcagagggcatggacaacattctggtgacttggcagcctcccaggaaagatccctctgctgttcaggagtacgtggtggaatggagagagctccatccagggggtgacacacaggtccctctaaactggctacggagtcgaccctacaatgtgtctgctctgatttcagagaacataaaatcctacatctgttatgaaatccgtgtgtatgcactctcaggggatcaaggaggatgcagctccatcctgggtaactctaagcacaaagcaccactgagtggcccccacattaatgccatcacagaggaaaaggggagcattttaatttcatggaacagcattccagtccaggagcaaatgggctgcctcctccattataggatatactggaaggaacgggactccaactcccagcctcagctctgtgaaattccctacagagtctcccaaaattcacatccaataaacagcctgcagccccgagtgacatatgtcctgtggatgacagctctgacagctgctggtgaaagttcccacggaaatgagagggaattttgtctgcaaggtaaagccaattggatggcgtttgtggcaccaagcatttgcattgctatcatcatggtgggcattttctcaacgcattacttccagcaaaagagaagacacagctgcccttggacaggctcctgatagactggcccacgcctgaagatcctgaaccgctggtcatcagtgaagtccttcatcaagtgaccccagttttcagacatcccccctgctccaactggccacaaagggaaaaaggaatccaaggtcatcaggcctctgagaaagacatgatgcacagtgcctcaagcccaccacctccaagagctctccaagctgagagcagacaactggtggatctgtacaaggtgctggagagcaggggctccgacccaaagcccgaaaacccagcctgtccctggacggtgctcccagcaggtgaccttcccacccatgatggctacttaccctccaacatagatgacctcccctcacatgaggcacctctcgctgactctctggaagaactggagcctcagcacatctccctttctgttttcccctcaagttctcttcacccactcaccttctcctgtggtgataagctgactctggatcagttaaagatgaggtgtgactccctcatgctctgagtggtgaggcttcaagccttaaagtcagtgtgccctcaaccagcacagcctgccccaattcccccagcccctgctccagcagctgtcatctctgggtgccaccatcggtctggctgcagctagaggacaggcaagccagctctgggggagtcttaggaactgggagttggtcttcactcagatgcctcatcttgcctttcccagggccttaaaattacatccttcactgtgtggacctagagactccaacttgaattcctagtaactttcttggtatgctggccagaaagggaaatgaggaggagagtagaaaccacagctcttagtagtaatggcatacagtctagaggaccattcatgcaatgactatttctaaagcacctgctacacagcaggctgtacacagcagatcagtactgttcaacagaacttcctgagatgatggaaatgttctacctctgcactcactgtccagtacattagacactaggcacattggctgttaatcacttggaatgtgtttagcttgactgaggaattaaattttgattgtaaatttaaatcgccacacatggctagtggctactgtattggagtgcacagctctagatggctcctagattattgagagccttcaaaacaaatcaacctagttctatagatgaagacataaaagacactggtaaacaccaaggtaaaagggcccccaaggtggtcatgactggtctcatttgcagaagtctaagaatgtacctttttctggccgggcgtggtagctcatgcctgtaatcccagcactttgggaggctga

SEQ ID NO: 14713 - DNA, 687 bp, Homo sapiens
  source 1..687: mol_type = unassigned DNA
acagaagggagaacaggggactgtggcctgcacctgggaaagaggacgagacacccacttatacactgagtatactctacagctaagtggaccaaaaaatttaacctggcagaagcaatgtaaagacatttattgtgactatttggactttggaatcaacctcacccctgaatcacctgaatccaatttcacagccaaggttactgctgtcaatagtcttggaagctcctcttcacttccatccacattcacattcttggacatagtgaggcctcttcctccgtgggacattagaatcaaatttcaaaaggcttctgtgagcagatgtaccctttattggagagatgagggactggtactgcttaatcgactcagatatcggcccagtaacagcaggctctggaatatggttaatgttacaaaggccaaaggaagacatgatttgctggatctgaaaccatttacagaatatgaatttcagatttcctctaagctacatctttataagggaagttggagtgattggagtgaatcattgagagcacaaacaccagaagaagagcctactgggatgttagatgtctggtacatgaaacggcacattgactacagtagacaacagatttctcttttctggaaggtgagttttaagcgtcaacttaaaactcaagggaataaaactgaagg

SEQ ID NO: 14714 - DNA, 2454 bp, Homo sapiens
  source 1..2454: mol_type = unassigned DNA
agagagcgcggagagcgcgacacgtgcggcccagagcaccggggccacccggtccccgcaggcccgggaccgcgcccgctggcaggcgacacgtggtcacggtgatccatttgtaaagtcgggaataaatgacctctgaagtgttgtctgtatattgatctgctaccagtaaaacatatctctgaagaatacggagttctataccagagttgattgttgatggcacatacttttagaggatgctcattggcatttatgtttataatcacgtggctgttgattaaagcaaaaatagatgcgtgcaagagaggcgatgtgactgtgaagccttcccatgtaattttacttggatccactgtcaatattacatgctctttgaagcccagacaaggctgctttcactattccagacgtaacaagttaatcctgtacaagtttgacagaagaatcaattttcaccatggccactccctcaattctcaagtcacaggtcttccccttggtacaaccttgtttgtctgcaaactggcctgtatcaatagtgatgaaattcaaatatgtggagcagagatcttcgttggtgttgctccagaacagcctcaaaatttatcctgcatacagaagggagaacaggggactgtggcctgcacctgggaaagaggacgagacacccacttatacactgagtatactctacagctaagtggaccaaaaaatttaacctggcagaagcaatgtaaagacatttattgtgactatttggactttggaatcaacctcacccctgaatcacctgaatccaatttcacagccaaggttactgctgtcaatagtcttggaagctcctcttcacttccatccacattcacattcttggacatagtgaggcctcttcctccgtgggacattagaatcaaatttcaaaaggcttctgtgagcagatgtaccctttattggagagatgagggactggtactgcttaatcgactcagatatcggcccagtaacagcaggctctggaatatggttaatgttacaaaggccaaaggaagacatgatttgctggatctgaaaccatttacagaatatgaatttcagatttcctctaagctacatctttataagggaagttggagtgattggagtgaatcattgagagcacaaacaccagaagaagagcctactgggatgttagatgtctggtacatgaaacggcacattgactacagtagacaacagatttctcttttctggaagaatctgagtgtctcagaggcaagaggaaaaattctccactatcaggtgaccttgcaggagctgacaggagggaaagccatgacacagaacatcacaggacacacctcctggaccacagtcattcctagaaccggaaattgggctgtggctgtgtctgcagcaaattcaaaaggcagttctctgcccactcgtattaacataatgaacctgtgtgaggcagggttgctggctcctcgccaggtctctgcaaactcagagggcatggacaacattctggtgacttggcagcctcccaggaaagatccctctgctgttcaggagtacgtggtggaatggagagagctccatccagggggtgacacacaggtccctctaaactggctacggagtcgaccctacaatgtgtctgctctgatttcagagaacataaaatcctacatctgttatgaaatccgtgtgtatgcactctcaggggatcaaggaggatgcagctccatcctgggtaactctaagcacaaagcaccactgagtggcccccacattaatgccatcacagaggaaaaggggagcattttaatttcatggaacagcattccagtccaggagcaaatgggctgcctcctccattataggatatactggaaggaacgggactccaactcccagcctcagctctgtgaaattccctacagagtctcccaaaattcacatccaataaacagcctgcagccccgagtgacatatgtcctgtggatgacagctctgacagctgctggtgaaagttcccacggaaatgagagggaattttgtctgcaaggtaaagccaattggatggcgtttgtggcaccaagcatttgcattgctatcatcatggtgggcattttctcaacgcattacttccagcaaaagagaagacacagctgcccttggacaggctcctgatagactggcccacgcctgaagatcctgaaccgctggtcatcagtgaagtccttcatcaagtgaccccagttttcagacatcccccctgctccaactggccacaaagggaaaaaggaatccaaggtcatcaggcctctgagaaagacatgatgcacagtgcctcaagcccaccacctccaagagctctccaagctgagagcagacaactggtggatctgtacaaggtgctggagagcaggggctccgacccaaagc

SEQ ID NO: 14715 - DNA, 2439 bp, Homo sapiens
  source 1..2439: mol_type = unassigned DNA
gcaggcgacacgtggaagaatacggagttctataccagagttgattgttgatggcacatacttttagaggatgctcattggcatttatgtttataatcacgtggctgttgattaaagcaaaaatagatgcgtgcaagagaggcgatgtgactgtgaagccttcccatgtaattttacttggatccactgtcaatattacatgctctttgaagcccagacaaggctgctttcactattccagacgtaacaagttaatcctgtacaagtttgacagaagaatcaattttcaccatggccactccctcaattctcaagtcacaggtcttccccttggtacaaccttgtttgtctgcaaactggcctgtatcaatagtgatgaaattcaaatatgtggagcagagatcttcgttggtgttgctccagaacagcctcaaaatttatcctgcatacagaagggagaacaggggactgtggcctgcacctgggaaagaggacgagacacccacttatacactgagtatactctacagctaagtggaccaaaaaatttaacctggcagaagcaatgtaaagacatttattgtgactatttggactttggaatcaacctcacccctgaatcacctgaatccaatttcacagccaaggttactgctgtcaatagtcttggaagctcctcttcacttccatccacattcacattcttggacatagtgaggcctcttcctccgtgggacattagaatcaaatttcaaaaggcttctgtgagcagatgtaccctttattggagagatgagggactggtactgcttaatcgactcagatatcggcccagtaacagcaggctctggaatatggttaatgttacaaaggccaaaggaagacatgatttgctggatctgaaaccatttacagaatatgaatttcagatttcctctaagctacatctttataagggaagttggagtgattggagtgaatcattgagagcacaaacaccagaagaagagcctactgggatgttagatgtctggtacatgaaacggcacattgactacagtagacaacagatttctcttttctggaagaatctgagtgtctcagaggcaagaggaaaaattctccactatcaggtgaccttgcaggagctgacaggagggaaagccatgacacagaacatcacaggacacacctcctggaccacagtcattcctagaaccggaaattgggctgtggctgtgtctgcagcaaattcaaaaggcagttctctgcccactcgtattaacataatgaacctgtgtgaggcagggttgctggctcctcgccaggtctctgcaaactcagagggcatggacaacattctggtgacttggcagcctcccaggaaagatccctctgctgttcaggagtacgtggtggaatggagagagctccatccagggggtgacacacaggtccctctaaactggctacggagtcgaccctacaatgtgtctgctctgatttcagaaattccctacagagtctcccaaaattcacatccaataaacagcctgcagccccgagtgacatatgtcctgtggatgacagctctgacagctgctggtgaaagttcccacggaaatgagagggaattttgtctgcaaggtaaagccaattggatggcgtttgtggcaccaagcatttgcattgctatcatcatggtgggcattttctcaacgcattacttccagcaaaaggtgtttgttctcctagcagccctcagacctcagtggtgtagcagagaaattccagatccagcaaatagcacttgcgctaagaaatatcccattgcagaggagaagacacagctgcccttggacaggctcctgatagactggcccacgcctgaagatcctgaaccgctggtcatcagtgaagtccttcatcaagtgaccccagttttcagacatcccccctgctccaactggccacaaagggaaaaaggaatccaaggtcatcaggcctctgagaaagacatgatgcacagtgcctcaagcccaccacctccaagagctctccaagctgagagcagacaactggtggatctgtacaaggtgctggagagcaggggctccgacccaaagcccgaaaacccagcctgtccctggacggtgctcccagcaggtgaccttcccacccatgatggctacttaccctccaacatagatgacctcccctcacatgaggcacctctcgctgactctctggaagaactggagcctcagcacatctccctttctgttttcccctcaagttctcttcacccactcaccttctcctgtggtgataagctgactctggatcagttaaagatgaggtgtgactccctcatgctctgagtggtgaggcttcaagccttaaagtcagtgtgccctcaaccagcacagcctgccccaa

SEQ ID NO: 14716 - DNA, 1797 bp, Homo sapiens
  source 1..1797: mol_type = unassigned DNA
gtatttaaaactagttaagatcttctgatttacctgagcgggtggggaaacccaccccatgagcatcccctgggctcacccagtgcacagagggaggcctcccgtggctgggcccctctcagtcagcccatgtggctgccatgacctggagcaccacagccgggggcgcccaccagctcaacaccaccacattcacgtggcagcacctccctgcctggcaaccgctgctgttggccagcattaggctgcagctcttcttctacgtgggcctggccttcatcagcctggacctctattactcctccaccagcatcaaggagctggagtacaactacaccggcgacccgggcaccagcaactgctcggtgtgtgctgtggctggccagggctgtgtgccactgcccatctgctcatgcgcctggtacttctcactgcctgagctcttccagggccctgtgtacccctactacgtgctgaccaacttctaccaaaacaaccggcggtatggagtgtccgcgacaacgcgcagctgagcgggctgcccagcacgctgcaccatccagtcaatgagtgcacccactgcgccgcctgcccatcgtgcaccctgcaatgtcatcaccaacagcctcttcaacgactcctcgctgtggcaccagtgctggcccggcgagccctacgtggaggtgccgcgctaccgcactgcacctgcatcacccggtagaccaactaccccatcaagttctgcaacccaccactggtcaacggcagcctggcactggccttccatggcacagcacccctgcccaactggcgctggctggtctacgacaagctcagccccatccccaacaacaacggcttcatcaaccaggacttcgtggtgtggatgcgcatggcagcgctgcccacgttccgcaagctgttccgcaagctgtacgggcacatccgccagggcaactactcagctgggctgccgcggtgtgtctactgtgtcaacatcacctacaactacctggtaagaagcgcaattccacactctacataaccatgttactcattgttccagtcatcgtcgcaggtgcaatcatagtactcctgctttacctaaaaaggctcaagattattatattccctccaattcctgatcctggcaagatttttaaagaaatgtttggagaccagaatgatgatactctgcactggaagaagtacgacatctatgagaagcaaaccaaggaggaaaccgactctgtagtgctgatagaaaacctgaagaaagcctctcagtgatggagataatttatttttaccttcactgtgaccttgagaagattcttcccattctccatttgttatctgggaacttattaaatggaaactgaaactactgcaccatttaaaaacaggcagctcataagagccacaggtctttatgttgagtcgcgcaccgaaaaactaaaaataatgggcgctttggagaagagtgtggagtcattctcattgaattataaaagccagcaggcttcaaactaggggacaaagcaaaaagtgatgatagtggtggagttaatcttatcaagagttgtgacaacttcctgagggatctatacttgctttgtgttctttgtgtcaacatgaacaaattttatttgtaggggaactcatttggggtgcaaatgctaatgtcaaacttgagtcacaaagaacatgtagaaaacaaaatggataaaatctgatatgtattgtttgggatcctattgaaccatgtttgtggctattaaaactcttttaacagtc

SEQ ID NO: 14717 - DNA, 1096 bp, Homo sapiens
  source 1..1096: mol_type = unassigned DNA
ggctccagcccggccgggctccgaggcgagaggctgcatggagtggccggcgcggctctgcgggctgtgggcgctgctgctctgcgccggcggcgggggcgggggcgggggcgccgcgcctacggaaactcagccacctgtgacaaatttgagtgtctctgttgaaaacctctgcacagtaatatggacatggaatccacccgagggagccagctcaaattgtagtctatggtattttagtcattttggcgacaaacaagataagaaaatagctccggaaactcgtcgttcaatagaagtacccctgaatgagaggatttgtctgcaagtggggtcccagtgtagcaccaatgagagtgagaagcctagcattttggttgaaaaatgcatctcacccccagaaggtgatcctgagtctgctgtgactgagcttcaatgcatttggcacaacctgagctacatgaagtgttcttggctccctggaaggaataccagtcccgacactaactatactctctactattggcacagaagcctggaaaaaattcatcaatgtgaaaacatctttagagaaggccaatactttggttgttcctttgatctgaccaaagtgaaggattccagttttgaacaacacagtgtccaaataatggtcaaggataatgcaggaaaaattaaaccatccttcaatatagtgcctttaacttcccgtgtgaaacctgatcctccacatattaaaaacctctccttccacaatgatgacctatatgtgcaatgggagaatccacagaattttattagcagatgcctattttatgaagtagaagtcaataacagccaaactgagacacataatgttttctacgtaaggttttaaaattattgtttttatttggctatttttcttttacttgaatttcttacattgaaatatcaatgaaacatagctcttacatttgtcaccttatgatgatgatggtaatgaaacttcttgtctaaaataaggcatggtggaagatttgaagatttatggtatgatagtatcagctgcaagtttcaagccatttattcatctgtaagcttcttagaaaggcct

SEQ ID NO: 14718 - DNA, 4036 bp, Homo sapiens
  source 1..4036: mol_type = unassigned DNA
agagggagcgaaggaggcggggactgccaaggctccagcccggccgggctccgaggcgagaggctgcatggagtggccggcgcggctctgcgggctgtgggcgctgctgctctgcgccggcggcgggggcgggggcgggggcgccgcgcctacggaaactcagccacctgtgacaaatttgagtgtctctgttgaaaacctctgcacagtaatatggacatggaatccacccgagggagccagctcaaattgtagtctatggtattttagtcattttggcgacaaacaagataagaaaatagctccggaaactcgtcgttcaatagaagtacccctgaatgagaggatttgtctgcaagtggggtcccagtgtagcaccaatgagagtgagaagcctagcattttggttgaaaaatgcatctcacccccagaaggtgatcctgagtctgctgtgactgagcttcaatgcatttggcacaacctgagctacatgaagtgttcttggctccctggaaggaataccagtcccgacactaactatactctctactattggcacagaagcctggaaaaaattcatcaatgtgaaaacatctttagagaaggccaatactttggttgttcctttgatctgaccaaagtgaaggattccagttttgaacaacacagtgtccaaataatggtcaaggataatgcaggaaaaattaaaccatccttcaatatagtgcctttaacttcccgtgtgaaacctgatcctccacatattaaaaacctctccttccacaatgatgacctatatgtgcaatgggagaatccacagaattttattagcagatgcctattttatgaagtagaagtcaataacagccaaactgagacacataatgttttctacgtccaagaggctaaatgtgagaatccagaatttgagagaaatgtggagaatacatcttgtttcatggtccctggtgttcttcctgatactttgaacacagtcagaataagagtcaaaacaaataagttatgctatgaggatgacaaactctggagtaattggagccaagaaatgagtataggtaagaagcgcaattccacactctacataaccatgttactcattgttccagtcatcgtcgcaggtgcaatcatagtactcctgctttacctaaaaaggctcaagattattatattccctccaattcctgatcctggcaagatttttaaagaaatgtttggagaccagaatgatgatactctgcactggaagaagtacgacatctatgagaagcaaaccaaggaggaaaccgactctgtagtgctgatagaaaacctgaagaaagcctctcagtgatggagataatttatttttaccttcactgtgaccttgagaagattcttcccattctccatttgttatctgggaacttattaaatggaaactgaaactactgcaccatttaaaaacaggcagctcataagagccacaggtctttatgttgagtcgcgcaccgaaaaactaaaaataatgggcgctttggagaagagtgtggagtcattctcattgaattataaaagccagcaggcttcaaactaggggacaaagcaaaaagtgatgatagtggtggagttaatcttatcaagagttgtgacaacttcctgagggatctatacttgctttgtgttctttgtgtcaacatgaacaaattttatttgtaggggaactcatttggggtgcaaatgctaatgtcaaacttgagtcacaaagaacatgtagaaaacaaaatggataaaatctgatatgtattgtttgggatcctattgaaccatgtttgtggctattaaaactcttttaacagtctgggctgggtccggtggctcacgcctgtaatcccagcaatttgggagtccgaggcgggcggatcactcgaggtcaggagttccagaccagcctgaccaaaatggtgaaacctcctctctactaaaactacaaaaattaactgggtgtggtggcgcgtgcctgtaatcccagctactcgggaagctgaggcaggtgaattgtttgaacctgggaggtggaggttgcagtgagcagagatcacaccactgcactctagcctgggtgacagagcaagactctgtctaaaaaacaaaacaaaacaaaacaaaacaaaaaaacctcttaatattctggagtcatcattcccttcgacagcattttcctctgctttgaaagccccagaaatcagtgttggccatgatgacaactacagaaaaaccagaggcagcttctttgccaagacctttcaaagccattttaggctgttaggggcagtggaggtagaatgactccttgggtattagagtttcaaccatgaagtctctaacaatgtattttcttcacctctgctactcaagtagcatttactgtgtctttggtttgtgctaggcccccgggtgtgaagcacagaccccttccaggggtttacagtctatttgagactcctcagttcttgccacttttttttttaatctccaccagtcatttttcagaccttttaactcctcaattccaacactgatttccccttttgcattctccctccttcccttccttgtagccttttgactttcattggaaattaggatgtaaatctgctcaggagacctggaggagcagaggataattagcatctcaggttaagtgtgagtaatctgagaaacaatgactaattcttgcatattttgtaacttccatgtgagggttttcagcattgatatttgtgcattttctaaacagagatgaggtggtatcttcacgtagaacattggtattcgcttgagaaaaaaagaatagttgaacctatttctctttctttacaagatgggtccaggattcctcttttctctgccataaatgattaattaaatagcttttgtgtcttacattggtagccagccagccaaggctctgtttatgcttttggggggcatatattgggttccattctcacctatccacacaacatatccgtatatatcccctctactcttacttcccccaaatttaaagaagtatgggaaatgagaggcatttcccccaccccatttctctcctcacacacagactcatattactggtaggaacttgagaactttatttccaagttgttcaaacatttaccaatcatattaatacaatgatgctatttgcaattcctgctcctaggggaggggagataagaaaccctcactctctacaggtttgggtacaagtggcaacctgcttccatggccgtgtagaagcatggtgccctggcttctctgaggaagctggggttcatgacaatggcagatgtaaagttattcttgaagtcagattgaggctgggagacagccgtagtagatgttctactttgttctgctgttctctagaaagaatatttggttttcctgtataggaatgagattaattcctttccaggtattttataattctgggaagcaaaacccatgcctccccctagccatttttactgttatcctatttagatggccatgaagaggatgctgtgaaattcccaacaaacattgatgctgacagtcatgcagtctgggagtggggaagtgatcttttgttcccatcctcttcttttagcagtaaaatagctgagggaaaagggagggaaaaggaagttatgggaatacctgtggtggttgtgatccctaggtcttgggagctcttggaggtgtctgtatcagtggatttcccatcccctgtgggaaattagtaggctcatttactgttttaggtctagcctatgtggattttttcctaacatacctaagcaaacccagtgtcaggatggtaattcttattctttcgttcagttaagtttttcccttcatctgggcactgaagggatatgtgaaacaatgttaacatttttggtagtcttcaaccagggattgtttctgtttaacttcttataggaaagcttgagtaaaataaatattgtctttttgtatgtcacccaaa

SEQ ID NO: 14719 - DNA, 1371 bp, Homo sapiens
  source 1..1371: mol_type = unassigned DNA
gtaagaacactctcgtgagtctaacggtcttccggatgaaggctatttgaagtcgccataacctggtcagaagtgtgcctgtcggcggggagagaggcaatatcaaggttttaaatctcggagaaatggctttcgtttgcttggctatcggatgcttatatacctttctgataagcacaacatttggctgtacttcatcttcagacaccgagataaaagttaaccctcctcaggattttgagatagtggatcccggatacttaggttatctctatttgcaatggcaacccccactgtctctggatcattttaaggaatgcacagtggaatatgaactaaaataccgaaacattggtagtgaaacatggaagaccatcattactaagaatctacattacaaagatgggtttgatcttaacaagggcattgaagcgaagatacacacgcttttaccatggcaatgcacaaatggatcagaagttcaaagttcctgggcagaaactacttattggatatcaccacaaggaattccagaaactaaagttcaggatatggattgcgtatattacaattggcaatatttactctgttcttggaaacctggcataggtgtacttcttgataccaattacaacttgttttactggtatgagggcttggatcatgcattacagtgtgttgattacatcaaggctgatggacaaaatataggatgcagatttccctatttggaggcatcagactataaagatttctatatttgtgttaatggatcatcagagaacaagcctatcagatccagttatttcacttttcagcttcaaaatatagttaaacctttgccgccagtctatcttacttttactcgggagagttcatgtgaaattaagctgaaatggagcatacctttgggacctattccagcaaggtgttttgattatgaaattgagatcagagaagatgatactaccttggtgactgctacagttgaaaatgaaacatacaccttgaaaacaacaaatgaaacccgacaattatgctttgtagtaagaagcaaagtgaatatttattgctcagatgacggaatttggagtgagtggagtgataaacaatgctgggaaggtgaagacctatcgaagaaaactttgctacgtttctggctaccatttggtttcatcttaatattagttatatttgtaaccggtctgcttttgcgtaagccaaacacctacccaaaaatgattccagaatttttctgtgatacatgaagactttccatatcaagagacatggtattgactcaacagtttccagtcatggccaaatgttcaatatgagtctcaataaactgaatttttcttgcgaatgttg

SEQ ID NO: 14720 - DNA, 1498 bp, Homo sapiens
  source 1..1498: mol_type = unassigned DNA
taaaaatttgatcctaagattctataaagtagccattgaggcttaccaaagttacaatattacagatggatcaggggagacggttgctatggagatggatgatatcataactccattgtgaaccagtaagaacactctcgtgagtctaacggtcttccggatgaaggctatttgaagtcgccataacctggtcagaagtgtgcctgtcggcggggagagaggcaatatcaaggttttaaatctcggagaaatggctttcgtttgcttggctatcggatgcttatatacctttctgataagcacaacatttggctgtacttcatcttcagacaccgagataaaagttaaccctcctcaggattttgagatagtggatcccggatacttaggttatctctatttgcaatggcaacccccactgtctctggatcattttaaggaatgcacagtggaatatgaactaaaataccgaaacattggtagtgaaacatggaagaccatcattactaagaatctacattacaaagatgggtttgatcttaacaagggcattgaagcgaagatacacacgcttttaccatggcaatgcacaaatggatcagaagttcaaagttcctgggcagaaactacttattggatatcaccacaaggaattccagaaactaaagttcaggatatggattgcgtatattacaattggcaatatttactctgttcttggaaacctggcataggtgtacttcttgataccaattacaacttgttttactggtatgagggcttggatcatgcattacagtgtgttgattacatcaaggctgatggacaaaatataggatgcagatttccctatttggaggcatcagactataaagatttctatatttgtgttaatggatcatcagagaacaagcctatcagatccagttatttcacttttcagcttcaaaatatagttaaacctttgccgccagtctatcttacttttactcgggagagttcatgtgaaattaagctgaaatggagcatacctttgggacctattccagcaaggtgttttgattatgaaattgagatcagagaagatgatactaccttggtgactgctacagttgaaaatgaaacatacaccttgaaaacaacaaatgaaacccgacaattatgctttgtagtaagaagcaaagtgaatatttattgctcagatgacggaatttggagtgagtggagtgataaacaatgctgggaaggtgaagacctatcgaagaaaactttgctacgtttctggctaccatttggtttcatcttaatattagttatatttgtaaccggtctgcttttgcgtaagccaaacacctacccaaaaatgattccagaatttttctgtgatacatgaagactttccatatcaagagacatggtattgactcaacagtttccagtcatggccaaatgttcaatatgagtctcaataaactgaatttttcttgcgaatgttgaa

SEQ ID NO: 14721 - DNA, 588 bp, Homo sapiens
  source 1..588: mol_type = unassigned DNA
tgtggagctgccgccatggccccgcggcgggcgcgcggctgccggaccctcggtctcccggcgctgctactgctgctgctgctccggccgccggcgacgcgggagcccgcagcttcatctcccagctcaaacaacacagcggccacaacagcagctattgtcccgggctcccagctgatgccttcaaaatcaccttccacaggaaccacagagataagcagtcatgagtcctcccacggcaccccctctcagacaacagccaagaactgggaactcacagcatccgcctcccaccagccgccaggtgtgtatccacagggccacagcgacaccactgtggctatctccacgtccactgtcctgctgtgtgggctgagcgctgtgtctctcctggcatgctacctcaagtcaagggcctctgtctgctcctgccatccccgcagtgctggacatacatgctcagtgggaagcgtctgttgatttgagggcaaccccctcctcttttcaaaacctatgaaccacctgctttgcaggcaaactcccccgctggccagcgttgaaatggaagccatggaggctctgccggtg

SEQ ID NO: 14722 - DNA, 1626 bp, Homo sapiens
  source 1..1626: mol_type = unassigned DNA
tggcggggcggcaggtcccagagcagcgctcgccacctccccccggcctgggcagcgctcgcccggggagtccagcggtgtcctgtggagctgccgccatggccccgcggcgggcgcgcggctgccggaccctcggtctcccggcgctgctactgctgctgctgctccggccgccggcgacgcggggcatcacgtgccctccccccatgtccgtggaacacgcagacatctgggtcaagagctacagcttgtactccagggagcggtacatttgtaactctggtttcaagcgtaaagccggcacgtccagcctgacggagtgcgtgttgaacaaggccacgaatgtcgcccactggacaacccccagtctcaaatgcattagagaccctgccctggttcaccaaaggccagcgccaccctccacagtaacgacggcaggggtgaccccacagccagagagcctctccccttctggaaaagagcccgcagcttcatctcccagctcaaacaacacagcggccacaacagcagctattgtcccgggctcccagctgatgccttcaaaatcaccttccacaggaaccacagagataagcagtcatgagtcctcccacggcaccccctctcagacaacagccaagaactgggaactcacagcatccgcctcccaccagccgccaggtgtgtatccacagggccacagcgacaccactgtggctatctccacgtccactgtcctgctgtgtgggctgagcgctgtgtctctcctggcatgctacctcaagtcaaggcaaactcccccgctggccagcgttgaaatggaagccatggaggctctgccggtgacttgggggaccagcagcagagatgaagacttggaaaactgctctcaccacctatgaaactcggggaaaccagcccagctaagtccggagtgaaggagcctctctgctttagctaaagacgactgagaagaggtgcaaggaagcgggctccaggagcaagctcaccaggcctctcagaagtcccagcaggatctcacggactgccgggtcggcgcctcctgcgcgagggagcaggttctccgcattcccatgggcaccacctgcctgcctgtcgtgccttggacccagggcccagcttcccaggagagaccaaaggcttctgagcaggatttttatttcattacagtgtgagctgcctggaatacatgtggtaatgaaataaaaaccctgccccgaatcttccgtccctcatcctaactttcagttcacagagaaaagtgacatacccaaagctctctgtcaattacaaggcttctcctggcgtgggagacgtctacagggaagacaccagcgtttgggcttctaaccaccctgtctccagctgctctgcacacatggacagggacctgggaaaggtgggagagatgctgagcccagcgaatcctctccattgaaggattcaggaagaagaaaactcaactcagtgccattttacgaatatatgcgtttatatttatacttccttgtctattatatctatacattatatattatttgtattttgacattgtaccttgtataaacaaaataaaacatctattttcaatatttttaaaatgca

SEQ ID NO: 14723 - DNA, 839 bp, Homo sapiens
  source 1..839: mol_type = unassigned DNA
aaaagcgaaagcgaatgcgactggcggggcggcaggtcccagagcagcgctcgccacctccccccggcctgggcagcgctcgcccggggagtccagcggtgtcctgtggagctgccgccatggccccgcggcgggcgcgcggctgccggaccctcggtctcccggcgctgctactgctgctgctgctccggccgccggcgacgcggggcatcacgtgccctccccccatgtccgtggaacacgcagacatctgggtcaagagctacagcttgtactccagggagcggtacatttgtaactctggtttcaagcgtaaagccggcacgtccagcctgacggagtgcgtgttgaacaaggccacgaatgtcgcccactggacaacccccagtctcaaatgcattagagaccctgccctggttcaccaaaggccagcgccaccctccacagtaacgacggcaggggtgaccccacagccagagagcctctccccttctggaaaagagcccgcagcttcatctcccagctcaaacaacacagcggccacaacagcagctattgtcccgggctcccagctgatgccttcaaaatcaccttccacaggaaccacagagataagcagtcatgagtcctcccacggcaccccctctcagacaacagccaagaactgggaactcacagcatccgcctcccaccagccgccaggtgtgtatccacagggccacagcgacaccactgtggctatctccacgtccactgtcctgctgtgtgggctgagcgctgtgtctctcctggcatgctacctcaagtcaagtggtgctgttcttagctattcaggatga

SEQ ID NO: 14724 - DNA, 1646 bp, Homo sapiens
  source 1..1646: mol_type = unassigned DNA
aaaagcgaaagcgaatgcgactggcggggcggcaggtcccagagcagcgctcgccacctccccccggcctgggcagcgctcgcccggggagtccagcggtgtcctgtggagctgccgccatggccccgcggcgggcgcgcggctgccggaccctcggtctcccggcgctgctactgctgctgctgctccggccgccggcgacgcggggcatcacgtgccctccccccatgtccgtggaacacgcagacatctgggtcaagagctacagcttgtactccagggagcggtacatttgtaactctggtttcaagcgtaaagccggcacgtccagcctgacggagtgcgtgttgaacaaggccacgaatgtcgcccactggacaacccccagtctcaaatgcattagagaccctgccctggttcaccaaaggccagcgccaccctccacagtaacgacggcaggggtgaccccacagccagagagcctctccccttctggaaaagagcccgcagcttcatctcccagctcaaacaacacagcggccacaacagcagctattgtcccgggctcccagctgatgccttcaaaatcaccttccacaggaaccacagagataagcagtcatgagtcctcccacggcaccccctctcagacaacagccaagaactgggaactcacagcatccgcctcccaccagccgccaggtgtgtatccacagggccacagcgacaccactgtggctatctccacgtccactgtcctgctgtgtgggctgagcgctgtgtctctcctggcatgctacctcaagtcaaggcaaactcccccgctggccagcgttgaaatggaagccatggaggctctgccggtgacttgggggaccagcagcagagatgaagacttggaaaactgctctcaccacctatgaaactcggggaaaccagcccagctaagtccggagtgaaggagcctctctgctttagctaaagacgactgagaagaggtgcaaggaagcgggctccaggagcaagctcaccaggcctctcagaagtcccagcaggatctcacggactgccgggtcggcgcctcctgcgcgagggagcaggttctccgcattcccatgggcaccacctgcctgcctgtcgtgccttggacccagggcccagcttcccaggagagaccaaaggcttctgagcaggatttttatttcattacagtgtgagctgcctggaatacatgtggtaatgaaataaaaaccctgccccgaatcttccgtccctcatcctaactttcagttcacagagaaaagtgacatacccaaagctctctgtcaattacaaggcttctcctggcgtgggagacgtctacagggaagacaccagcgtttgggcttctaaccaccctgtctccagctgctctgcacacatggacagggacctgggaaaggtgggagagatgctgagcccagcgaatcctctccattgaaggattcaggaagaagaaaactcaactcagtgccattttacgaatatatgcgtttatatttatacttccttgtctattatatctatacattatatattatttgtattttgacattgtaccttgtataaacaaaataaaacatctattttcaatatttttaaaatgc

SEQ ID NO: 14725 - DNA, 584 bp, Homo sapiens
  source 1..584: mol_type = unassigned DNA
agtccagcggtgtcctgtggagctgccgccatggccccgcggcgggcgcgcggctgccggaccctcggtctcccggcgctgctactgctgctgctgctccggccgccggcgacgcgggagcccgcagcttcatctcccagctcaaacaacacagcggccacaacagcagctattgtcccgggctcccagctgatgccttcaaaatcaccttccacaggaaccacagagataagcagtcatgagtcctcccacggcaccccctctcagacaacagccaagaactgggaactcacagcatccgcctcccaccagccgccaggtgtgtatccacagggccacagcgacaccactgtggctatctccacgtccactgtcctgctgtgtgggctgagcgctgtgtctctcctggcatgctacctcaagtcaaggcaaactcccccgctggccagcgttgaaatggaagccatggaggctctgccggtgacttgggggaccagcagcagagatgaagacttggaaaactgctctcaccacctatgaaactcggggaaaccagcccagctaagtccggagtgaaggagcct

SEQ ID NO: 14726 - DNA, 1333 bp, Homo sapiens
  source 1..1333: mol_type = unassigned DNA
atggccccgcggcgggcgcgcggctgccggaccctcggtctcccggcgctgctactgctgctgctgctccggccgccggcgacgcggggagaccctgccctggttcaccaaaggccagcgccaccctccacagtaacgacggcaggggtgaccccacagccagagagcctctccccttctggaaaagagcccgcagcttcatctcccagctcaaacaacacagcggccacaacagcagctattgtcccgggctcccagctgatgccttcaaaatcaccttccacaggaaccacagagataagcagtcatgagtcctcccacggcaccccctctcagacaacagccaagaactgggaactcacagcatccgcctcccaccagccgccaggtgtgtatccacagggccacagcgacaccactgtggctatctccacgtccactgtcctgctgtgtgggctgagcgctgtgtctctcctggcatgctacctcaagtcaaggcaaactcccccgctggccagcgttgaaatggaagccatggaggctctgccggtgacttgggggaccagcagcagagatgaagacttggaaaactgctctcaccacctatgaaactcggggaaaccagcccagctaagtccggagtgaaggagcctctctgctttagctaaagacgactgagaagaggtgcaaggaagcgggctccaggagcaagctcaccaggcctctcagaagtcccagcaggatctcacggactgccgggtcggcgcctcctgcgcgagggagcaggttctccgcattcccatgggcaccacctgcctgcctgtcgtgccttggacccagggcccagcttcccaggagagaccaaaggcttctgagcaggatttttatttcattacagtgtgagctgcctggaatacatgtggtaatgaaataaaaaccctgccccgaatcttccgtccctcatcctaactttcagttcacagagaaaagtgacatacccaaagctctctgtcaattacaaggcttctcctggcgtgggagacgtctacagggaagacaccagcgtttgggcttctaaccaccctgtctccagctgctctgcacacatggacagggacctgggaaaggtgggagagatgctgagcccagcgaatcctctccattgaaggattcaggaagaagaaaactcaactcagtgccattttacgaatatatgcgtttatatttatacttccttgtctattatatctatacattatatattatttgtattttgacattgtaccttgtataaacaaaataaaacatctattttcaatatttttaaaatgca

SEQ ID NO: 14727 - DNA, 759 bp, Homo sapiens
  source 1..759: mol_type = unassigned DNA
atggccccgcggcgggcgcgcggctgccggaccctcggtctcccggcgctgctactgctgctgctgctccggccgccggcgacgcggggcatcacgtgccctccccccatgtccgtggaacacgcagacatctgggtcaagagctacagcttgtactccagggagcggtacatttgtaactctggtttcaagcgtaaagccggcacgtccagcctgacggagtgcgtgttgaacaaggccacgaatgtcgcccactggacaacccccagtctcaaatgcattagagaccctgccctggttcaccaaaggccagcgccaccctccacagtaacgacggcaggggtgaccccacagccagagagcctctccccttctggaaaagagcccgcagcttcatctcccagctcaaacaacacagcggccacaacagcagctattgtcccgggctcccagctgatgccttcaaaatcaccttccacaggaaccacagagataagcagtcatgagtcctcccacggcaccccctctcagacaacagccaagaactgggaactcacagcatccgcctcccaccagccgccaggtgtgtatccacagggccacagcgacaccactgtggctatctccacgtccactgtcctgctgtgtgggctgagcgctgtgtctctcctggcatgctacctcaagtcaagggcctctgtctgctcctgccatccccgcagtgctggacatacatgctcagtgggaagcgtctgttga

SEQ ID NO: 14728 - DNA, 564 bp, Homo sapiens
  source 1..564: mol_type = unassigned DNA
atggccccgcggcgggcgcgcggctgccggaccctcggtctcccggcgctgctactgctgctgctgctccggccgccggcgacgcggggagaccctgccctggttcaccaaaggccagcgccaccctccacagtaacgacggcaggggtgaccccacagccagagagcctctccccttctggaaaagagcccgcagcttcatctcccagctcaaacaacacagcggccacaacagcagctattgtcccgggctcccagctgatgccttcaaaatcaccttccacaggaaccacagagataagcagtcatgagtcctcccacggcaccccctctcagacaacagccaagaactgggaactcacagcatccgcctcccaccagccgccaggtgtgtatccacagggccacagcgacaccactgtggctatctccacgtccactgtcctgctgtgtgggctgagcgctgtgtctctcctggcatgctacctcaagtcaagggcctctgtctgctcctgccatccccgcagtgctggacatacatgctcagtgggaagcgtctgttga

SEQ ID NO: 14729 - DNA, 1037 bp, Homo sapiens
  source 1..1037: mol_type = unassigned DNA
agtccagcggtgtcctgtggagctgccgccatggccccgcggcgggcgcgcggctgccggaccctcggtctcccggcgctgctactgctgctgctgctccggccgccggcgacgcggggcatcacgtgccctccccccatgtccgtggaacacgcagacatctgggtcaagagctacagcttgtactccagggagcggtacatttgtaactctggtttcaagcgtaaagccggcacgtccagcctgacggagtgcgtgttgaacaaggccacgaatgtcgcccactggacaacccccagtctcaaatgcattaagcccgcagcttcatctcccagctcaaacaacacagcggccacaacagcagctattgtcccgggctcccagctgatgccttcaaaatcaccttccacaggaaccacagagataagcagtcatgagtcctcccacggcaccccctctcagacaacagccaagaactgggaactcacagcatccgcctcccaccagccgccaggtgtgtatccacagggccacagcgacaccactgtggctatctccacgtccactgtcctgctgtgtgggctgagcgctgtgtctctcctggcatgctacctcaagtcaaggcaaactcccccgctggccagcgttgaaatggaagccatggaggctctgccggtgacttgggggaccagcagcagagatgaagacttggaaaactgctctcaccacctatgaaactcggggaaaccagcccagctaagtccggagtgaaggagcctctctgctttagctaaagacgactgagaagaggtgcaaggaagcgggctccaggagcaagctcaccaggcctctcagaagtcccagcaggatctcacggactgccgggtcggcgcctcctgcgcgagggagcaggttctccgcattcccatgggcaccacctgcctgcctgtcgtgccttggacccagggcccagcttcccaggagagaccaaaggcttctgagcaggatttttatttcattacagtgtgagctgcctg

SEQ ID NO: 14730 - DNA, 660 bp, Homo sapiens
  source 1..660: mol_type = unassigned DNA
atggccccgcggcgggcgcgcggctgccggaccctcggtctcccggcgctgctactgctgctgctgctccggccgccggcgacgcggggcatcacgtgccctccccccatgtccgtggaacacgcagacatctgggtcaagagctacagcttgtactccagggagcggtacatttgtaactctggtttcaagcgtaaagccggcacgtccagcctgacggagtgcgtgttgaacaaggccacgaatgtcgcccactggacaacccccagtctcaaatgcattaagcccgcagcttcatctcccagctcaaacaacacagcggccacaacagcagctattgtcccgggctcccagctgatgccttcaaaatcaccttccacaggaaccacagagataagcagtcatgagtcctcccacggcaccccctctcagacaacagccaagaactgggaactcacagcatccgcctcccaccagccgccaggtgtgtatccacagggccacagcgacaccactgtggctatctccacgtccactgtcctgctgtgtgggctgagcgctgtgtctctcctggcatgctacctcaagtcaagggcctctgtctgctcctgccatccccgcagtgctggacatacatgctcagtgggaagcgtctgttga

SEQ ID NO: 14731 - DNA, 8607 bp, Homo sapiens
  source 1..8607: mol_type = unassigned DNA
ctgggcccgggctggaagccggaagcgagcaaagtggagccgactcgaactccaccgcggaaaagaaagcctcagaacgttcgttcgctgcgtccccagccggggccgagccctccgcgacgccagccgggccatgggggccgcacgcagcccgccgtccgctgtcccggggcccctgctggggctgctcctgctgctcctgggcgtgctggccccgggtggcgcctccctgcgactcctggaccaccgggcgctggtctgctcccagccggggctaaactgcacggtcaagaatagtacctgcctggatgacagctggattcaccctcgaaacctgaccccctcctccccaaaggacctgcagatccagctgcactttgcccacacccaacaaggagacctgttccccgtggctcacatcgaatggacactgcagacagacgccagcatcctgtacctcgagggtgcagagttatctgtcctgcagctgaacaccaatgaacgtttgtgcgtcaggtttgagtttctgtccaaactgaggcatcaccacaggcggtggcgttttaccttcagccactttgtggttgaccctgaccaggaatatgaggtgaccgttcaccacctgcccaagcccatccctgatggggacccaaaccaccagtccaagaatttccttgtgcctgactgtgagcacgccaggatgaaggtaaccacgccatgcatgagctcaggcagcctgtgggaccccaacatcaccgtggagaccctggaggcccaccagctgcgtgtgagcttcaccctgtggaacgaatctacccattaccagatcctgctgaccagttttccgcacatggagaaccacagttgctttgagcacatgcaccacatacctgcgcccagaccagaagagttccaccagcgatccaacgtcacactcactctacgcaaccttaaagggtgctgtcgccaccaagtgcagatccagcccttcttcagcagctgcctcaatgactgcctcagacactccgcgactgtttcctgcccagaaatgccagacactccagaaccaattccggactacatgcccctgtgggtgtactggttcatcacgggcatctccatcctgctggtgggctccgtcatcctgctcatcgtctgcatgacctggaggctagctgggcctggaagtgaaaaatacagtgatgacaccaaatacaccgatggcctgcctgcggctgacctgatccccccaccgctgaagcccaggaaggtctggatcatctactcagccgaccaccccctctacgtggacgtggtcctgaaattcgcccagttcctgctcaccgcctgcggcacggaagtggccctggacctgctggaagagcaggccatctcggaggcaggagtcatgacctgggtgggccgtcagaagcaggagatggtggagagcaactctaagatcatcgtcctgtgctcccgcggcacgcgcgccaagtggcaggcgctcctgggccggggggcgcctgtgcggctgcgctgcgaccacggaaagcccgtgggggacctgttcactgcagccatgaacatgatcctcccggacttcaagaggccagcctgcttcggcacctacgtagtctgctacttcagcgaggtcagctgtgacggcgacgtccccgacctgttcggcgcggcgccgcggtacccgctcatggacaggttcgaggaggtgtacttccgcatccaggacctggagatgttccagccgggccgcatgcaccgcgtaggggagctgtcgggggacaactacctgcggagcccgggcggcaggcagctccgcgccgccctggacaggttccgggactggcaggtccgctgtcccgactggttcgaatgtgagaacctctactcagcagatgaccaggatgccccgtccctggacgaagaggtgtttgaggagccactgctgcctccgggaaccggcatcgtgaagcgggcgcccctggtgcgcgagcctggctcccaggcctgcctggccatagacccgctggtcggggaggaaggaggagcagcagtggcaaagctggaacctcacctgcagccccggggtcagccagcgccgcagcccctccacaccctggtgctcgccgcagaggagggggccctggtggccgcggtggagcctgggcccctggctgacggtgccgcagtccggctggcactggcgggggagggcgaggcctgcccgctgctgggcagcccgggcgctgggcgaaatagcgtcctcttcctccccgtggaccccgaggactcgccccttggcagcagcacccccatggcgtctcctgacctccttccagaggacgtgagggagcacctcgaaggcttgatgctctcgctcttcgagcagagtctgagctgccaggcccaggggggctgcagtagacccgccatggtcctcacagacccacacacgccctacgaggaggagcagcggcagtcagtgcagtctgaccagggctacatctccaggagctccccgcagccccccgagggactcacggaaatggaggaagaggaggaagaggagcaggacccagggaagccggccctgccactctctcccgaggacctggagagcctgaggagcctccagcggcagctgcttttccgccagctgcagaagaactcgggctgggacacgatggggtcagagtcagaggggcccagtgcatgagggcggctccccagggaccgcccagatcccagctttgagagaggagtgtgtgtgcacgtattcatctgtgtgtacatgtctgcatgtgtatatgttcgtgtgtgaaatgtaggctttaaaatgtaaatgtctggattttaatcccaggcatccctcctaacttttctttgtgcagcggtctggttatcgtctatccccaggggaatccacacagcccgctcccaggagctaatggtagagcgtccttgaggctccattattcgttcattcagcatttattgtgcacctactatgtggcgggcatttgggataccaagataaattgcatgcggcatggccccagccatgaaggaacttaaccgctagtgccgaggacacgttaaacgaacaggatgggccgggcacggtggctcacgcctgtaatcccagcacactgggaggccgaggcaggtggatcactctgaggtcaggagtttgagccagcctggccaacatggtgaaaccccatctccactaaaaatagaaaaattagccgggcatggtgacacatgcctgtagtcctagctacttgggaggctgaggcaggagaattgcttgaatctgggaggcagaggttgcagtgagccgagattgtgccattgcactgcagcctggatgacagagcgagactctatctcaaaaaaaaaaaaaaaaaaagatggtcacgcgggatgtaaacgctgaatgggccaggtgcagtggctcatgcttgtaatcccagcactttgggaaggcgaggcaggtggattgcttgagctcaggagttcaagaccagcctgggcgacatagtgagacctcatctctacctaaatttttttttagtcagtcatggtggcacatgcctgtagtcccagctactcgggaggctgatgccagatgatcacttgagcccaggaggtagaggctgcagtgagctataatggtaccattgcaatccagcctgggcagcagagtgagaccctgtctcaaaaaaaataaaaaagtagaaagatggagtggaagcctgcccagggttgtgagcatgcacgggaaaggcacccaggtcaggggggatccccgaggagatgcctgagctgaaggattgtggttggggaaagcgtagtcccagcaaggaagcagtttgtgggtaagtgctgggaggtgagtggagtgagcttgtcagggagctgctggtggagcctggaggggaaggagggaggcagtgagagagatcggggtggggggtggggggatgtcgccagagctcaggggtggggacagccttgtgcgcatcagtcctgaggcctggggcacctttcgtctgatgagcctctgcatggagagaggctgagggctaaacacagctggatgtcacctgagttcatttataggaagagagaaatgtcgaggtgaaacgtaaaagcatctggcaggaaggtgagtctgaagccctgcacccgcgttccgactatcagtggggagctgttagcacgtaggattcttcagagcagctgggctggagctcccctgagctcaggaagccccagggtgcaagggcaaggaaatgaggggtggtgggtcagtgaagatctgggcagaccttgtgtggggaaggggtgctgctgtgacttcagggtctgaggtccaaagacagcatttgaaaagaggctctgaagccagtgtttgaagaatttgttcctgaagtacctcctgggggtaggctagaggcttctggcttcagggtcctgaagaacacattgaggtgccgtctgacactggaatagggtgcccttcattcctatgcctgagtccttaactatatttccaacctccagtgaggaggagaagattcggaaatgtgacaggagagcaaacaggacagtttgcatgtgtgtgtgcgcacacatacatgtgcgtgaaagattatcaataaaagtgcataaatttgttgatctggtaagagtttctagcaggaaggtcgagccacttactgtaggtcaagaagttgctagttgcggagttttttcttgcagttagactttacctagtggtagcagggccaccaaagctctgtgtcccagatggtgtatggcccataatccacccaacagcagcaaaggaccaggcaaaggagaacaggagcagaagcctcccagccactagccttttgggctcagtctctccaataatcctggagaggggcttcgttgggtctggacacctaccatgcattctgtgacctttccctagcttccaataaataactgtttgacgcccagagtacaggataccacaatgcactcttcctgcgtagagcacatgttcccatctgctcccattcctcaggaaccttgaattctagctctgctggcctttgagcccatgccagtaaatgtcctgatgggcattgcctactatctccagggcagctgcctttgtcctcctaacagctttattggagtacagttcacttaccatacaatccacaattgaccctgcacaatttgatgccggtttagtatagtcacagttcagcagccatcagcacagtcagtcttagagtttactacccccaaaagaaatccagccccccttagtcaccaccccaacctccccatccctaggcacccctaggctactttgatctctgtagacttgcctcttctggacatgacatagagaaaggagtcataaattctccaaggtgtctgtttcttctttaatgtcattccctgtttctcctcacattccctccccatttcctgggcccagtctcacactggtccttgcttaccctaaatgctattaattccatcactctgagtatggtgtttgctgtccgctgaatgccaagagcttcaagagtgtgtgtaaataaagccacacctttatttttgtattattctgaaccatggctaataaattgtttcaccaagaaatgtctctctaagaacaggtgccctccacgctgtgcccctcccacctcttcagctcgtctcctgagtgtgcagaggtggttccggttgggaaagaagcagcggagcatctaaccatgcctgtgtccaggccgattatgcacgcagccaccaacaagctcccaactcccgcgtagagtttcatgactttttcctgcctactatcttgatcctagttttttttttgttttttttttttttaaggaataattactttgattcaaaaccagtttctcttttctgcataggaaggtccttgaaggtgtttagggtctaaaaagggtggtgttcggtctctgaaacatccattcagcagtttgagctgggatctctgaatgcaagggtatgatggatatacttctttcttgcttttgttgtgttttggttttttgtttgtttttaagtcagggtctctctgtcaccaggctgtattacagtggtgcaatcatggctcactgcagcctcgacctcccaggctcaagccatctttccacctcagcctgccagtggctagaactacaggcgtgcaccactgtgcccggctaatttgtgtgtatatattttgtagaaatggggtttcaccatgttgtccaggctggtcacgaactcctgggctcaagccatctgcccgcctcatcctcccaaagtgctgggattataggcctgagcccaccgtgcctggcctttcctgtttatctttgaaaattaaatagggcataagagagaagaagatgtacttacaatgcagtgggtggttttaactctatagcctttgggctctgtggttggtgctccccttcctaaataaatgaggtgtatgcagggccctcttctgccttagcgccctgccagctgggactccagcaaggcccggggcacctgaggacagagtgagatggagggccgctgctccagcagccgggcctgcatcccacaagtcaactgtgtcggacagaggatccttacaaagaagaggcagcagggttgggggctggccagctgctcgtccgccctaggtagcttgctcatctgtaaagtgggtggggcaggagttcccacctcatggggtcctggcaagcctgcagtatccccgagtggcaccagcctgcttctggggcagagcagtttgtgccccctgaggtaccactgatcctctttccctgctattaggtattgctctcttcctccggtgtttgccttttcagattatagaagtaatatgtgttcccatatttggcgtctctcaggagctcaggaagtacttggctgagtgaacatgtccattgtggaaaaatggcaacaatatggattccatgggtatattttatagaagaatatgaagaaaagcagctacccctaaacccattgcacaagctgttcatgttaattctgtacccgacgctttccccacggggcctcccctcactctgaaatggcatccaggtccatcttgccctccacctctgcatggctctccatgccccatcgcctctcccagatcctagcactgggtccacactctcgccctgtccatttaggttgatgaaagcaggcagtcacccgggtgggccagtcttgcctgtgggaggaacatgcagtctcctgtctcatggtttgaagtgtgccaggaagcctggcccagcccacctccccctggagtccttcccaggaggaataaccccttaggtcattgactataagatgagttcgctcactggatccttcctctctgatgagacaggaagaaggtacacagtgaccaggtaggaggaggagagggagtagaaaggagggatgcgggtggctggtccctgcatttgcctgcttccctgcacgggtgtcccactggccgcctctgctcaccagtgtcatgggattctctcagaagatgaaaacagcccctgcttttttgctagaatggctgagctttcatggaaaggaagctggacccaagcaacagccgactaccgaaggttgcctggagcagtgcagatgtgggaggaagaagggccttggtgcacactggcttttcttcctgactgcaatgtggcattgtgccagctacctcctctttctcggcctcaggaaaatggagagaaagcagccctgaaggtggctgtgacgagggaaggggcagagggcctgacagtcaaccacgcgctatattttcctgttcttccttagggcaagaactgcatggccagactcaggcaaggcctaggtgtgggctgggcattgcctacacgtgaagagatcactccgcgtccctactgcacctgtcacaaagtgccttctgatatgcctggcaaaccaaaatcggtgagcgccagcttgcttccctagaagacatttctaaatattcataacatgcttgctcaaatcaatcaccttattttacatccgctccagggagaaatgaagacatggtcctacgttgttctgtaattattttctatgtaaattttgttccttgttacaattatatatgtcttaggggaaaggaccatttcacatgtgtcacctcatgtgattctcaccacagccctgtgattgctcctgttttataaataatgacatagttccagttgatggccaaagccacagctaacgagaggcagagagagctcaggctcccaggagcttccactctcagaccttgcctcccgggctgccctgagtgaaacgcctgcttagcatttggcacagccagaagcagcaagctagggtcacaacacagagaggggctgtgtaatactggctgcctctgtgctaagaaaaaaaaaaaatcactgtgtgtttgtttattttggtgcaggcccagtgttcttgcttagacttaatactacccttcatgttaaaataaaaccaaacaaaaaccca

SEQ ID NO: 14732 - DNA, 2693 bp, Homo sapiens
  source 1..2693: mol_type = unassigned DNA
ctgggcccgggctggaagccggaagcgagcaaagtggagccgactcgaactccaccgcggaaaagaaagcctcagaacgttcgttcgctgcgtccccagccggggccgagccctccgcgacgccagccgggccatgggggccgcacgcagcccgccgtccgctgtcccggggcccctgctggggctgctcctgctgctcctgggcgtgctggccccgggtggcgcctccctgcgactcctggaccaccgggcgctggtctgctcccagccggggctaaactgcacggtcaagaatagtacctgcctggatgacagctggattcaccctcgaaacctgaccccctcctccccaaaggacctgcagatccagctgcactttgcccacacccaacaaggagacctgttccccgtggctcacatcgaatggacactgcagacagacgccagcatcctgtacctcgagggtgcagagttatctgtcctgcagctgaacaccaatgaacgtttgtgcgtcaggtttgagtttctgtccaaactgaggcatcaccacaggcggtggcgttttaccttcagccactttgtggttgaccctgaccaggaatatgaggtgaccgttcaccacctgcccaagcccatccctgatggggacccaaaccaccagtccaagaatttccttgtgcctgactgtgagcacgccaggatgaaggtaaccacgccatgcatgagctcaggcagcctgtgggaccccaacatcaccgtggagaccctggaggcccaccagctgcgtgtgagcttcaccctgtggaacgaatctacccattaccagatcctgctgaccagttttccgcacatggagaaccacagttgctttgagcacatgcaccacatacctgcgcccagaccagaagagttccaccagcgatccaacgtcacactcactctacgcaaccttaaagggtgctgtcgccaccaagtgcagatccagcccttcttcagcagctgcctcaatgactgcctcagacactccgcgactgtttcctgcccagaaatgccagacactccagatggcctgcctgcggctgacctgatccccccaccgctgaagcccaggaaggtctggatcatctactcagccgaccaccccctctacgtggacgtggtcctgaaattcgcccagttcctgctcaccgcctgcggcacggaagtggccctggacctgctggaagagcaggccatctcggaggcaggagtcatgacctgggtgggccgtcagaagcaggagatggtggagagcaactctaagatcatcgtcctgtgctcccgcggcacgcgcgccaagtggcaggcgctcctgggccggggggcgcctgtgcggctgcgctgcgaccacggaaagcccgtgggggacctgttcactgcagccatgaacatgatcctcccggacttcaagaggccagcctgcttcggcacctacgtagtctgctacttcagcgaggtcagctgtgacggcgacgtccccgacctgttcggcgcggcgccgcggtacccgctcatggacaggttcgaggaggtgtacttccgcatccaggacctggagatgttccagccgggccgcatgcaccgcgtaggggagctgtcgggggacaactacctgcggagcccgggcggcaggcagctccgcgccgccctggacaggttccgggactggcaggtccgctgtcccgactggttcgaatgtgagaacctctactcagcagatgaccaggatgccccgtccctggacgaagaggtgtttgaggagccactgctgcctccgggaaccggcatcgtgaagcgggcgcccctggtgcgcgagcctggctcccaggcctgcctggccatagacccgctggtcggggaggaaggaggagcagcagtggcaaagctggaacctcacctgcagccccggggtcagccagcgccgcagcccctccacaccctggtgctcgccgcagaggagggggccctggtggccgcggtggagcctgggcccctggctgacggtgccgcagtccggctggcactggcgggggagggcgaggcctgcccgctgctgggcagcccgggcgctgggcgaaatagcgtcctcttcctccccgtggaccccgaggactcgccccttggcagcagcacccccatggcgtctcctgacctccttccagaggacgtgagggagcacctcgaaggcttgatgctctcgctcttcgagcagagtctgagctgccaggcccaggggggctgcagtagacccgccatggtcctcacagacccacacacgccctacgaggaggagcagcggcagtcagtgcagtctgaccagggctacatctccaggagctccccgcagccccccgagggactcacggaaatggaggaagaggaggaagaggagcaggacccagggaagccggccctgccactctctcccgaggacctggagagcctgaggagcctccagcggcagctgcttttccgccagctgcagaagaactcgggctgggacacgatggggtcagagtcagaggggcccagtgcatgagggcggctccccagggaccgcccagatcccagctttgagagaggagtgtgtgtgcacgtattcatctgtgtgtacatgtctgcatgtgtatatgttcgtgtgtgaaatgtaggct

SEQ ID NO: 14733 - DNA, 2010 bp, Homo sapiens
  source 1..2010: mol_type = unassigned DNA
ggcccggcgatgtcgctcgtgctgctaagcctggccgcgctgtgcaggagcgccgtaccccgagagccgaccgttcaatgtggctctgaaactgggccatctccagagtggatgctacaacatgatctaatccccggagacttgagggacctccgagtagaacctgttacaactagtgttgcaacaggggactattcaattttgatgaatgtaagctgggtactccgggcagatgccagcatccgcttgttgaaggccaccaagatttgtgtgacgggcaaaagcaacttccagtcctacagctgtgtgaggtgcaattacacagaggccttccagactcagaccagaccctctggtggtaaatggacattttcctacatcggcttccctgtagagctgaacacagtctatttcattggggcccataatattcctaatgcaaatatgaatgaagatggcccttccatgtctgtgaatttcacctcaccaggctgcctagaccacataatgaaatataaaaaaaagtgtgtcaaggccggaagcctgtgggatccgaacatcactgcttgtaagaagaatgaggagacagtagaagtgaacttcacaaccactcccctgggaaacagatacatggctcttatccaacacagcactatcatcgggttttctcaggtgtttgagccacaccagaagaaacaaacgcgagcttcagtggtgattccagtgactggggatagtgaaggtgctacggtgcagctgactccatattttcctacttgtggcagcgactgcatccgacataaaggaacagttgtgctctgcccacaaacaggcgtccctttccctctggataacaacaaaagcaagccgggaggctggctgcctctcctcctgctgtctctgctggtggccacatgggtgctggtggcagggatctatctaatgtggaggcacgaaaggatcaagaagacttccttttctaccaccacactactgccccccattaaggttcttgtggtttacccatctgaaatatgtttccatcacacaatttgttacttcactgaatttcttcaaaaccattgcagaagtgaggtcatccttgaaaagtggcagaaaaagaaaatagcagagatgggtccagtgcagtggcttgccactcaaaagaaggcagcagacaaagtcgtcttccttctttccaatgacgtcaacagtgtgtgcgatggtacctgtggcaagagcgagggcagtcccagtgagaactctcaagacctcttcccccttgcctttaaccttttctgcagtgatctaagaagccagattcatctgcacaaatacgtggtggtctactttagagagattgatacaaaagacgattacaatgctctcagtgtctgccccaagtaccacctcatgaaggatgccactgctttctgtgcagaacttctccatgtcaagcagcaggtgtcagcaggaaaaagatcacaagcctgccacgatggctgctgctccttgtagcccacccatgagaagcaagagaccttaaaggcttcctatcccaccaattacagggaaaaaacgtgtgatgatcctgaagcttactatgcagcctacaaacagccttagtaattaaaacattttataccaataaaattttcaaatattgctaactaatgtagcattaactaacgattggaaactacatttacaacttcaaagctgttttatacatagaaatcaattacagttttaattgaaaactataaccattttgataatgcaacaataaagcatcttcagccaaacatctagtcttccatagaccatgcattgcagtgtacccagaactgtttagctaatattctatgtttaattaatgaatactaactctaagaacccctcactgattcactcaatagcatcttaagtgaaaaaccttctattacatgcaaaaaatcattgtttttaagataacaaaagtagggaataaacaagctgaacccactttta

SEQ ID NO: 14734 - DNA, 2621 bp, Homo sapiens
  source 1..2621: mol_type = unassigned DNA
aaaacgaaagcactccgtgctggaagtaggaggagagtcaggactcccaggacagagagtgcacaaactacccagcacagccccctccgccccctctggaggctgaagagggattccagcccctgccacccacagacacgggctgactggggtgtctgccccccttgggggggggcagcacagggcctcaggcctgggtgccacctggcacctagaagatgcctgtgccctggttcttgctgtccttggcactgggccgaagcccagtggtcctttctctggagaggcttgtggggcctcaggacgctacccactgctctccggtgagtctggaaccctggggagacgaggaaaggctcagggttcagtttttggctcagcaaagccttagcctggctcctgtcactgctgccactgccagaactgccctgtctggtctgtctggtgctgatggtagaagagaagaacggggaaggggcaagagctgggtctgtctttctctgggagggtctgggaatacggagccccagaaaaagggcctctcctgccgcctctgggacagtgacatactctgcctgcctggggacatcgtgcctgctccgggccccgtgctggcgcctacgcacctgcagacagagctggtgctgaggtgccagaaggagaccgactgtgacctctgtctgcgtgtggctgtccacttggccgtgcatgggcactgggaagagcctgaagatgaggaaaagtttggaggagcagctgactcaggggtggaggagcctaggaatgcctctctccaggcccaagtcgtgctctccttccaggcctaccctactgcccgctgcgtcctgctggaggtgcaagtgcctgctgcccttgtgcagtttggtcagtctgtgggctctgtggtatatgactgcttcgaggctgccctagggagtgaggtacgaatctggtcctatactcagcccaggtacgagaaggaactcaaccacacacagcagctgcctgactgcagggggctcgaagtctggaacagcatcccgagctgctgggccctgccctggctcaacgtgtcagcagatggtgacaacgtgcatctggttctgaatgtctctgaggagcagcacttcggcctctccctgtactggaatcaggtccagggccccccaaaaccccggtggcacaaaaacctgactggaccgcagatcattaccttgaaccacacagacctggttccctgcctctgtattcaggtgtggcctctggaacctgactccgttaggacgaacatctgccccttcagggaggacccccgcgcacaccagaacctctggcaagccgcccgactgcaactgctgaccctgcagagctggctgctggacgcaccgtgctcgctgcccgcagaagcggcactgtgctggcgggctccgggtggggacccctgccagccactggtcccaccgctttcctgggagaacgtcactgtggacaaggttctcgagttcccattgctgaaaggccaccctaacctctgtgttcaggtgaacagctcggagaagctgcagctgcaggagtgcttgtgggctgactccctggggcctctcaaagacgatgtgctactgttggagacacgaggcccccaggacaacagatccctctgtgccttggaacccagtggctgtacttcactacccagcaaagcctccacgagggcagctcgccttggagagtacttactacaagacctgcagtcaggccagtgtctgcagctatgggacgatgacttgggagcgctatgggcctgccccatggacaaatacatccacaagcgctgggccctcgtgtggctggcctgcctactctttgccgctgcgctttccctcatcctccttctcaaaaaggatcacgcgaaagggtggctgaggctcttgaaacaggacgtccgctcgggggcggccgccaggggccgcgcggctctgctcctctactcagccgatgactcgggtttcgagcgcctggtgggcgccctggcgtcggccctgtgccagctgccgctgcgcgtggccgtagacctgtggagccgtcgtgaactgagcgcgcaggggcccgtggcttggtttcacgcgcagcggcgccagaccctgcaggagggcggcgtggtggtcttgctcttctctcccggtgcggtggcgctgtgcagcgagtggctacaggatggggtgtccgggcccggggcgcacggcccgcacgacgccttccgcgcctcgctcagctgcgtgctgcccgacttcttgcagggccgggcgcccggcagctacgtgggggcctgcttcgacaggctgctccacccggacgccgtacccgcccttttccgcaccgtgcccgtcttcacactgccctcccaactgccagacttcctgggggccctgcagcagcctcgcgccccgcgttccgggcggctccaagagagagcggagcaagtgtcccgggcccttcagccagccctggatagctacttccatcccccggggactcccgcgccgggacgcggggtgggaccaggcgcgggacctggggcgggggacgggacttaaataaaggcagacgctgtttttctaccc

SEQ ID NO: 14735 - DNA, 2384 bp, Homo sapiens
  source 1..2384: mol_type = unassigned DNA
acagccagcagcctgccgggagccaaaacgaaagcactccgtgctggaagtaggaggagagtcaggactcccaggacagagagtgcacaaactacccagcacagccccctccgccccctctggaggctgaagagggattccagcccctgccacccacagacacgggctgactggggtgtctgccccccttgggggggggcagcacagggcctcaggcctgggtgccacctggcacctagaagatgcctgtgccctggttcttgctgtccttggcactgggccgaagcccagtggtcctttctctggagaggcttgtggggcctcaggacgctacccactgctctccgggcctctcctgccgcctctgggacagtgacatactctgcctgcctggggacatcgtgcctgctccgggccccgtgctggcgcctacgcacctgcagacagagctggtgctgaggtgccagaaggagaccgactgtgacctctgtctgcgtgtggctgtccacttggccgtgcatgggcactgggaagagcctgaagatgaggaaaagtttggaggagcagctgactcaggggtggaggagcctaggaatgcctctctccaggcccaagtcgtgctctccttccaggcctaccctactgcccgctgcgtcctgctggaggtgcaagtgcctgctgcccttgtgcagtttggtcagtctgtgggctctgtggtatatgactgcttcgaggctgccctagggagtgaggtacgaatctggtcctatactcagcccaggtacgagaaggaactcaaccacacacagcagctgcctgccctgccctggctcaacgtgtcagcagatggtgacaacgtgcatctggttctgaatgtctctgaggagcagcacttcggcctctccctgtactggaatcaggtccagggccccccaaaaccccggtggcacaaaaacctgactggaccgcagatcattaccttgaaccacacagacctggttccctgcctctgtattcaggtgtggcctctggaacctgactccgttaggacgaacatctgccccttcagggaggacccccgcgcacaccagaacctctggcaagccgcccgactgcaactgctgaccctgcagagctggctgctggacgcaccgtgctcgctgcccgcagaagcggcactgtgctggcgggctccgggtggggacccctgccagccactggtcccaccgctttcctgggagaacgtcactgtggacaaggttctcgagttcccattgctgaaaggccaccctaacctctgtgttcaggtgaacagctcggagaagctgcagctgcaggagtgcttgtgggctgactccctggggcctctcaaagacgatgtgctactgttggagacacgaggcccccaggacaacagatccctctgtgccttggaacccagtggctgtacttcactacccagcaaagcctccacgagggcagctcgccttggagagtacttactacaagacctgcagtcaggccagtgtctgcagctatgggacgatgacttgggagcgctatgggcctgccccatggacaaatacatccacaagcgctgggccctcgtgtggctggcctgcctactctttgccgctgcgctttccctcatcctccttctcaaaaaggatcacgcgaaagggtggctgaggctcttgaaacaggacgtccgctcgggggcggccgccaggggccgcgcggctctgctcctctactcagccgatgactcgggtttcgagcgcctggtgggcgccctggcgtcggccctgtgccagctgccgctgcgcgtggccgtagacctgtggagccgtcgtgaactgagcgcgcaggggcccgtggcttggtttcacgcgcagcggcgccagaccctgcaggagggcggcgtggtggtcttgctcttctctcccggtgcggtggcgctgtgcagcgagtggctacaggatggggtgtccgggcccggggcgcacggcccgcacgacgccttccgcgcctcgctcagctgcgtgctgcccgacttcttgcagggccgggcgcccggcagctacgtgggggcctgcttcgacaggctgctccacccggacgccgtacccgcccttttccgcaccgtgcccgtcttcacactgccctcccaactgccagacttcctgggggccctgcagcagcctcgcgccccgcgttccgggcggctccaagagagagcggagcaagtgtcccgggcccttcagccagccctggatagctacttccatcccccggggactcccgcgccgggacgcggggtgggaccaggcgcgggacctggggcgggggacgggacttaaataaaggcagacgctgtttttcta

SEQ ID NO: 14736 - DNA, 2388 bp, Homo sapiens
  source 1..2388: mol_type = unassigned DNA
ggaagtaggaggagagtcaggactcccaggacagagagtgcacaaactacccagcacagccccctccgccccctctggaggctgaagagggattccagcccctgccacccacagacacgggctgactggggtgtctgccccccttgggggggggcagcacagggcctcaggcctgggtgccacctggcacctagaagatgcctgtgccctggttcttgctgtccttggcactgggccgaagcccagtggtcctttctctggagaggcttgtggggcctcaggacgctacccactgctctccgggcctctcctgccgcctctgggacagtgacatactctgcctgcctggggacatcgtgcctgctccgggccccgtgctggcgcctacgcacctgcagacagagctggtgctgaggtgccagaaggagaccgactgtgacctctgtctgcgtgtggctgtccacttggccgtgcatgggcactgggaagagcctgaagatgaggaaaagtttggaggagcagctgactcaggggtggaggagcctaggaatgcctctctccaggcccaagtcgtgctctccttccaggcctaccctactgcccgctgcgtcctgctggaggtgcaagtgcctgctgcccttgtgcagtttggtcagtctgtgggctctgtggtatatgactgcttcgaggctgccctagggagtgaggtacgaatctggtcctatactcagcccaggtacgagaaggaactcaaccacacacagcagctgcctgactgcagggggctcgaagtctggaacagcatcccgagctgctgggccctgccctggctcaacgtgtcagcagatggtgacaacgtgcatctggttctgaatgtctctgaggagcagcacttcggcctctccctgtactggaatcaggtccagggccccccaaaaccccggtggcacaaaaacctgactggaccgcagatcattaccttgaaccacacagacctggttccctgcctctgtattcaggtgtggcctctggaacctgactccgttaggacgaacatctgccccttcagggaggacccccgcgcacaccagaacctctggcaagccgcccgactgcaactgctgaccctgcagagctggctgctggacgcaccgtgctcgctgcccgcagaagcggcactgtgctggcgggctccgggtggggacccctgccagccactggtcccaccgctttcctgggagaacgtcactgtggacaaggttctcgagttcccattgctgaaaggccaccctaacctctgtgttcaggtgaacagctcggagaagctgcagctgcaggagtgcttgtgggctgactccctggggcctctcaaagacgatgtgctactgttggagacacgaggcccccaggacaacagatccctctgtgccttggaacccagtggctgtacttcactacccagcaaagcctccacgagggcagctcgccttggagagtacttactacaagacctgcagtcaggccagtgtctgcagctatgggacgatgacttgggagcgctatgggcctgccccatggacaaatacatccacaagcgctgggccctcgtgtggctggcctgcctactctttgccgctgcgctttccctcatcctccttctcaaaaaggatcacgcgaaagggtggctgaggctcttgaaacaggacgtccgctcgggggcggccgccaggggccgcgcggctctgctcctctactcagccgatgactcgggtttcgagcgcctggtgggcgccctggcgtcggccctgtgccagctgccgctgcgcgtggccgtagacctgtggagccgtcgtgaactgagcgcgcaggggcccgtggcttggtttcacgcgcagcggcgccagaccctgcaggagggcggcgtggtggtcttgctcttctctcccggtgcggtggcgctgtgcagcgagtggctacaggatggggtgtccgggcccggggcgcacggcccgcacgacgccttccgcgcctcgctcagctgcgtgctgcccgacttcttgcagggccgggcgcccggcagctacgtgggggcctgcttcgacaggctgctccacccggacgccgtacccgcccttttccgcaccgtgcccgtcttcacactgccctcccaactgccagacttcctgggggccctgcagcagcctcgcgccccgcgttccgggcggctccaagagagagcggagcaagtgtcccgggcccttcagccagccctggatagctacttccatcccccggggactcccgcgccgggacgcggggtgggaccaggcgcgggacctggggcgggggacgggacttaaataaaggcagacgctgtttttctaccca

SEQ ID NO: 14737 - DNA, 2108 bp, Homo sapiens
  source 1..2108: mol_type = unassigned DNA
agagtgcacaaactacccagcacagccccctccgccccctctggaggctgaagagggattccagcccctgccacccacagacacgggctgactggggtgtctgccccccttgggggggggcagcacagggcctcaggcctgggtgccacctggcacctagaagatgcctgtgccctggttcttgctgtccttggcactgggccgaagcccagtggtcctttctctggagaggcttgtggggcctcaggacgctacccactgctctccgggcctctcctgccgcctctgggacagtgacatactctgcctgcctggggacatcgtgcctgctccgggccccgtgctggcgcctacgcacctgcagacagagctggtgctgaggtgccagaaggagaccgactgtgacctctgtctgcgtgtggctgtccacttggccgtgcatggcctaccctactgcccgctgcgtcctgctggaggtgcaagtgcctgctgcccttgtgcagtttggtcagtctgtgggctctgtggtatatgactgcttcgaggctgccctagggagtgaggtacgaatctggtcctatactcagcccaggtacgagaaggaactcaaccacacacagcagctgcctgccctgccctggctcaacgtgtcagcagatggtgacaacgtgcatctggttctgaatgtctctgaggagcagcacttcggcctctccctgtactggaatcaggtccagggccccccaaaaccccggtggcacaaaaacctgactggaccgcagatcattaccttgaaccacacagacctggttccctgcctctgtattcaggtgtggcctctggaacctgactccgttaggacgaacatctgccccttcagggaggacccccgcgcacaccagaacctctggcaagccgcccgactgcaactgctgaccctgcagagctggctgctggacgcaccgtgctcgctgcccgcagaagcggcactgtgctggcgggctccgggtggggacccctgccagccactggtcccaccgctttcctgggagaacgtcactgtggacgtgaacagctcggagaagctgcagctgcaggagtgcttgtgggctgactccctggggcctctcaaagacgatgtgctactgttggagacacgaggcccccaggacaacagatccctctgtgccttggaacccagtggctgtacttcactacccagcaaagcctccacgagggcagctcgccttggagagtacttactacaagacctgcagtcaggccagtgtctgcagctatgggacgatgacttgggagcgctatgggcctgccccatggacaaatacatccacaagcgctgggccctcgtgtggctggcctgcctactctttgccgctgcgctttccctcatcctccttctcaaaaaggatcacgcgaaagcggccgccaggggccgcgcggctctgctcctctactcagccgatgactcgggtttcgagcgcctggtgggcgccctggcgtcggccctgtgccagctgccgctgcgcgtggccgtagacctgtggagccgtcgtgaactgagcgcgcaggggcccgtggcttggtttcacgcgcagcggcgccagaccctgcaggagggcggcgtggtggtcttgctcttctctcccggtgcggtggcgctgtgcagcgagtggctacaggatggggtgtccgggcccggggcgcacggcccgcacgacgccttccgcgcctcgctcagctgcgtgctgcccgacttcttgcagggccgggcgcccggcagctacgtgggggcctgcttcgacaggctgctccacccggacgccgtacccgcccttttccgcaccgtgcccgtcttcacactgccctcccaactgccagacttcctgggggccctgcagcagcctcgcgccccgcgttccgggcggctccaagagagagcggagcaagtgtcccgggcccttcagccagccctggatagctacttccatcccccggggactcccgcgccgggacgcggggtgggaccaggcgcgggacctggggcgggggacgggacttaaataaaggcagacgctgtttttctaccc

SEQ ID NO: 14738 - DNA, 2147 bp, Homo sapiens
  source 1..2147: mol_type = unassigned DNA
atgcctgtgccctggttcttgctgtccttggcactgggccgaagcccagtggtcctttctctggagaggcttgtggggcctcaggacgctacccactgctctccgggcctctcctgccgcctctgggacagtgacatactctgcctgcctggggacatcgtgcctgctccgggccccgtgctggcgcctacgcacctgcagacagagctggtgctgaggtgccagaaggagaccgactgtgacctctgtctgcgtgtggctgtccacttggccgtgcatgggcactgggaagagcctgaagatgaggaaaagtttggaggagcagctgactcaggggtggaggagcctaggaatgcctctctccaggcccaagtcgtgctctccttccaggcctaccctactgcccgctgcgtcctgctggaggtgcaagtgcctgctgcccttgtgcagtttggtcagtctgtgggctctgtggtatatgactgcttcgaggctgccctagggagtgaggtacgaatctggtcctatactcagcccaggtacgagaaggaactcaaccacacacagcagctgcctgactgcagggggctcgaagtctggaacagcatcccgagctgctgggccctgccctggctcaacgtgtcagcagatggtgacaacgtgcatctggttctgaatgtctctgaggagcagcacttcggcctctccctgtactggaatcaggtccagggccccccaaaaccccggtggcacaaaaacctgactggaccgcagatcattaccttgaaccacacagacctggttccctgcctctgtattcaggtgtggcctctggaacctgactccgttaggacgaacatctgccccttcagggaggacccccgcgcacaccagaacctctggcaagccgcccgactgcaactgctgaccctgcagagctggctgctggacgcaccgtgctcgctgcccgcagaagcggcactgtgctggcgggctccgggtggggacccctgccagccactggtcccaccgctttcctgggagaacgtcactgtggacaaggttctcgagttcccattgctgaaaggccaccctaacctctgtgttcaggtgaacagctcggagaagctgcagctgcaggagtgcttgtgggctgactccctggggcctctcaaagacgatgtgctactgttggagacacgaggcccccaggacaacagatccctctgtgccttggaacccagtggctgtacttcactacccagcaaagcctccacgagggcagctcgccttggagagtacttactacaagacctgcagtcaggccagtgtctgcagctatgggacgatgacttgggagcgctatgggcctgccccatggacaaatacatccacaagcgctgggccctcgtgtggctggcctgcctactctttgccgctgcgctttccctcatcctccttctcaaaaaggatcacgcgaaagcggccgccaggggccgcgcggctctgctcctctactcagccgatgactcgggtttcgagcgcctggtgggcgccctggcgtcggccctgtgccagctgccgctgcgcgtggccgtagacctgtggagccgtcgtgaactgagcgcgcaggggcccgtggcttggtttcacgcgcagcggcgccagaccctgcaggagggcggcgtggtggtcttgctcttctctcccggtgcggtggcgctgtgcagcgagtggctacaggatggggtgtccgggcccggggcgcacggcccgcacgacgccttccgcgcctcgctcagctgcgtgctgcccgacttcttgcagggccgggcgcccggcagctacgtgggggcctgcttcgacaggctgctccacccggacgccgtacccgcccttttccgcaccgtgcccgtcttcacactgccctcccaactgccagacttcctgggggccctgcagcagcctcgcgccccgcgttccgggcggctccaagagagagcggagcaagtgtcccgggcccttcagccagccctggatagctacttccatcccccggggactcccgcgccgggacgcggggtgggaccaggcgcgggacctggggcgggggacgggacttaaataaaggcagacgctgtttttct

SEQ ID NO: 14739 - DNA, 2284 bp, Homo sapiens
  source 1..2284: mol_type = unassigned DNA
aggaggagagtcaggactcccaggacagagagtgcacaaactacccagcacagccccctccgccccctctggaggctgaagagggattccagcccctgccacccacagacacgggctgactggggtgtctgccccccttgggggggggcagcacagggcctcaggcctgggtgccacctggcacctagaagatgcctgtgccctggttcttgctgtccttggcactgggccgaagcccagtggtcctttctctggagaggcttgtggggcctcaggacgctacccactgctctccgggcctctcctgccgcctctgggtgacatactctgcctgcctggggacatcgtgcctgctccgggccccgtgctggcgcctacgcacctgcagacagagctggtgctgaggtgccagaaggagaccgactgtgacctctgtctgcgtgtggctgtccacttggccgtgcatgggcactgggaagagcctgaagatgaggaaaagtttggaggagcagctgactcaggggtggaggagcctaggaatgcctctctccaggcccaagtcgtgctctccttccaggcctaccctactgcccgctgcgtcctgctggaggtgcaagtgcctgctgcccttgtgcagtttggtcagtctgtgggctctgtggtatatgactgcttcgaggctgccctagggagtgaggtacgaatctggtcctatactcagcccaggtacgagaaggaactcaaccacacacagcagctgcctgactgcagggggctcgaagtctggaacagcatcccgagctgctgggccctgccctggctcaacgtgtcagcagatggtgacaacgtgcatctggttctgaatgtctctgaggagcagcacttcggcctctccctgtactggaatcaggtccagggccccccaaaaccccggtggcacaaaaacctgactggaccgcagatcattaccttgaaccacacagacctggttccctgcctctgtattcaggtgtggcctctggaacctgactccgttaggacgaacatctgccccttcagggaggacccccgcgcacaccagaacctctggcaagccgcccgactgcaactgctgaccctgcagagctggctgctggacgcaccgtgctcgctgcccgcagaagcggcactgtgctggcgggctccgggtggggacccctgccagccactggtcccaccgctttcctgggagaacgtcactgtggacgtgaacagctcggagaagctgcagctgcaggagtgcttgtgggctgactccctggggcctctcaaagacgatgtgctactgttggagacacgaggcccccaggacaacagatccctctgtgccttggaacccagtggctgtacttcactacccagcaaagcctccacgagggcagctcgccttggagagtacttactacaagacctgcagtcaggccagtgtctgcagctatgggacgatgacttgggagcgctatgggcctgccccatggacaaatacatccacaagcgctgggccctcgtgtggctggcctgcctactctttgccgctgcgctttccctcatcctccttctcaaaaaggatcacgcgaaagcggccgccaggggccgcgcggctctgctcctctactcagccgatgactcgggtttcgagcgcctggtgggcgccctggcgtcggccctgtgccagctgccgctgcgcgtggccgtagacctgtggagccgtcgtgaactgagcgcgcaggggcccgtggcttggtttcacgcgcagcggcgccagaccctgcaggagggcggcgtggtggtcttgctcttctctcccggtgcggtggcgctgtgcagcgagtggctacaggatggggtgtccgggcccggggcgcacggcccgcacgacgccttccgcgcctcgctcagctgcgtgctgcccgacttcttgcagggccgggcgcccggcagctacgtgggggcctgcttcgacaggctgctccacccggacgccgtacccgcccttttccgcaccgtgcccgtcttcacactgccctcccaactgccagacttcctgggggccctgcagcagcctcgcgccccgcgttccgggcggctccaagagagagcggagcaagtgtcccgggcccttcagccagccctggatagctacttccatcccccggggactcccgcgccgggacgcggggtgggaccaggcgcgggacctggggcgggggacgggacttaaataaaggcagacgctgtttttcta

SEQ ID NO: 14740 - DNA, 2244 bp, Homo sapiens
  source 1..2244: mol_type = unassigned DNA
aactacccagcacagccccctccgccccctctggaggctgaagagggattccagcccctgccacccacagacacgggctgactggggtgtctgccccccttgggggggggcagcacagggcctcaggcctgggtgccacctggcacctagaagatgcctgtgccctggttcttgctgtccttggcactgggccgaagcccagtggtcctttctctggagaggcttgtggggcctcaggacgctacccactgctctccgggcctctcctgccgcctctgggacagtgacatactctgcctgcctggggacatcgtgcctgctccgggccccgtgctggcgcctacgcacctgcagacagagctggtgctgaggtgccagaaggagaccgactgtgacctctgtctgcgtgtggctgtccacttggccgtgcatgggcactgggaagagcctgaagatgaggaaaagtttggaggagcagctgactcaggggtggaggagcctaggaatgcctctctccaggcccaagtcgtgctctccttccaggcctaccctactgcccgctgcgtcctgctggaggtgcaagtgcctgctgcccttgtgcagtttggtcagtctgtgggctctgtggtatatgactgcttcgaggctgccctagggagtgaggtacgaatctggtcctatactcagcccaggtacgagaaggaactcaaccacacacagcagctgcctgccctgccctggctcaacgtgtcagcagatggtgacaacgtgcatctggttctgaatgtctctgaggagcagcacttcggcctctccctgtactggaatcaggtccagggccccccaaaaccccggtggcacaaaaacctgactggaccgcagatcattaccttgaaccacacagacctggttccctgcctctgtattcaggtgtggcctctggaacctgactccgttaggacgaacatctgccccttcagggaggacccccgcgcacaccagaacctctggcaagccgcccgactgcaactgctgaccctgcagagctggctgctggacgcaccgtgctcgctgcccgcagaagcggcactgtgctggcgggctccgggtggggacccctgccagccactggtcccaccgctttcctgggagaacgtcactgtggacgtgaacagctcggagaagctgcagctgcaggagtgcttgtgggctgactccctggggcctctcaaagacgatgtgctactgttggagacacgaggcccccaggacaacagatccctctgtgccttggaacccagtggctgtacttcactacccagcaaagcctccacgagggcagctcgccttggagagtacttactacaagacctgcagtcaggccagtgtctgcagctatgggacgatgacttgggagcgctatgggcctgccccatggacaaatacatccacaagcgctgggccctcgtgtggctggcctgcctactctttgccgctgcgctttccctcatcctccttctcaaaaaggatcacgcgaaagggtggctgaggctcttgaaacaggacgtccgctcgggggcggccgccaggggccgcgcggctctgctcctctactcagccgatgactcgggtttcgagcgcctggtgggcgccctggcgtcggccctgtgccagctgccgctgcgcgtggccgtagacctgtggagccgtcgtgaactgagcgcgcaggggcccgtggcttggtttcacgcgcagcggcgccagaccctgcaggagggcggcgtggtggtcttgctcttctctcccggtgcggtggcgctgtgcagcgagtggctacaggatggggtgtccgggcccggggcgcacggcccgcacgacgccttccgcgcctcgctcagctgcgtgctgcccgacttcttgcagggccgggcgcccggcagctacgtgggggcctgcttcgacaggctgctccacccggacgccgtacccgcccttttccgcaccgtgcccgtcttcacactgccctcccaactgccagacttcctgggggccctgcagcagcctcgcgccccgcgttccgggcggctccaagagagagcggagcaagtgtcccgggcccttcagccagccctggatagctacttccatcccccggggactcccgcgccgggacgcggggtgggaccaggcgcgggacctggggcgggggacgggacttaaataaaggcagacgctgtttttcta

SEQ ID NO: 14741 - DNA, 8720 bp, Homo sapiens
  source 1..8720: mol_type = unassigned DNA
gcggccgccgcggccaccgcccactcggggctggccagcggcgggcggccggggcgcagagaacggcctggctgggcgagcgcacggccatggccccgtggctgcagctctgctccgtcttctttacggtcaacgcctgcctcaacggctcgcagctggctgtggccgctggcgggtccggccgcgcgcggggcgccgacacctgtggctggaggggagtggggccagccagcagaaacagtgggctgtacaacatcaccttcaaatatgacaattgtaccacctacttgaatccagtggggaagcatgtgattgctgacgcccagaatatcaccatcagccagtatgcttgccatgaccaagtggcagtcaccattctttggtccccaggggccctcggcatcgaattcctgaaaggatttcgggtaatactggaggagctgaagtcggagggaagacagtgccaacaactgattctaaaggatccgaagcagctcaacagtagcttcaaaagaactggaatggaatctcaacctttcctgaatatgaaatttgaaacggattatttcgtaaaggttgtcccttttccttccattaaaaacgaaagcaattaccaccctttcttctttagaacccgagcctgtgacctgttgttacagccggacaatctagcttgtaaacccttctggaagcctcggaacctgaacatcagccagcatggctcggacatgcaggtgtccttcgaccatgcaccgcacaacttcggcttccgtttcttctatcttcactacaagctcaagcacgaaggacctttcaagcgaaagacctgtaagcaggagcaaactacagagacgaccagctgcctccttcaaaatgtttctccaggggattatataattgagctggtggatgacactaacacaacaagaaaagtgatgcattatgccttaaagccagtgcactccccgtgggccgggcccatcagagccgtggccatcacagtgccactggtagtcatatcggcattcgcgacgctcttcactgtgatgtgccgcaagaagcaacaagaaaatatatattcacatttagatgaagagagctctgagtcttccacatacactgcagcactcccaagagagaggctccggccgcggccgaaggtctttctctgctattccagtaaagatggccagaatcacatgaatgtcgtccagtgtttcgcctacttcctccaggacttctgtggctgtgaggtggctctggacctgtgggaagacttcagcctctgtagagaagggcagagagaatgggtcatccagaagatccacgagtcccagttcatcattgtggtttgttccaaaggtatgaagtactttgtggacaagaagaactacaaacacaaaggaggtggccgaggctcggggaaaggagagctcttcctggtggcggtgtcagccattgccgaaaagctccgccaggccaagcagagttcgtccgcggcgctcagcaagtttatcgccgtctactttgattattcctgcgagggagacgtccccggtatcctagacctgagtaccaagtacagactcatggacaatcttcctcagctctgttcccacttgcactcccgagaccacggcctccaggagccggggcagcacacgcgacagggcagcagaaggaactacttccggagcaagtcaggccggtccctatacgtcgccatttgcaacatgcaccagtttattgacgaggagcccgactggttcgaaaagcagttcgttcccttccatcctcctccactgcgctaccgggagccagtcttggagaaatttgattcgggcttggttttaaatgatgtcatgtgcaaaccagggcctgagagtgacttctgcctaaaggtagaggcggctgttcttggggcaaccggaccagccgactcccagcacgagagtcagcatgggggcctggaccaagacggggaggcccggcctgcccttgacggtagcgccgccctgcaacccctgctgcacacggtgaaagccggcagcccctcggacatgccgcgggactcaggcatctatgactcgtctgtgccctcatccgagctgtctctgccactgatggaaggactctcgacggaccagacagaaacgtcttccctgacggagagcgtgtcctcctcttcaggcctgggtgaggaggaacctcctgcccttccttccaagctcctctcttctgggtcatgcaaagcagatcttggttgccgcagctacactgatgaactccacgcggtcgcccctttgtaacaaaacgaaagagtctaagcattgccactttagctgctgcctccctctgattccccagctcatctccctggttgcatggcccacttggagctgaggtctcatacaaggatatttggagtgaaatgctggccagtacttgttctcccttgccccaaccctttaccggatatcttgacaaactctccaattttctaaaatgatatggagctctgaaaggcatgtccataaggtctgacaacagcttgccaaatttggttagtccttggatcagagcctgttgtgggaggtagggaggaaatatgtaaagaaaaacaggaagatacctgcactaatcattcagacttcattgagctctgcaaactttgcctgtttgctattggctaccttgatttgaaatgctttgtgaaaaaaggcacttttaacatcatagccacagaaatcaagtgccagtctatctggaatccatgttgtattgcagataatgttctcatttatttttgatgtagaatttacattgccatgggtgttaaataagctttgagtcaaaagtcaagaaagtgactgaatatacagtcaccttttatgaaatgagtctctgtgttactgggtggcatgactgattgaggtgaagctcacggggccaggctgaccgtcttgaccgttccacttgagataggttggtcatcgtgcagaaggccccaggacctcagcacacacagcctcctcttggtctgagtaggcatcatgtgggggccagatctgcctgctgtttccatgggttacatttactgtgctgtatctcagatgttggtgtctggaagtttattcttaagagactgctacccagctggtctgtattattggaagttgcagttcgtgctttggttggccttctggtctaaagctgtgtcctgaatattagggatcacaattcactgaaatacagcagtgtgtggaggtgatggccagttaatctgctgaactggttttgactaatgacaaacctctttttaagatggtagaatggaggtgatagtcacaaaagtaaatgttccatttttatgaatgactttctacagagtttctatttctaaagaaaaaacaattgttcacatcccatctgatgattagcatgtgtgtaatgaatgctgtcttggtctcccctgtggaaacccttctccctgtgccttagagcaggtgtgtacatctctcactacctttctcatgggtgctgttagattttggcacccgttttctcagcattcagcccagggaatgtggttttcacttcttcgtcagataagaccaacatgaaggggtatgttgagaaacatcctgaggcaaggtgggaggtgggatggggcaggactttcccttccaagcacatgcatggcaggtggggaaaggggggcttgcacccctgctggaaagaaaaggtttgtgtatatttctgatgcaaatgtcatactcactgctctgtaaaggcagctggcagctttttgggaaaagaacgtgctcgtctgttctctggcatcaagtttcttgcagctgctctgagggagagacagtgagctgcaagactgcctccccataacaacaggcaactcagagaagagtcattttatgttgttcctatggaatctggaatgagtgcagagctcctacccacacatgactgccccgccatttcatcctaggcattctgtgaaggagattggttagtccaaacttgctaacatacgaaaattcacttggaacatgatgagagatttcttattgaggccaagagatgtttcctgtcccagaggaaccattaggagtcgcttttagggtattcagctttgttcatgaaataaggcatctctgagaaagtggccccagggagagaatggaggactgggaggagaagcattaactgagctccaagggtgtgtgggcagagagcttgctatgtgaactcactccttaagaaaatggaagagaaaaagagagtgctagttaaaaaatcgggatgttttagtttggatttagggttttgatacttatgttgaaatactaatgtttctgatcaataaaatcaaactcttaatataccgagtaatgaaaccatagtgtgattgcctcagaataaattgagaagtccaacttcctagttttgtttaattagtttcactttttctactctccccagtatgctagaaatgggaatcgttgccctgcagattacggcaaaacatctgttttaagcaaagctgcattttttgactcagaaattgtcccagacggtggatataagatgaaattcagaaaaacgttctgccaagtcacaggcttttagatattatggaaacaagaaatggaaaacaggatgatctccatgagaggccttgatcctgagagtaaaaggcttgtgtagataggttagacaacgtcctctagaaaagagaccagggataagtccaggtttccaggaaaaccaagaagcctgcgggtagctgaaggtagagtgctagttgttcatcttaacttaccaatgagctacagaaaggacttagcatctgatgtcatcagctttgccaggagagtgatcaaggaggttaaagctcaggtaaaggtgtgccttctcagagattggctacaagcaacagagaccacctcaacagagaccacctcaacagactcagcccagccatacaaggtgccaaagctcctccagagggctgtcttgggcctttgaggcaattgatctccagaaagagtcagaagtcattccagtccaggcccaggtattcagatggtgacccagccagataatagtatcttgagcaaataatagtatcttgagtgcaaataagcaggaagactgtccttcaaaaaatgtggggttacatgattttcagagcctttttttcagagttgagcatcttttcttttaaaagaaataaggggcaagaggaccaattttattccttgaggaaaaatgacacacccttctcccaaaagaaagaaaactctctggccccccaacttcaacactaatttggctccctgaagaagagagaaaatattatttctgtctttattgaagagaaatgggcaatgccaatgtgaaggttactagtcttttttattttctattggtgaagactactactgctcttatttagcagatcttataccttcagtggtcaccagtatagcaggtgaggtataaggaaaacagcagtgtgatgataaatggtaattaatatactttgtctgtgtcagcaatagggaatggtggggactgtggcaaactgaagcgcccctgttccacccacagtgggtaattttccagtcgactgtggccatgaagtacttcctgatcttcccatttttcaagaaaagctgacaatctggatttttatatgaaaaattctgattttaaaaaatattggcaactaagttaaaattcaagtgaatttagacccagcagaagacatggatggacctgatttggtccactgactaccagtttgttaacctgtgctttataagatttgaaggaaaggcattcatggtaattacagacggtgccaccagaaaatgctcttgctaaatgcagccagtagttagattgcttctttctccagtctcccccgcaaagaaatttgacgtgattctgaatgcactggacatgtcttgattgcgtctttacatttcacagtgtcttaaaagaaaggcaagccagttgttaatttcagaatcagatttatgctctctcaatttaaaaaatgctgggaacaatttcatttttttttttttgagatggagtcttgctctgttgcccaggctggagtgcagtggcgtgatctcggctcactgcaagctccacctcccgggttcacgccattctcctgcctcagcctcctgagtagctgggactacaggcgcccaccaccacgcctggctaatttttttgtatttttagtagagacggggtttcactgtgttagccaggatgatctcgatctcctgacctggtgatccgcttgcctcggcctcccaaagtgctgggattacaggcgtgagccactgcgcccggcctaacaatttcatttaaactccacaacctaaagggctttgtttatagttttagctcttggcataatttttttcaggtggtgtgcaattctgagcataggccaagacatgattaggaaagcaggcagttgtagagagtaaggcaaggaacctcctagcgtccattagagccaggtatttgcattatcttccgttttaagtggtctgtgaattgactgtgttttggaggtgtgaaacagtatacagagaaaagcttttcctgatactgagatatcagttaggagtccaaatggggtgttgggtcatccttgccatatcacctcctttccaggctcagagtgaaaatagacaaaaggaaatctgactgcaagccagtggctttgattccagtttcagagtttagggactaggagagagtttagattatctagcatattctccccctggtgtcagacagggctgtgcctgaattattccagacatatggctgtagatggtattctttattttataagaaggagattctgtaacctaccctgctgatcagatagttctttgtatgtcttagagaaattcaagccagcttccttttgttcggcttgtagtggagaaagaacagctggtcaccttccatgtattcaaaaaccacagtgaagtcatccccctggtgtttttatttcagtgataaataattccacccacttaaaccattcttcatggctcttgttttccaggggcctaataattttcactgctgtaatgtttctcagcttcacacttagtttagttgcccaaacaatgttggtgccttactcacattggtgccttgtgaagacgaggctcaggatggggattatggggaaattcttgcacacccagctcctcttaccacttaaaaatataatggcactttcacaaaatgatatgtcacctatattcattgagaattatttgactgccacatttttcccctgatgatagtcatctatcataacttgtgtttgttttcctcctgagatcaaacacttggtgcttattcctgatgtatactctgagaccagctcttaccttctgagtggcagctacccctccctcccaattttagatcctatttttacacatctctatagatatcacctttatttcatgactcacaatattaaatggtacagacttcagtttaaccactggtgtggtaacagcagtagttgctaagtaccaccttcccattgctgtttgagggctaatttgcaaagacatttgaatctcccagtgaagatgtctggggaattttggccagttgtcttccctcttgcccttttgttctttaaaattcagcttggaccatagacacctccaggatcttgtttatgttctgctctcaattgaccaagcactgcgttttgcacaatcagaagtctcacaaaagcaaacagttatgactgcatatctgatgtttatatcctataaaatttcaggaagattcagagtcaatcttctatttgtacatgatgtagacaaaattagctgctccaattgttagacaaaaaattgccattggattacactaatgtgctcatctgttgttttaaaagtttggtatcaggcggggcacggtggctcacgcctgtaatcccagcattttgggaggccaaggtgggcggatcacctgaggtccagagttcaagaccagcctgaccaacatggtgaaaccctgtctctactaaaaatacaaaattaatcaggcgtggttgtgtgtgcctgtaatcccagctactcgagaggctgaggcaggagaatcgcttgaatccgggaggcagaggttgcagtgagctgagatcacgccattgcactctagcctgggcaacaagagcgaaactccgtctcaacaacaacaacaaaaagtttggtatgtttctctcaagaaaaaagcatggtgagtccagacagcagcaaaagcttttgtgaaaaccaattgtgttcatctagatagtaagtaactcctatttttactgttaattttttaaaagagaatttttccctgtggaaactccctgttagtacgtcctaggggagaaagcctgtggaatatggtggttattgatggcgttgcctttgtttcatctttgagtttgccctttgtgggatctagtgggataatgagcactgacagaactcttaacagcgtgctgtatttttgacattgaaaatgttaatgacttgatttgtacataactctgtaactaggtgaaagtagatcacagctgacatttacaaaatgtttttgtaccttagaatttctgcattaaataaaatgttttgttttaa

SEQ ID NO: 14742 - DNA, 4474 bp, Homo sapiens
  source 1..4474: mol_type = unassigned DNA
atccgctcttcttttcctccgggaaaagaaacgggaagtggccgtgggccggtgaattccgtgtagtggccaagctttgttccaaagagggggaggtggtgacagtctcttgcccactgaagcgtgccagacagagtgctaggcatgggggcagaggtgaatcagatgacagccacctctcaccacgaggagtggctgaaagtgtgactggactacaggcaatcctggccttggcagggagtggggccagccagcagaaacagtgggctgtacaacatcaccttcaaatatgacaattgtaccacctacttgaatccagtggggaagcatgtgattgctgacgcccagaatatcaccatcagccagtatgcttgccatgaccaagtggcagtcaccattctttggtccccaggggccctcggcatcgaattcctgaaaggatttcgggtaatactggaggagctgaagtcggagggaagacagtgccaacaactgattctaaaggatccgaagcagctcaacagtagcttcaaaagaactggaatggaatctcaacctttcctgaatatgaaatttgaaacggattatttcgtaaaggttgtcccttttccttccattaaaaacgaaagcaattaccaccctttcttctttagaacccgagcctgtgacctgttgttacagccggacaatctagcttgtaaacccttctggaagcctcggaacctgaacatcagccagcatggctcggacatgcaggtgtccttcgaccatgcaccgcacaacttcggcttccgtttcttctatcttcactacaagctcaagcacgaaggacctttcaagcgaaagacctgtaagcaggagcaaactacagagacgaccagctgcctccttcaaaatgtttctccaggggattatataattgagctggtggatgacactaacacaacaagaaaagtgatgcattatgccttaaagccagtgcactccccgtgggccgggcccatcagagccgtggccatcacagtgccactggtagtcatatcggcattcgcgacgctcttcactgtgatgtgccgcaagaagcaacaagaaaatatatattcacatttagatgaagagagctctgagtcttccacatacactgcagcactcccaagagagaggctccggccgcggccgaaggtctttctctgctattccagtaaagatggccagaatcacatgaatgtcgtccagtgtttcgcctacttcctccaggacttctgtggctgtgaggtggctctggacctgtgggaagacttcagcctctgtagagaagggcagagagaatgggtcatccagaagatccacgagtcccagttcatcattgtggtttgttccaaaggtatgaagtactttgtggacaagaagaactacaaacacaaaggaggtggccgaggctcggggaaaggagagctcttcctggtggcggtgtcagccattgccgaaaagctccgccaggccaagcagagttcgtccgcggcgctcagcaagtttatcgccgtctactttgattattcctgcgagggagacgtccccggtatcctagacctgagtaccaagtacagactcatggacaatcttcctcagctctgttcccacttgcactcccgagaccacggcctccaggagccggggcagcacacgcgacagggcagcagaaggaactacttccggagcaagtcaggccggtccctatacgtcgccatttgcaacatgcaccagtttattgacgaggagcccgactggttcgaaaagcagttcgttcccttccatcctcctccactgcgctaccgggagccagtcttggagaaatttgattcgggcttggttttaaatgatgtcatgtgcaaaccagggcctgagagtgacttctgcctaaaggtagaggcggctgttcttggggcaaccggaccagccgactcccagcacgagagtcagcatgggggcctggaccaagacggggaggcccggcctgcccttgacggtagcgccgccctgcaacccctgctgcacacggtgaaagccggcagcccctcggacatgccgcgggactcaggcatctatgactcgtctgtgccctcatccgagctgtctctgccactgatggaaggactctcgacggaccagacagaaacgtcttccctgacggagagcgtgtcctcctcttcaggcctgggtgaggaggaacctcctgcccttccttccaagctcctctcttctgggtcatgcaaagcagatcttggttgccgcagctacactgatgaactccacgcggtcgcccctttgtaacaaaacgaaagagtctaagcattgccactttagctgctgcctccctctgattccccagctcatctccctggttgcatggcccacttggagctgaggtctcatacaaggatatttggagtgaaatgctggccagtacttgttctcccttgccccaaccctttaccggatatcttgacaaactctccaattttctaaaatgatatggagctctgaaaggcatgtccataaggtctgacaacagcttgccaaatttggttagtccttggatcagagcctgttgtgggaggtagggaggaaatatgtaaagaaaaacaggaagatacctgcactaatcattcagacttcattgagctctgcaaactttgcctgtttgctattggctaccttgatttgaaatgctttgtgaaaaaaggcacttttaacatcatagccacagaaatcaagtgccagtctatctggaatccatgttgtattgcagataatgttctcatttatttttgatgtagaatttacattgccatgggtgttaaataagctttgagtcaaaagtcaagaaagtgactgaatatacagtcaccttttatgaaatgagtctctgtgttactgggtggcatgactgattgaggtgaagctcacggggccaggctgaccgtcttgaccgttccacttgagataggttggtcatcgtgcagaaggccccaggacctcagcacacacagcctcctcttggtctgagtaggcatcatgtgggggccagatctgcctgctgtttccatgggttacatttactgtgctgtatctcagatgttggtgtctggaagtttattcttaagagactgctacccagctggtctgtattattggaagttgcagttcgtgctttggttggccttctggtctaaagctgtgtcctgaatattagggatcacaattcactgaaatacagcagtgtgtggaggtgatggccagttaatctgctgaactggttttgactaatgacaaacctctttttaagatggtagaatggaggtgatagtcacaaaagtaaatgttccatttttatgaatgactttctacagagtttctatttctaaagaaaaaacaattgttcacatcccatctgatgattagcatgtgtgtaatgaatgctgtcttggtctcccctgtggaaacccttctccctgtgccttagagcaggtgtgtacatctctcactacctttctcatgggtgctgttagattttggcacccgttttctcagcattcagcccagggaatgtggttttcacttcttcgtcagataagaccaacatgaaggggtatgttgagaaacatcctgaggcaaggtgggaggtgggatggggcaggactttcccttccaagcacatgcatggcaggtggggaaaggggggcttgcacccctgctggaaagaaaaggtttgtgtatatttctgatgcaaatgtcatactcactgctctgtaaaggcagctggcagctttttgggaaaagaacgtgctcgtctgttctctggcatcaagtttcttgcagctgctctgagggagagacagtgagctgcaagactgcctccccataacaacaggcaactcagagaagagtcattttatgttgttcctatggaatctggaatgagtgcagagctcctacccacacatgactgccccgccatttcatcctaggcattctgtgaaggagattggttagtccaaacttgctaacatacgaaaattcacttggaacatgatgagagatttcttattgaggccaagagatgtttcctgtcccagaggaaccattaggagtcgcttttagggtattcagctttgttcatgaaataaggcatctctgagaaagtggccccagggagagaatggaggactgggaggagaagcattaactgagctccaagggtgtgtgggcagagagcttgctatgtgaactcactccttaagaaaatggaagagaaaaagagagtgctagttaaaaaatcgggatgttttagtttggatttagggttttgatacttatgttgaaatactaatgtttctgatcaataaaatcaaactcttaatataccgagtaatgaaaccatagtgtgattgcctcagaataaattgagaagtcc

SEQ ID NO: 14743 - DNA, 4291 bp, Homo sapiens
  source 1..4291: mol_type = unassigned DNA
atgccacgcgcttctgcctcaggtgttcctgcgttgtttgtcagtggagagcagggagtggggccagccagcagaaacagtgggctgtacaacatcaccttcaaatatgacaattgtaccacctacttgaatccagtggggaagcatgtgattgctgacgcccagaatatcaccatcagccagtatgcttgccatgaccaagtggcagtcaccattctttggtccccaggggccctcggcatcgaattcctgaaaggatttcgggtaatactggaggagctgaagtcggagggaagacagtgccaacaactgattctaaaggatccgaagcagctcaacagtagcttcaaaagaactggaatggaatctcaacctttcctgaatatgaaatttgaaacggattatttcgtaaaggttgtcccttttccttccattaaaaacgaaagcaattaccaccctttcttctttagaacccgagcctgtgacctgttgttacagccggacaatctagcttgtaaacccttctggaagcctcggaacctgaacatcagccagcatggctcggacatgcaggtgtccttcgaccatgcaccgcacaacttcggcttccgtttcttctatcttcactacaagctcaagcacgaaggacctttcaagcgaaagacctgtaagcaggagcaaactacagagacgaccagctgcctccttcaaaatgtttctccaggggattatataattgagctggtggatgacactaacacaacaagaaaagtgatgcattatgccttaaagccagtgcactccccgtgggccgggcccatcagagccgtggccatcacagtgccactggtagtcatatcggcattcgcgacgctcttcactgtgatgtgccgcaagaagcaacaagaaaatatatattcacatttagatgaagagagctctgagtcttccacatacactgcagcactcccaagagagaggctccggccgcggccgaaggtctttctctgctattccagtaaagatggccagaatcacatgaatgtcgtccagtgtttcgcctacttcctccaggacttctgtggctgtgaggtggctctggacctgtgggaagacttcagcctctgtagagaagggcagagagaatgggtcatccagaagatccacgagtcccagttcatcattgtggtttgttccaaaggtatgaagtactttgtggacaagaagaactacaaacacaaaggaggtggccgaggctcggggaaaggagagctcttcctggtggcggtgtcagccattgccgaaaagctccgccaggccaagcagagttcgtccgcggcgctcagcaagtttatcgccgtctactttgattattcctgcgagggagacgtccccggtatcctagacctgagtaccaagtacagactcatggacaatcttcctcagctctgttcccacttgcactcccgagaccacggcctccaggagccggggcagcacacgcgacagggcagcagaaggaactacttccggagcaagtcaggccggtccctatacgtcgccatttgcaacatgcaccagtttattgacgaggagcccgactggttcgaaaagcagttcgttcccttccatcctcctccactgcgctaccgggagccagtcttggagaaatttgattcgggcttggttttaaatgatgtcatgtgcaaaccagggcctgagagtgacttctgcctaaaggtagaggcggctgttcttggggcaaccggaccagccgactcccagcacgagagtcagcatgggggcctggaccaagacggggaggcccggcctgcccttgacggtagcgccgccctgcaacccctgctgcacacggtgaaagccggcagcccctcggacatgccgcgggactcaggcatctatgactcgtctgtgccctcatccgagctgtctctgccactgatggaaggactctcgacggaccagacagaaacgtcttccctgacggagagcgtgtcctcctcttcaggcctgggtgaggaggaacctcctgcccttccttccaagctcctctcttctgggtcatgcaaagcagatcttggttgccgcagctacactgatgaactccacgcggtcgcccctttgtaacaaaacgaaagagtctaagcattgccactttagctgctgcctccctctgattccccagctcatctccctggttgcatggcccacttggagctgaggtctcatacaaggatatttggagtgaaatgctggccagtacttgttctcccttgccccaaccctttaccggatatcttgacaaactctccaattttctaaaatgatatggagctctgaaaggcatgtccataaggtctgacaacagcttgccaaatttggttagtccttggatcagagcctgttgtgggaggtagggaggaaatatgtaaagaaaaacaggaagatacctgcactaatcattcagacttcattgagctctgcaaactttgcctgtttgctattggctaccttgatttgaaatgctttgtgaaaaaaggcacttttaacatcatagccacagaaatcaagtgccagtctatctggaatccatgttgtattgcagataatgttctcatttatttttgatgtagaatttacattgccatgggtgttaaataagctttgagtcaaaagtcaagaaagtgactgaatatacagtcaccttttatgaaatgagtctctgtgttactgggtggcatgactgattgaggtgaagctcacggggccaggctgaccgtcttgaccgttccacttgagataggttggtcatcgtgcagaaggccccaggacctcagcacacacagcctcctcttggtctgagtaggcatcatgtgggggccagatctgcctgctgtttccatgggttacatttactgtgctgtatctcagatgttggtgtctggaagtttattcttaagagactgctacccagctggtctgtattattggaagttgcagttcgtgctttggttggccttctggtctaaagctgtgtcctgaatattagggatcacaattcactgaaatacagcagtgtgtggaggtgatggccagttaatctgctgaactggttttgactaatgacaaacctctttttaagatggtagaatggaggtgatagtcacaaaagtaaatgttccatttttatgaatgactttctacagagtttctatttctaaagaaaaaacaattgttcacatcccatctgatgattagcatgtgtgtaatgaatgctgtcttggtctcccctgtggaaacccttctccctgtgccttagagcaggtgtgtacatctctcactacctttctcatgggtgctgttagattttggcacccgttttctcagcattcagcccagggaatgtggttttcacttcttcgtcagataagaccaacatgaaggggtatgttgagaaacatcctgaggcaaggtgggaggtgggatggggcaggactttcccttccaagcacatgcatggcaggtggggaaaggggggcttgcacccctgctggaaagaaaaggtttgtgtatatttctgatgcaaatgtcatactcactgctctgtaaaggcagctggcagctttttgggaaaagaacgtgctcgtctgttctctggcatcaagtttcttgcagctgctctgagggagagacagtgagctgcaagactgcctccccataacaacaggcaactcagagaagagtcattttatgttgttcctatggaatctggaatgagtgcagagctcctacccacacatgactgccccgccatttcatcctaggcattctgtgaaggagattggttagtccaaacttgctaacatacgaaaattcacttggaacatgatgagagatttcttattgaggccaagagatgtttcctgtcccagaggaaccattaggagtcgcttttagggtattcagctttgttcatgaaataaggcatctctgagaaagtggccccagggagagaatggaggactgggaggagaagcattaactgagctccaagggtgtgtgggcagagagcttgctatgtgaactcactccttaagaaaatggaagagaaaaagagagtgctagttaaaaaatcgggatgttttagtttggatttagggttttgatacttatgttgaaatactaatgtttctgatcaataaaatcaaactcttaatataccgagtaatgaaaccatagtgtgattgcctcagaataaattgagaagtcc

SEQ ID NO: 14744 - DNA, 2348 bp, Homo sapiens
  source 1..2348: mol_type = unassigned DNA
gcctcaggtgttcctgcgttgtttgtcagtggagagcagggagtggggccagccagcagaaacagtgggctgtacaacatcaccttcaaatatgacaattgtaccacctacttgaatccagtggggaagcatgtgattgctgacgcccagaatatcaccatcagccagtatgcttgccatgaccaagtggcagtcaccattctttggtccccaggggccctcggcatcgaattcctgaaaggatttcgggtaatactggaggagctgaagtcggagggaagacagtgccaacaactgattctaaaggatccgaagcagctcaacagtagcttcaaaagaactggaatggaatctcaacctttcctgaatatgaaatttgaaacggattatttcgtaaaggttgtcccttttccttccattaaaaacgaaagcaattaccaccctttcttctttagaacccgagcctgtgacctgttgttacagccggacaatctagcttgtaaacccttctggaagcctcggaacctgaacatcagccagcatggctcggacatgcaggtgtccttcgaccatgcaccgcacaacttcggcttccgtttcttctatcttcactacaagctcaagcacgaaggacctttcaagcgaaagacctgtaagcaggagcaaactacagagacgaccagctgcctccttcaaaatgtttctccaggggattatataattgagctggtggatgacactaacacaacaagaaaagtgatgcattatgccttaaagccagtgcactccccgtgggccgggcccatcagagccgtggccatcacagtgccactggtagtcatatcggcattcgcgacgctcttcactgtgatgtgccgcaagaagcaacaagaaaatatatattcacatttagatgaagagagctctgagtcttccacatacactgcagcactcccaagagagaggctccggccgcggccgaaggtctttctctgctattccagtaaagatggccagaatcacatgaatgtcgtccagtgtttcgcctacttcctccaggacttctgtggctgtgaggtggctctggacctgtgggaagacttcagcctctgtagagaagggcagagagaatgggtcatccagaagatccacgagtcccagttcatcattgtggtttgttccaaaggtatgaagtactttgtggacaagaagaactacaaacacaaaggaggtggccgaggctcggggaaaggagagctcttcctggtggcggtgtcagccattgccgaaaagctccgccaggccaagcagagttcgtccgcggcgctcagcaagtttatcgccgtctactttgattattcctgcgagggagacgtccccggtatcctagacctgagtaccaagtacagactcatggacaatcttcctcagctctgttcccacttgcactcccgagaccacggcctccaggagccggggcagcacacgcgacagggcagcagaaggaactacttccggagcaagtcaggccggtccctatacgtcgccatttgcaacatgcaccagtttattgacgaggagcccgactggttcgaaaagcagttcgttcccttccatcctcctccactgcgctaccgggagccagtcttggagaaatttgattcgggcttggttttaaatgatgtcatgtgcaaaccagggcctgagagtgacttctgcctaaaggtagaggcggctgttcttggggcaaccggaccagccgactcccagcacgagagtcagcatgggggcctggaccaagacggggaggcccggcctgcccttgacggtagcgccgccctgcaacccctgctgcacacggtgaaagccggcagcccctcggacatgccgcgggactcaggcatctatgactcgtctgtgccctcatccgagctgtctctgccactgatggaaggactctcgacggaccagacagaaacgtcttccctgacggagagcgtgtcctcctcttcaggcctgggtgaggaggaacctcctgcccttccttccaagctcctctcttctgggtcatgcaaagcagatcttggttgccgcagctacactgatgaactccacgcggtcgcccctttgtaacaaaacgaaagagtctaagcattgccactttagctgctgcctccctctgattccccagctcatctccctggttgcatggcccacttggagctgaggtctcatacaaggatatttggagtgaaatgctggccagtacttgttctcccttgccccaaccctttaccggatatcttgacaaactctccaattttctaaaatgatatggagctctgaaa

SEQ ID NO: 14745 - DNA, 589 bp, Homo sapiens
  source 1..589: mol_type = unassigned DNA
ttttcctccgggaaaagaaacgggaagtggccgtgggccggtgaattccgtgtagtggccaagggagtggggccagccagcagaaacagtgggctgtacaacatcaccttcaaatatgacaattgtaccacctacttgaatccagtggggaagcatgtgattgctgacgcccagaatatcaccatcagccagtatgcttgccatgaccaagtggcagtcaccattctttggtccccaggggccctcggcatcgaattcctgaaaggatttcgggtaatactggaggagctgaagtcggagggaagacagtgccaacaactgattctaaaggatccgaagcagctcaacagtagcttcaaaagaactggaatggaatctcaacctttcctgaatatgaaatttgaaacggattatttcgtaaaggttgtcccttttccttccattaaaaacgaaagcaattaccaccctttcttctttagaacccgagcctgtgacctgttgttacagccggacaatctagcttgtaaacccttctggaagcctcggaacctgaacatcagccagcatggctcggacatgcaggtgtcct

SEQ ID NO: 14746 - DNA, 3522 bp, Homo sapiens
  source 1..3522: mol_type = unassigned DNA
gccatttgaagcagaatccaaaccatgaattgtagagaattacccttgaccctttgggtgcttatatctgtaagcactgcagaatcttgtacttcacgtccccacattactgtggttgaaggggaacctttctatctgaaacattgctcgtgttcacttgcacatgagattgaaacaaccaccaaaagctggtacaaaagcagtggatcacaggaacatgtggagctgaacccaaggagttcctcgagaattgctttgcatgattgtgttttggagttttggccagttgagttgaatgacacaggatcttactttttccaaatgaaaaattatactcagaaatggaaattaaatgtcatcagaagaaataaacacagctgtttcactgaaagacaagtaactagtaaaattgtggaagttaaaaaattttttcagataacctgtgaaaacagttactatcaaacactggtcaacagcacatcattgtataagaactgtaaaaagctactactggagaacaataaaaacccaacgataaagaagaacgccgagtttgaagatcaggggtattactcctgcgtgcatttccttcatcataatggaaaactatttaatatcaccaaaaccttcaatataacaatagtggaagatcgcagtaatatagttccggttcttcttggaccaaagcttaaccatgttgcagtggaattaggaaaaaacgtaaggctcaactgctctgctttgctgaatgaagaggatgtaatttattggatgttcggggaagaaaatggatcggatcctaatatacatgaagagaaagaaatgagaattatgactccagaaggcaaatggcatgcttcaaaagtattgagaattgaaaatattggtgaaagcaatctaaatgttttatataattgcactgtggccagcacgggaggcacagacaccaaaagcttcatcttggtgagaaaagcagacatggctgatatcccaggccacgtcttcacaagaggaatgatcatagctgttttgatcttggtggcagtagtgtgcctagtgactgtgtgtgtcatttatagagttgacttggttctattttatagacatttaacgagaagagatgaaacattaacagatggaaaaacatatgatgcttttgtgtcttacctaaaagaatgccgacctgaaaatggagaggagcacacctttgctgtggagattttgcccagggtgttggagaaacattttgggtataagttatgcatatttgaaagggatgtagtgcctggaggagctgttgttgatgaaatccactcactgatagagaaaagccgaagactaatcattgtcctaagtaaaagttatatgtctaatgaggtcaggtatgaacttgaaagtggactccatgaagcattggtggaaagaaaaattaaaataatcttaattgaatttacacctgttactgacttcacattcttgccccaatcactaaagcttttgaaatctcacagagttctgaagtggaaggccgataaatctctttcttataactcaaggttctggaagaaccttctttacttaatgcctgcaaaaacagtcaagccaggtagagacgaaccggaagtcttgcctgttctttccgagtcttaatcttcagaaacagtgaacgccaaaaagaactcaagatattctggggactgagcatatgaacctgttcataacaaaggctgtgactcgaaataattaactttgtcaaaatcctgctcacaatttgaagatgaaacttgtcattaggttggcgggaatgagactaaagattgcgctgtgggctgtggtcacgtgctcccagaagacctggaattcaaaagaaatggagctattctttttctccctctttcataactggatgcagctgctcatactcaatcccatattcagcaagtgtgaagctggacgtgatgcaaaataaccgatgccctacaaaaagggcgcatctttaagagttttaatgccagtgcttaattcgaatgaggggattttaagtgtctgaagaggcattttctagggaccagtgggtgactgagtaactgaaatgctgctttcactccctaacaccatggatctggttgtgcataggatgtgggaggaggggctggcagggccgccttcagaggctgcagggcctcagcctcaggatgcatttaatgtatcctggccacagttgcagccaacggttcttgaaagctcggtaaggccctgcaacgcagagcctgcttatgtggatctatttatgggaacttcttaaaaggaccccagaatagctctttatctttcacaagagacacaaattctaattgagttaattatctgggcctttcactttggatgctctgaaacatttgttgattttgtgtgaatgtttatatcaaaatgtttgccaggttgtattagccattgaatagcaaaaaactgatagttacttgcttgttttttaaaaattacatattaaaaatgcccttggcataaggcagcatggtgtggcagttaagagatgggctgtgcagcccatcctgagctccagtcctgagtttgctacttacttctgtggcctctggaaccttatccaacctcttggtgcttcagtttcctcatctgtgaaattagaatttataataattgcacctacctcccaggggtaactaaatgaataaatataataaagtacttacagtggttcctgacacagactcagcactccgtcagtgttgccatgactatttttattatcattattaatgattacttagatcaattatttagcagtggactaatggaagctacagagcagggaagggaagcagatctagggaggaaggcagttttgatttgaggaggtttgcacatgtagagaagcatactggagaagcatatccagagggcgaaagatatctctccattgtgcatctgcctcttttgacgttggaagacacatgtcttaccccccaaagggagcccagcactgggagccttcttgatgatctcaaaaataatagctattcaagaaaatcaccaagtgactgtgaaaccgtcagttcggaaggctggttagaacatgtgggagcaacatgaatgttctacaaaagtttaaagcagagattgtttcaaatgggtgtagtagatattactgaaaaccaaaaaagagtgagattgtcagtgtaagaatgtgatttaatgtttgtagtgcttacaattttgtgtaccaactggatgactaaaaagagtaaaataatttaattaatagctcatattttatgtgtgaaaacatgttagtgaacatatataatcaaaatagatttcattgctattgcatagtctctaatacatagaatgattttgcttttctcttttattatacttgctttaaaatacttgaaatatattttgcattaaatgcatttcaagttaaatgtcttaaatgtatacattagatgtgtgttttaaaatgcataaaacacgttgaaa

SEQ ID NO: 14747 - DNA, 513 bp, Homo sapiens
  source 1..513: mol_type = unassigned DNA
atgaattgtagagaattacccttgaccctttgggtgcttatatctgtaagcactgcagaatcttgtacttcacgtccccacattactgtggttgaaggggaacctttctatctgaaacattgctcgtgttcacttgcacatgagattgaaacaaccaccaaaagctggtacaaaagcagtggatcacaggaacatgtggagctgaacccaaggagttcctcgagaattgctttgcatgattgtgttttggagttttggccagttgagttgaatgacacaggatcttactttttccaaatgaaaaattatactcagaaatggaaattaaatgtcatcagaagaaataaacacagctgtttcactgaaagacaagtaactagtaaaattgtggaagttaaaaaattttttcagataacctgtgaaaacagttactatcaaacactggtcaacagcacatcattgtataagataggaccacctatttgcaggaaaacaagctcagggctccactga

SEQ ID NO: 14748 - DNA, 3854 bp, Homo sapiens
  source 1..3854: mol_type = unassigned DNA
acgcggggcgtctgggtggaggagccggtcctggagcacggctgcgaggagcacccggaccggagggtccccagaccgggacctccgagtcagggaggattctacgccagggagcgccccagactgagagcgccccagaccgctacactcccggacccggagcttcgcccgaccgcgggcagtgcccacctgcagcctccaccggccgggtcaggaggcggagatcgctgcttctcacctactttctgaacttggcctccgcagtcgcgacctggcgtgaaggaggagctgccgcccccgccccagcctcggggacgcctctctgaagagaagccatttgaagcagaatccaaaccatgaattgtagagaattacccttgaccctttgggtgcttatatctgtaagcactgcagaatcttgtacttcacgtccccacattactgtggttgaaggggaacctttctatctgaaacattgctcgtgttcacttgcacatgagattgaaacaaccaccaaaagctggtacaaaagcagtggatcacaggaacatgtggagctgaacccaaggagttcctcgagaattgctttgcatgattgtgttttggagttttggccagttgagttgaatgacacaggatcttactttttccaaatgaaaaattatactcagaaatggaaattaaatgtcatcagaagaaataaacacagctgtttcactgaaagacaagtaactagtaaaattgtggaagttaaaaaattttttcagataacctgtgaaaacagttactatcaaacactggtcaacagcacatcattgtataagaactgtaaaaagctactactggagaacaataaaaacccaacgataaagaagaacgccgagtttgaagatcaggggtattactcctgcgtgcatttccttcatcataatggaaaactatttaatatcaccaaaaccttcaatataacaatagtggaagatcgcagtaatatagttccggttcttcttggaccaaagcttaaccatgttgcagtggaattaggaaaaaacgtaaggctcaactgctctgctttgctgaatgaagaggatgtaatttattggatgttcggggaagaaaatggatcggatcctaatatacatgaagagaaagaaatgagaattatgactccagaaggcaaatggcatgcttcaaaagtattgagaattgaaaatattggtgaaagcaatctaaatgttttatataattgcactgtggccagcacgggaggcacagacaccaaaagcttcatcttggtgagaaaagcagacatggctgatatcccaggccacgtcttcacaagaggaatgatcatagctgttttgatcttggtggcagtagtgtgcctagtgactgtgtgtgtcatttatagagttgacttggttctattttatagacatttaacgagaagagatgaaacattaacagatggaaaaacatatgatgcttttgtgtcttacctaaaagaatgccgacctgaaaatggagaggagcacacctttgctgtggagattttgcccagggtgttggagaaacattttgggtataagttatgcatatttgaaagggatgtagtgcctggaggagctgttgttgatgaaatccactcactgatagagaaaagccgaagactaatcattgtcctaagtaaaagttatatgtctaatgaggtcaggtatgaacttgaaagtggactccatgaagcattggtggaaagaaaaattaaaataatcttaattgaatttacacctgttactgacttcacattcttgccccaatcactaaagcttttgaaatctcacagagttctgaagtggaaggccgataaatctctttcttataactcaaggttctggaagaaccttctttacttaatgcctgcaaaaacagtcaagccaggtagagacgaaccggaagtcttgcctgttctttccgagtcttaatcttcagaaacagtgaacgccaaaaagaactcaagatattctggggactgagcatatgaacctgttcataacaaaggctgtgactcgaaataattaactttgtcaaaatcctgctcacaatttgaagatgaaacttgtcattaggttggcgggaatgagactaaagattgcgctgtgggctgtggtcacgtgctcccagaagacctggaattcaaaagaaatggagctattctttttctccctctttcataactggatgcagctgctcatactcaatcccatattcagcaagtgtgaagctggacgtgatgcaaaataaccgatgccctacaaaaagggcgcatctttaagagttttaatgccagtgcttaattcgaatgaggggattttaagtgtctgaagaggcattttctagggaccagtgggtgactgagtaactgaaatgctgctttcactccctaacaccatggatctggttgtgcataggatgtgggaggaggggctggcagggccgccttcagaggctgcagggcctcagcctcaggatgcatttaatgtatcctggccacagttgcagccaacggttcttgaaagctcggtaaggccctgcaacgcagagcctgcttatgtggatctatttatgggaacttcttaaaaggaccccagaatagctctttatctttcacaagagacacaaattctaattgagttaattatctgggcctttcactttggatgctctgaaacatttgttgattttgtgtgaatgtttatatcaaaatgtttgccaggttgtattagccattgaatagcaaaaaactgatagttacttgcttgttttttaaaaattacatattaaaaatgcccttggcataaggcagcatggtgtggcagttaagagatgggctgtgcagcccatcctgagctccagtcctgagtttgctacttacttctgtggcctctggaaccttatccaacctcttggtgcttcagtttcctcatctgtgaaattagaatttataataattgcacctacctcccaggggtaactaaatgaataaatataataaagtacttacagtggttcctgacacagactcagcactccgtcagtgttgccatgactatttttattatcattattaatgattacttagatcaattatttagcagtggactaatggaagctacagagcagggaagggaagcagatctagggaggaaggcagttttgatttgaggaggtttgcacatgtagagaagcatactggagaagcatatccagagggcgaaagatatctctccattgtgcatctgcctcttttgacgttggaagacacatgtcttaccccccaaagggagcccagcactgggagccttcttgatgatctcaaaaataatagctattcaagaaaatcaccaagtgactgtgaaaccgtcagttcggaaggctggttagaacatgtgggagcaacatgaatgttctacaaaagtttaaagcagagattgtttcaaatgggtgtagtagatattactgaaaaccaaaaaagagtgagattgtcagtgtaagaatgtgatttaatgtttgtagtgcttacaattttgtgtaccaactggatgactaaaaagagtaaaataatttaattaatagctcatattttatgtgtgaaaacatgttagtgaacatatataatcaaaatagatttcattgctattgcatagtctctaatacatagaatgattttgcttttctcttttattatacttgctttaaaatacttgaaatatattttgcattaaatgcatttcaagttaaatgtcttaaatgtatacattagatgtgtgttttaaaatgcataaaacacgttgaaa

SEQ ID NO: 14749 - DNA, 1749 bp, Homo sapiens
  source 1..1749: mol_type = unassigned DNA
aaagctataaagctgtaagagaaattggctttctgagttgtgaaactgtgggcagaaagttgaggaagaaagaactcaagtacaacccaatgaggagaagccatttgaagcagaatccaaaccatgaattgtagagaattacccttgaccctttgggtgcttatatctgtaagcactgcagaatcttgtacttcacgtccccacattactgtggttgaaggggaacctttctatctgaaacattgctcgtgttcacttgcacatgagattgaaacaaccaccaaaagctggtacaaaagcagtggatcacaggaacatgtggagctgaacccaaggagttcctcgagaattgctttgcatgattgtgttttggagttttggccagttgagttgaatgacacaggatcttactttttccaaatgaaaaattatactcagaaatggaaattaaatgtcatcagaagaaataaacacagctgtttcactgaaagacaagtaactagtaaaattgtggaagttaaaaaattttttcagataacctgtgaaaacagttactatcaaacactggtcaacagcacatcattgtataagaactgtaaaaagctactactggagaacaataaaaacccaacgataaagaagaacgccgagtttgaagatcaggggtattactcctgcgtgcatttccttcatcataatggaaaactatttaatatcaccaaaaccttcaatataacaatagtggaagatcgcagtaatatagttccggttcttcttggaccaaagcttaaccatgttgcagtggaattaggaaaaaacgtaaggctcaactgctctgctttgctgaatgaagaggatgtaatttattggatgttcggggaagaaaatggatcggatcctaatatacatgaagagaaagaaatgagaattatgactccagaaggcaaatggcatgcttcaaaagtattgagaattgaaaatattggtgaaagcaatctaaatgttttatataattgcactgtggccagcacgggaggcacagacaccaaaagcttcatcttggtgagaaaagcagacatggctgatatcccaggccacgtcttcacaagaggaatgatcatagctgttttgatcttggtggcagtagtgtgcctagtgactgtgtgtgtcatttatagagttgacttggttctattttatagacatttaacgagaagagatgaaacattaacagatggaaaaacatatgatgcttttgtgtcttacctaaaagaatgccgacctgaaaatggagaggagcacacctttgctgtggagattttgcccagggtgttggagaaacattttgggtataagttatgcatatttgaaagggatgtagtgcctggaggagctgttgttgatgaaatccactcactgatagagaaaagccgaagactaatcattgtcctaagtaaaagttatatgtctaatgaggtcaggtatgaacttgaaagtggactccatgaagcattggtggaaagaaaaattaaaataatcttaattgaatttacacctgttactgacttcacattcttgccccaatcactaaagcttttgaaatctcacagagttctgaagtggaaggccgataaatctctttcttataactcaaggttctggaagaaccttctttacttaatgcctgcaaaaacagtcaagccaggtagagacgaaccggaagtcttgcctgttctttccgagtcttaa

SEQ ID NO: 14750 - DNA, 2773 bp, Homo sapiens
  source 1..2773: mol_type = unassigned DNA
acaatgtccatggtcatttacaaaataaggttttcctttttcctccagttataatcctttatttttgagctggtgtaacgtggctattgtgtcttctccaggtatctctctggataggaagaaatatagtagaaccctttgaaaatggatattttcacatattttcgttcagatacaaaagctggcagttactgaaataaggacttgaagttccttcctcttttttttatgtcttaagagcaggaaataaagagacagctgaaggtgtagccttgaccaactgaaagggaaatcttcatcctctgaaaaaacatatgtgattctcaaaaaacgcatctggaaaattgataaagaagcgattctgtagattctcccagcgctgttgggctctcaattccttctgtgaaggacaacatatggtgatggggaaatcagaagctttgagaccctctacacctggatatgaatcccccttctaatacttaccagaaatgaaggggatactcagggcagagttctgaatctcaaaacactctactctggcaaaggaatgaagttattggagtgatgacaggaacacgggagaacaatgctctgtttgggctggatatttctttggcttgttgcaggagagcgaattaaaggatttaatatttcaggttgttccacaaaaaaactcctttggacatattctacaaggagtgaagaggaatttgtcttattttgtgatttaccagagccacagaaatcacatttctgccacagaaatcgactctcaccaaaacaagtccctgagcacctgcccttcatgggtagtaacgacctatctgatgtccaatggtaccaacaaccttcgaatggagatccattagaggacattaggaaaagctatcctcacatcattcaggacaaatgtacccttcactttttgaccccaggggtgaataattctgggtcatatatttgtagacccaagatgattaagagcccctatgatgtagcctgttgtgtcaagatgattttagaagttaagccccagacaaatgcatcctgtgagtattccgcatcacataagcaagacctacttcttgggagcactggctctatttcttgccccagtctcagctgccaaagtgatgcacaaagtccagcggtaacctggtacaagaatggaaaactcctctctgtggaaaggagcaaccgaatcgtagtggatgaagtttatgactatcaccagggcacatatgtatgtgattacactcagtcggatactgtgagttcgtggacagtcagagctgttgttcaagtgagaaccattgtgggagacactaaactcaaaccagatattctggatcctgtcgaggacacactggaagtagaacttggaaagcctttaactattagctgcaaagcacgatttggctttgaaagggtctttaaccctgtcataaaatggtacatcaaagattctgacctagagtgggaagtctcagtacctgaggcgaaaagtattaaatccactttaaaggatgaaatcattgagcgtaatatcatcttggaaaaagtcactcagcgtgatcttcgcaggaagtttgtttgctttgtccagaactccattggaaacacaacccagtccgtccaactgaaagaaaagagaggagtggtgctcctgtacatcctgcttggcaccatcgggaccctggtggccgtgctggcggcgagtgccctcctctacaggcactggattgaaatagtgctgctgtaccggacctaccagagcaaggatcagacgcttggggataaaaaggattttgatgctttcgtatcctatgcaaaatggagctcttttccaagtgaggccacttcatctctgagtgaagaacacttggccctgagcctatttcctgatgttttagaaaacaaatatggatatagcctgtgtttgcttgaaagagatgtggctccaggaggagtgtatgcagaagacattgtgagcattattaagagaagcagaagaggaatatttatcttgagccccaactatgtcaatggacccagtatctttgaactacaagcagcagtgaatcttgccttggatgatcaaacactgaaactcattttaattaagttctgttacttccaagagccagagtctctacctcatctcgtgaaaaaagctctcagggttttgcccacagttacttggagaggcttaaaatcagttcctcccaattctaggttctgggccaaaatgcgctaccacatgcctgtgaaaaactctcagggattcacgtggaaccagctcagaattacctctaggatttttcagtggaaaggactcagtagaacagaaaccactgggaggagctcccagcctaaggaatggtgaaatgagccctggagccccctccagtccagtccctgggatagagatgttgctggacagaactcacagctctgtgtgtgtgtgttcaggctgataggaaattcaaagagtctcctgccagcaccaagcaagcttgatggacaatggagtgggattgagactgtggtttagagcctttgatttcctggactggactgacggcgagtgaattctctagaccttgggtactttcagtacacaacacccctaagatttcccagtggtccgagcagaatcagaaaatacagctacttctgccttatggctagggaactgtcatgtctaccatgtattgtacatatgactttatgtatacttgcaatcaaataaatattattttattagaaa

SEQ ID NO: 14751 - DNA, 1890 bp, Homo sapiens
  source 1..1890: mol_type = unassigned DNA
cgctgttgggctctcaattccttctgtgaaggacaacatatggtgatggggaaatcagaagctttgagaccctctacacctggatatgaatcccccttctaatacttaccagaaatgaaggggatactcagggcagagttctgaatctcaaaacactctactctggcaaaggaatgaagttattggagtgatgacaggaacacgggagaacaatgctctgtttgggctggatatttctttggcttgttgcaggagagcgaattaaaggatttaatatttcaggagcccctatgatgtagcctgttgtgtcaagatgattttagaagttaagccccagacaaatgcatcctgtgagtattccgcatcacataagcaagacctacttcttgggagcactggctctatttcttgccccagtctcagctgccaaagtgatgcacaaagtccagcggtaacctggtacaagaatggaaaactcctctctgtggaaaggagcaaccgaatcgtagtggatgaagtttatgactatcaccagggcacatatgtatgtgattacactcagtcggatactgtgagttcgtggacagtcagagctgttgttcaagtgagaaccattgtgggagacactaaactcaaaccagatattctggatcctgtcgaggacacactggaagtagaacttggaaagcctttaactattagctgcaaagcacgatttggctttgaaagggtctttaaccctgtcataaaatggtacatcaaagattctgacctagagtgggaagtctcagtacctgaggcgaaaagtattaaatccactttaaaggatgaaatcattgagcgtaatatcatcttggaaaaagtcactcagcgtgatcttcgcaggaagtttgtttgctttgtccagaactccattggaaacacaacccagtccgtccaactgaaagaaaagagaggagtggtgctcctgtacatcctgcttggcaccatcgggaccctggtggccgtgctggcggcgagtgccctcctctacaggcactggattgaaatagtgctgctgtaccggacctaccagagcaaggatcagacgcttggggataaaaaggattttgatgctttcgtatcctatgcaaaatggagctcttttccaagtgaggccacttcatctctgagtgaagaacacttggccctgagcctatttcctgatgttttagaaaacaaatatggatatagcctgtgtttgcttgaaagagatgtggctccaggaggagtgtatgcagaagacattgtgagcattattaagagaagcagaagaggaatatttatcttgagccccaactatgtcaatggacccagtatctttgaactacaagcagcagtgaatcttgccttggatgatcaaacactgaaactcattttaattaagttctgttacttccaagagccagagtctctacctcatctcgtgaaaaaagctctcagggttttgcccacagttacttggagaggcttaaaatcagttcctcccaattctaggttctgggccaaaatgcgctaccacatgcctgtgaaaaactctcagggattcacgtggaaccagctcagaattacctctaggatttttcagtggaaaggactcagtagaacagaaaccactgggaggagctcccagcctaaggaatggtgaaatgagccctggagccccctccagtccagtccctgggatagagatgttgctggacagaactcacagctctgtgtgtgtgtgttcaggctgataggaaattcaaagagtctcctgccagcaccaagcaagcttgatggacaatggagtgggattgagactgtggtttagagcctttgatttcctggactggactgacggcgagt

SEQ ID NO: 14752 - DNA, 587 bp, Homo sapiens
  source 1..587: mol_type = unassigned DNA
tctctccctgggtctcagatccctgttgacactgctttctccagcactttcctctctctcccccgtttctcaccaaaaagttttgtgggtaaagtttagttcattatttctgccagagacagctgaaggtgtagccttgaccaactgaaagggaaatcttcatcctctgaaaaaacatatgtgattctcaaaaaacgcatctggaaaattgataaagaagcgattctgtagattctcccagcgctgttgggctctcaattccttctgtgaaggacaacatatggtgatggggaaatcagaagctttgagaccctctacacctggatatgaatcccccttctaatacttaccagaaatgaaggggatactcagggcagagttctgaatctcaaaacactctactctggcaaaggaatgaagttattggagtgatgacaggaacacgggagaacaatgctctgtttgggctggatatttctttggcttgttgcaggagagcgaattaaaggatttaatatttcaggttgttccacaaaaaaactcctttggacatattctacaaggagtgaagaggaatttgtcttatt

SEQ ID NO: 14753 - DNA, 1473 bp, Homo sapiens
  source 1..1473: mol_type = unassigned DNA
gctggagtgcaatggtgaaattatagcagactgcagtcttcaactcctgacctcaagcaattgtcctgcctcctcaacttcctgactacaggtgtgcatgaggactacaggcaggcatgtgccaacacatgcagctttttttttttttttttttcagagatgtggtctcgctttgttgcctacactggtctcaaactcttggcctcaagggatcctcccacctcggcttcccaaagtgcagagattacagtctcattttctctctctctgcattaatcaagaatgagagaaccctccaggggacaagatgaaggggaaatagatgatgtgcaaagaaatccttgctttatgaggggaaaaagtgttcctcatgaagttcaacaaaatgatgcaggtaaagcagttagctagcacctggcacatggcagacactcatagctgcctaaggcattggagaactggatcgtgctgcagccagaggcacctgcagagcctcatgggctggctgctgcagggtgtggctgattgagagtgcttttgtgagttggcctgcagggtacacttggtaacgtgccacagctctcaggaaagtgacctaagttggatttttctgcatggacatagaattgcaaaaaattctcatttgcatggagatggggagtttatttttcctagaagctgcatgtcaagacccagaagaaagaggcatttcataataatgattaatcagctatatcttaaagaagaaagaaaacaattaaggaaatacaatactaagaaaacaaggggaaaaaacaatctccccaaggtggatccacccagcaaaccttgacagcatttcctcttatccacctgaataaaaatgaccagccctttccaaatggcagagagcactgagaggagacacaaggagcagcccgcaagcaccaagtgagaggcatgaagttacagtgtgtttccctttggctcctgggtacaatactgatattgtgctcagtagacaaccacggtctcaggagatgtctgatttccacagacatgcaccatatagaagagagtttccaagaaatcaaaagagccatccaagctaaggacaccttcccaaatgtcactatcctgtccacattggagactctgcagatcattaagcccttagatgtgtgctgcgtgaccaagaacctcctggcgttctacgtggacagggtgttcaaggatcatcaggagccaaaccccaaaatcttgagaaaaatcagcagcattgccaactctttcctctacatgcagaaaactctgcggcaatgtcaggaacagaggcagtgtcactgcaggcaggaagccaccaatgccaccagagtcatccatgacaactatgatcagctggaggtccacgctgctgccattaaatccctgggagagctcgacgtctttctagcctggattaataagaatcatgaagtaatgttctcagcttga

SEQ ID NO: 14754 - DNA, 1030 bp, Homo sapiens
  source 1..1030: mol_type = unassigned DNA
tgcacacactgacaggagtccaagaatgtgcactgagggagcgtttccgcacagatctgcgtgttccttaccactcacacatgtgcacacacatatccatgtgtgtgtgccagtgctttggggctctgttccacggggcatgaagttacagtgtgtttccctttggctcctgggtacaatactgatattgtgctcagtagacaaccacggtctcaggagatgtctgatttccacagacatgcaccatatagaagagagtttccaagaaatcaaaagagccatccaagctaaggacaccttcccaaatgtcactatcctgtccacattggagactctgcagatcattaagcccttagatgtgtgctgcgtgaccaagaacctcctggcgttctacgtggacagggtgttcaaggatcatcaggagccaaaccccaaaatcttgagaaaaatcagcagcattgccaactctttcctctacatgcagaaaactctgcggcaatgtcaggaacagaggcagtgtcactgcaggcaggaagccaccaatgccaccagagtcatccatgacaactatgatcagctggaggtccacgctgctgccattaaatccctgggagagctcgacgtctttctagcctggattaataagaatcatgaagtaatgttctcagcttgatgacaaggaacctgtatagtgatccagggatgaacaccccctgtgcggtttactgtgggagacagcccaccttgaaggggaaggagatggggaaggccccttgcagctgaaagtcccactggctggcctcaggctgtcttattccgcttgaaaatagccaaaaagtctactgtggtatttgtaataaactctatctgctgaaagggcctgcaggccatcctgggagtaaagggctgccttcccatctaatttattgtaaagtcatatagtccatgtctgtgatgtgagccaagtgatatcctgtagtacacattgtactgagtggtttttctgaataaattccatattttacctatg

SEQ ID NO: 14755 - DNA, 1006 bp, Homo sapiens
  source 1..1006: mol_type = unassigned DNA
aagggtgacagcccaggcggaccgatcttcccatcccacatcctccggcgcgatgccaaaaagaggctgacggcaactgggccttctgcagagaaagacctccgcttcactgccccggctggtcccaagggtcaggaagatggattcatacctgctgatgtggggactgctcacgttcatcatggtgcctggctgccaggcagagctctgtgacgatgacccgccagagatcccacacgccacattcaaagccatggcctacaaggaaggaaccatgttgaactgtgaatgcaagagaggtttccgcagaataaaaagcgggtcactctatatgctctgtacaggaaactctagccactcgtcctgggacaaccaatgtcaatgcacaagctctgccactcggaacacaacgaaacaagtgacacctcaacctgaagaacagaaagaaaggaaaaccacagaaatgcaaagtccaatgcagccagtggaccaagcgagccttccaggtcactgcagggaacctccaccatgggaaaatgaagccacagagagaatttatcatttcgtggtggggcagatggtttattatcagtgcgtccagggatacagggctctacacagaggtcctgctgagagcgtctgcaaaatgacccacgggaagacaaggtggacccagccccagctcatatgcacaggtgaagagaagcctcaggcaagccccgaaggccgtcctgagagtgagacttcctgcctcgtcacaacaacagattttcaaatacagacagaaatggctgcaaccatggagacgtccatatttacaacagagtaccaggtagcagtggccggctgtgttttcctgctgatcagcgtcctcctcctgagtgggctcacctggcagcggagacagaggaagagtagaagaacaatctagaaaaccaaaagaacaagaatttcttggtaagaagccgggaacagacaacagaagtcatgaagcccaagtgaaatc

SEQ ID NO: 14756 - DNA, 1562 bp, Homo sapiens
  source 1..1562: mol_type = unassigned DNA
agagactggatggacccacaagggtgacagcccaggcggaccgatcttcccatcccacatcctccggcgcgatgccaaaaagaggctgacggcaactgggccttctgcagagaaagacctccgcttcactgccccggctggtcccaagggtcaggaagatggattcatacctgctgatgtggggactgctcacgttcatcatggtgcctggctgccaggcagagctctgtgacgatgacccgccagagatcccacacgccacattcaaagccatggcctacaaggaaggaaccatgttgaactgtgaatgcaagagaggtttccgcagaataaaaagcgggtcactctatatgctctgtacaggaaactctagccactcgtcctgggacaaccaatgtcaatgcacaagctctgccactcggaacacaacgaaacaagtgacacctcaacctgaagaacagaaagaaaggaaaaccacagaaatgcaaagtccaatgcagccagtggaccaagcgagccttccaggtgaagagaagcctcaggcaagccccgaaggccgtcctgagagtgagacttcctgcctcgtcacaacaacagattttcaaatacagacagaaatggctgcaaccatggagacgtccatatttacaacagagtaccaggtagcagtggccggctgtgttttcctgctgatcagcgtcctcctcctgagtgggctcacctggcagcggagacagaggaagagtagaagaacaatctagaaaaccaaaagaacaagaatttcttggtaagaagccgggaacagacaacagaagtcatgaagcccaagtgaaatcaaaggtgctaaatggtcgcccaggagacatccgttgtgcttgcctgcgttttggaagctctgaagtcacatcacaggacacggggcagtggcaaccttgtctctatgccagctcagtcccatcagagagcgagcgctacccacttctaaatagcaatttcgccgttgaagaggaagggcaaaaccactagaactctccatcttattttcatgtatatgtgttcattaaagcatgaatggtatggaactctctccaccctatatgtagtataaagaaaagtaggtttacattcatctcattccaacttcccagttcaggagtcccaaggaaagccccagcactaacgtaaatacacaacacacacactctaccctatacaactggacattgtctgcgtggttcctttctcagccgcttctgactgctgattctcccgttcacgttgcctaataaacatccttcaagaactctgggctgctacccagaaatcattttacccttggctcaatcctctaagctaacccccttctactgagccttcagtcttgaatttctaaaaaacagaggccatggcagaataatctttgggtaacttcaaaacggggcagccaaacccatgaggcaatgtcaggaacagaaggatgaatgaggtcccaggcagagaatcatacttagcaaagttttacctgtgcgttactaattggcctctttaagagttagtttctt

SEQ ID NO: 14757 - DNA, 3176 bp, Homo sapiens
  source 1..3176: mol_type = unassigned DNA
aactcctgactccgatagagactggatggacccacaagggtgacagcccaggcggaccgatcttcccatcccacatcctccggcgcgatgccaaaaagaggctgacggcaactgggccttctgcagagaaagacctccgcttcactgccccggctggtcccaagggtcaggaagatggattcatacctgctgatgtggggactgctcacgttcatcatggtgcctggctgccaggcagagctctgtgacgatgacccgccagagatcccacacgccacattcaaagccatggcctacaaggaaggaaccatgttgaactgtgaatgcaagagaggtttccgcagaataaaaagcgggtcactctatatgctctgtacaggaaactctagccactcgtcctgggacaaccaatgtcaatgcacaagctctgccactcggaacacaacgaaacaagtgacacctcaacctgaagaacagaaagaaaggaaaaccacagaaatgcaaagtccaatgcagccagtggaccaagcgagccttccaggtcactgcagggaacctccaccatgggaaaatgaagccacagagagaatttatcatttcgtggtggggcagatggtttattatcagtgcgtccagggatacagggctctacacagaggtcctgctgagagcgtctgcaaaatgacccacgggaagacaaggtggacccagccccagctcatatgcacaggtgaaatggagaccagtcagtttccaggtgaagagaagcctcaggcaagccccgaaggccgtcctgagagtgagacttcctgcctcgtcacaacaacagattttcaaatacagacagaaatggctgcaaccatggagacgtccatatttacaacagagtaccaggtagcagtggccggctgtgttttcctgctgatcagcgtcctcctcctgagtgggctcacctggcagcggagacagaggaagagtagaagaacaatctagaaaaccaaaagaacaagaatttcttggtaagaagccgggaacagacaacagaagtcatgaagcccaagtgaaatcaaaggtgctaaatggtcgcccaggagacatccgttgtgcttgcctgcgttttggaagctctgaagtcacatcacaggacacggggcagtggcaaccttgtctctatgccagctcagtcccatcagagagcgagcgctacccacttctaaatagcaatttcgccgttgaagaggaagggcaaaaccactagaactctccatcttattttcatgtatatgtgttcattaaagcatgaatggtatggaactctctccaccctatatgtagtataaagaaaagtaggtttacattcatctcattccaacttcccagttcaggagtcccaaggaaagccccagcactaacgtaaatacacaacacacacactctaccctatacaactggacattgtctgcgtggttcctttctcagccgcttctgactgctgattctcccgttcacgttgcctaataaacatccttcaagaactctgggctgctacccagaaatcattttacccttggctcaatcctctaagctaacccccttctactgagccttcagtcttgaatttctaaaaaacagaggccatggcagaataatctttgggtaacttcaaaacggggcagccaaacccatgaggcaatgtcaggaacagaaggatgaatgaggtcccaggcagagaatcatacttagcaaagttttacctgtgcgttactaattggcctctttaagagttagtttctttgggattgctatgaatgataccctgaatttggcctgcactaatttgatgtttacaggtggacacacaaggtgcaaatcaatgcgtacgtttcctgagaagtgtctaaaaacaccaaaaagggatccgtacattcaatgtttatgcaaggaaggaaagaaagaaggaagtgaagagggagaagggatggaggtcacactggtagaacgtaaccacggaaaagagcgcatcaggcctggcacggtggctcaggcctataaccccagctccctaggagaccaaggcgggagcatctcttgaggccaggagtttgagaccagcctgggcagcatagcaagacacatccctacaaaaaattagaaattggctggatgtggtggcatacgcctgtagtcctagccactcaggaggctgaggcaggaggattgcttgagcccaggagttcgaggctgcagtcagtcatgatggcaccactgcactccagcctgggcaacagagcaagatcctgtctttaaggaaaaaaagacaagatgagcataccagcagtccttgaacattatcaaaaagttcagcatattagaatcaccgggaggccttgttaaaagagttcgctgggcccatcttcagagtctctgagttgttggtctggaatagagccaaatgttttgtgtgtctaacaattcccaggtgctgttgctgctgctactattccaggaacacactttgagaaccattgtgttattgctctgcacgcccacccactctcaactcccacgaaaaaaatcaacttccagagctaagatttcggtggaagtcctggttccatatctggtgcaagatctcccctcacgaatcagttgagtcaacattctagctcaacaacatcacacgattaacattaacgaaaattattcatttgggaaactatcagccagttttcacttctgaaggggcaggagagtgttatgagaaatcacggcagttttcagcagggtccagattcagattaaataactattttctgtcatttctgtgaccaaccacatacaaacagactcatctgtgcactctccccctcccccttcaggtatatgttttctgagtaaagttgaaaagaatctcagaccagaaaatatagatatatatttaaatcttacttgagtagaactgattacgacttttgggtgttgaggggtctataagatcaaaacttttccatgataatactaagatgttatcgaccatttatctgtccttctctcaaaagtgtatggtggaattttccagaagctatgtgatacgtgatgatgtcatcactctgctgttaacatataataaatttattgctattgtttataaaagaataaatgatattttttaaaaa

SEQ ID NO: 14758 - DNA, 2928 bp, Homo sapiens
  source 1..2928: mol_type = unassigned DNA
ggcagtttcctggctgaacacgccagcccaatacttaaagagagcaactcctgactccgatagagactggatggacccacaagggtgacagcccaggcggaccgatcttcccatcccacatcctccggcgcgatgccaaaaagaggctgacggcaactgggccttctgcagagaaagacctccgcttcactgccccggctggtcccaagggtcaggaagatggattcatacctgctgatgtggggactgctcacgttcatcatggtgcctggctgccaggcagagctctgtgacgatgacccgccagagatcccacacgccacattcaaagccatggcctacaaggaaggaaccatgttgaactgtgaatgcaagagaggtttccgcagaataaaaagcgggtcactctatatgctctgtacaggaaactctagccactcgtcctgggacaaccaatgtcaatgcacaagctctgccactcggaacacaacgaaacaagtgacacctcaacctgaagaacagaaagaaaggaaaaccacagaaatgcaaagtccaatgcagccagtggaccaagcgagccttccagattttcaaatacagacagaaatggctgcaaccatggagacgtccatatttacaacagagtaccaggtagcagtggccggctgtgttttcctgctgatcagcgtcctcctcctgagtgggctcacctggcagcggagacagaggaagagtagaagaacaatctagaaaaccaaaagaacaagaatttcttggtaagaagccgggaacagacaacagaagtcatgaagcccaagtgaaatcaaaggtgctaaatggtcgcccaggagacatccgttgtgcttgcctgcgttttggaagctctgaagtcacatcacaggacacggggcagtggcaaccttgtctctatgccagctcagtcccatcagagagcgagcgctacccacttctaaatagcaatttcgccgttgaagaggaagggcaaaaccactagaactctccatcttattttcatgtatatgtgttcattaaagcatgaatggtatggaactctctccaccctatatgtagtataaagaaaagtaggtttacattcatctcattccaacttcccagttcaggagtcccaaggaaagccccagcactaacgtaaatacacaacacacacactctaccctatacaactggacattgtctgcgtggttcctttctcagccgcttctgactgctgattctcccgttcacgttgcctaataaacatccttcaagaactctgggctgctacccagaaatcattttacccttggctcaatcctctaagctaacccccttctactgagccttcagtcttgaatttctaaaaaacagaggccatggcagaataatctttgggtaacttcaaaacggggcagccaaacccatgaggcaatgtcaggaacagaaggatgaatgaggtcccaggcagagaatcatacttagcaaagttttacctgtgcgttactaattggcctctttaagagttagtttctttgggattgctatgaatgataccctgaatttggcctgcactaatttgatgtttacaggtggacacacaaggtgcaaatcaatgcgtacgtttcctgagaagtgtctaaaaacaccaaaaagggatccgtacattcaatgtttatgcaaggaaggaaagaaagaaggaagtgaagagggagaagggatggaggtcacactggtagaacgtaaccacggaaaagagcgcatcaggcctggcacggtggctcaggcctataaccccagctccctaggagaccaaggcgggagcatctcttgaggccaggagtttgagaccagcctgggcagcatagcaagacacatccctacaaaaaattagaaattggctggatgtggtggcatacgcctgtagtcctagccactcaggaggctgaggcaggaggattgcttgagcccaggagttcgaggctgcagtcagtcatgatggcaccactgcactccagcctgggcaacagagcaagatcctgtctttaaggaaaaaaagacaagatgagcataccagcagtccttgaacattatcaaaaagttcagcatattagaatcaccgggaggccttgttaaaagagttcgctgggcccatcttcagagtctctgagttgttggtctggaatagagccaaatgttttgtgtgtctaacaattcccaggtgctgttgctgctgctactattccaggaacacactttgagaaccattgtgttattgctctgcacgcccacccactctcaactcccacgaaaaaaatcaacttccagagctaagatttcggtggaagtcctggttccatatctggtgcaagatctcccctcacgaatcagttgagtcaacattctagctcaacaacatcacacgattaacattaacgaaaattattcatttgggaaactatcagccagttttcacttctgaaggggcaggagagtgttatgagaaatcacggcagttttcagcagggtccagattcagattaaataactattttctgtcatttctgtgaccaaccacatacaaacagactcatctgtgcactctccccctcccccttcaggtatatgttttctgagtaaagttgaaaagaatctcagaccagaaaatatagatatatatttaaatcttacttgagtagaactgattacgacttttgggtgttgaggggtctataagatcaaaacttttccatgataatactaagatgttatcgaccatttatctgtccttctctcaaaagtgtatggtggaattttccagaagctatgtgatacgtgatgatgtcatcactctgctgttaacatataataaatttattgctattgtttataaaagaataaatgatatttttt

SEQ ID NO: 14759 - DNA, 326 bp, Homo sapiens
  source 1..326: mol_type = unassigned DNA
agatcccacacgccacattcaaagccatggcctacaaggaaggaaccatgttgaactgtgaatgcaagagaggtttccgcagaataaaaagcgggtcactctatatgctctgtacaggaaactctagccactcgtcctgggacaaccaatgtcaatgcacaagctctgccactcggaacacaacgaaacaagtgacacctcaacctgaagaacagaaagaaaggaaaaccacagaaatgcaaagtccaatgcagccagtggaccaagcgagccttccagattttcaaatacagacagaaatggctgcaaccatggagacgtccata

SEQ ID NO: 14760 - DNA, 4113 bp, Homo sapiens
  source 1..4113: mol_type = unassigned DNA
aggccttgcccctctatcctctgcacaggaagtgggctggctctgggcttttagtctttgcggccccagcagccagagctcagcagggccctggagagatggccacggtcccagcaccggggaggactggagagcgcgcgctgccaccgccccatgtctcagccagggcttccttcctcggctccaccctgtggatgtaatggcggcccctgctctgtcctggcgtctgcccctcctcatcctcctcctgcccctggctacctcttgggcatctgcagcggtgaatggcacttcccagttcacatgcttctacaactcgagagccaacatctcctgtgtctggagccaagatggggctctgcaggacacttcctgccaagtccatgcctggccggacagacggcggtggaaccaaacctgtgagctgctccccgtgagtcaagcatcctgggcctgcaacctgatcctcggagccccagattctcagaaactgaccacagttgacatcgtcaccctgagggtgctgtgccgtgagggggtgcgatggagggtgatggccatccaggacttcaagccctttgagaaccttcgcctgatggcccccatctccctccaagttgtccacgtggagacccacagatgcaacataagctgggaaatctcccaagcctcccactactttgaaagacacctggagttcgaggcccggacgctgtccccaggccacacctgggaggaggcccccctgctgactctcaagcagaagcaggaatggatctgcctggagacgctcaccccagacacccagtatgagtttcaggtgcgggtcaagcctctgcaaggcgagttcacgacctggagcccctggagccagcccctggccttcaggacaaagcctgcagcccttgggaaggacaccattccgtggctcggccacctcctcgtgggcctcagcggggcttttggcttcatcatcttagtgtacttgctgatcaactgcaggaacaccgggccatggctgaagaaggtcctgaagtgtaacaccccagacccctcgaagttcttttcccagctgagctcagagcatggaggagacgtccagaagtggctctcttcgcccttcccctcatcgtccttcagccctggcggcctggcacctgagatctcgccactagaagtgctggagagggacaaggtgacgcagctgctcctgcagcaggacaaggtgcctgagcccgcatccttaagcagcaaccactcgctgaccagctgcttcaccaaccagggttacttcttcttccacctcccggatgccttggagatagaggcctgccaggtgtactttacttacgacccctactcagaggaagaccctgatgagggtgtggccggggcacccacagggtcttccccccaacccctgcagcctctgtcaggggaggacgacgcctactgcaccttcccctccagggatgacctgctgctcttctcccccagtctcctcggtggccccagccccccaagcactgcccctgggggcagtggggccggtgaagagaggatgcccccttctttgcaagaaagagtccccagagactgggacccccagcccctggggcctcccaccccaggagtcccagacctggtggattttcagccaccccctgagctggtgctgcgagaggctggggaggaggtccctgacgctggccccagggagggagtcagtttcccctggtccaggcctcctgggcagggggagttcagggcccttaatgctcgcctgcccctgaacactgatgcctacttgtccctccaagaactccagggtcaggacccaactcacttggtgtagacagatggccagggtgggaggcaggcagctgcctgctctgcgccgagcctcagaaggaccctgttgagggtcctcagtccactgctgaggacactcagtgtccagttgcagctggacttctccacccggatggcccccacccagtcctgcacacttggtccatccatttccaaacctccactgctgctcccgggtcctgctgcccgagccaggaactgtgtgtgttgcaggggggcagtaactccccaactccctcgttaatcacaggatcccacgaatttaggctcagaagcatcgctcctctccagccctgcagctattcaccaatatcagtcctcgcggctctccagggctccctgccctgacctcttccctgggttttctgccccagcctcctccttccctcccctccccgtccacagggcagcctgagcgtgctttccaaaacccaaatatggccacgctccccctcggttcaaaaccttgcacaggtcccactgccctcagccccacttctcagcctggtacttgtacctccggtgtcgtgtggggacatccccttctgcaatcctccctaccgtcctcctgagccactcagagctccctcacaccccctctgttgcacatgctattccctggggctgctgtgcgctccccctcatctaggtgacaaacttccctgactcttcaagtgccggttttgcttctcctggagggaagcactgcctcccttaatctgccagaaacttctagcgtcagtgctggagggagaagctgtcagggacccagggcgcctggagaaagaggccctgttactattcctttgggatctctgaggcctcagagtgcttggctgctgtatctttaatgctggggcccaagtaagggcacagatccccccacaaagtggatgcctgctgcatcttcccacagtggcttcacagacccacaagagaagctgatggggagtaaaccctggagtccgaggcccaggcagcagccccgcctagtggtgggccctgatgctgccaggcctgggacctcccactgccccctccactggaggggtctcctctgcagctcagggactggcacactggcctccagaagggcagctccacagggcagggcctcattatttttcactgccccagacacagtgcccaacaccccgtcgtataccctggatgaacgaattaattacctggcaccacctcgtctgggctccctgcgcctgacattcacacagagaggcagagtcccgtgcccattaggtctggcatgccccctcctgcaaggggctcaaccccctaccccgacccctccacgtatctttcctaggcagatcacgttgcaatggctcaaacaacattccaccccagcaggacagtgaccccagtcccagctaactctgacctgggagccctcaggcacctgcacttacaggccttgctcacagctgattgggcacctgaccacacgcccccacaggctctgaccagcagcctatgagggggtttggcaccaagctctgtccaatcaggtaggctgggcctgaactagccaatcagatcaactctgtcttgggcgtttgaactcagggagggaggcccttgggagcaggtgcttgtggacaaggctccacaagcgttgagccttggaaaggtagacaagcgttgagccactaagcagaggaccttgggttcccaatacaaaaatacctactgctgagagggctgctgaccatttggtcaggattcctgttgcctttatatccaaaataaactcccctttcttgaggttgtctgagtcttgggtctatgccttgaaaaaagctgaattattggacagtctcacctcctgccatagggtcctgaatgtttcagaccacaaggggctccacacctttgctgtgtgttctggggcaacctactaatcctctctgcaagtcggtctccttatccccccaaatggaaattgtatttgccttctccactttgggaggctcccacttcttgggagggttacattttttaagtcttaatcatttgtgacatatgtatctatacatccgtatcttttaatgatccgtgtgtaccatctttgtgattatttccttaatattttttctttaagtcagttcattttcgttgaaatacatttatttaaagaaaaatctttgttactctgtaaatgaaaaaacccattttcgctataaataaaaggtaactgtacaaaataagtacaatgcaacaaaa

SEQ ID NO: 14761 - DNA, 569 bp, Homo sapiens
  source 1..569: mol_type = unassigned DNA
acttcgctctcctgccagcatgtgaaggtgccttgcttccccttcgccttccaccacgattgtaagtttcctgaggcctccccagccatgtggaaccggcttccttcctcggctccaccctgtggatgtaatggcggcccctgctctgtcctggcgtctgcccctcctcatcctcctcctgcccctggctacctcttgggcatctgcagcggtgaatggcacttcccagttcacatgcttctacaactcgagagccaacatctcctgtgtctggagccaagatggggctctgcaggacacttcctgccaagtccatgcctggccggacagacggcggtggaaccaaacctgtgagctgctccccgtgagtcaagcatcctgggcctgcaacctgatcctcggagccccagattctcagaaactgaccacagttgacatcgtcaccctgagggtgctgtgccgtgagggggtgcgatggagggtgatggccatccaggacttcaagccctttgagaaccttcgcctgatggcccccatctccctccaagttgtccacgtggagacccaca

SEQ ID NO: 14762 - DNA, 587 bp, Homo sapiens
  source 1..587: mol_type = unassigned DNA
acttcgctctcctgccagcatgtgaaggtgccttgcttccccttcgccttccaccacgattgtaagtttcctgaggcctccccagccatgtggaaccgacccgcaaatcaggcttggagaagcttggagaagcttggagaggcttggagaattgctgcatcctggacacgatgttccgacaccaccctcgccagcctccaggtcttggagttgaggcttctgattggggaagcctaatcacacgcacacacttcaggactgaggtctggagctgaggcttctgattggggcttccttcctcggctccaccctgtggatgtaatggcggcccctgctctgtcctggcgtctgcccctcctcatcctcctcctgcccctggctacctcttgggcatctgcagcggtgaatggcacttcccagttcacatgcttctacaactcgagagccaacatctcctgtgtctggagccaagatggggctctgcaggacacttcctgccaagtccatgcctggccggacagacggcggtggaaccaaacctgtgagctgctccccgtgagtcaagcatcctgggcctgcaacctgat

SEQ ID NO: 14763 - DNA, 660 bp, Homo sapiens
  source 1..660: mol_type = unassigned DNA
acttcgctctcctgccagcatgtgaaggtgccttgcttccccttcgccttccaccacgattggcttccttcctcggctccaccctgtggatgtaatggcggcccctgctctgtcctggcgtctgcccctcctcatcctcctcctgcccctggctacctcttgggcatctgcagcggtgaatggcacttcccagttcacatgcttctacaactcgagagccaacatctcctgtgtctggagccaagatggggctctgcaggacacttcctgccaagtccatgcctggccggacagacggcggtggaaccaaacctgtgagctgctccccgtgagtcaagcatcctgggcctgcaacctgatcctcggagccccagattctcagaaactgaccacagttgacatcgtcaccctgagggtgctgtgccgtgagggggtgcgatggagggtgatggccatccaggacttcaagccctttgagaaccttcgcctgatggcccccatctccctccaagttgtccacgtggagacccacagatgcaacataagctgggaaatctcccaagcctcccactactttgaaagacacctggagttcgaggcccggacgctgtccccaggccacacctgggaggaggcccccctgctgactctcaagcagaa

SEQ ID NO: 14764 - DNA, 297 bp, Homo sapiens
  source 1..297: mol_type = unassigned DNA
atggagccacccaatccactgggggagcaatacttcaaaaggacgatgccccgaattcccaccctgaagaacctagaggatcttgttactgaataccacgggaacttttcggcctggagtggtgtgtctaagggactggctgagagtctgcagccagactacagtgaacgactctgcctcgtcagtgagattcccccaaaaggaggggcccttggggaggggcctggggcctccccatgcaaccagcatagcccctactgggcccccccatgttacaccctaaagcctgaaacctga

SEQ ID NO: 14765 - DNA, 1933 bp, Homo sapiens
  source 1..1933: mol_type = unassigned DNA
gtagtgggtgagggacccaggttcctgacacagacagactacacccagggaatgaagagcaagcgccatgttgaagccatcattaccattcacatccctcttattcctgcagctgcccctgctgggagtggggctgaacacgacaattctgacgcccaatgggaatgaagacaccacagctgatttcttcctgaccactatgcccactgactccctcagtgtttccactctgcccctcccagaggttcagtgttttgtgttcaatgtcgagtacatgaattgcacttggaacagcagctctgagccccagcctaccaacctcactctgcattattggtacaagaactcggataatgataaagtccagaagtgcagccactatctattctctgaagaaatcacttctggctgtcagttgcaaaaaaaggagatccacctctaccaaacatttgttgttcagctccaggacccacgggaacccaggagacaggccacacagatgctaaaactgcagaatctgggaacaatcagtggattatagacataagttctccttgcctagtgtggatgggcagaaacgctacacgtttcgtgttcggagccgctttaacccactctgtggaagtgctcagcattggagtgaatggagccacccaatccactgggggagcaatacttcaaaagagaatcctttcctgtttgcattggaagccgtggttatctctgttggctccatgggattgattatcagccttctctgtgtgtatttctggctggaacggtgagatttggagaagcccagaaaaatgaggggaacggtagctgacaatagcagaggagggttttgcagggtctttaggagtaaaggatgagacagtaagtaatgagagattacccaagagggtttggtgatggaaggaagccacaggcacagagaacacagaatcactttatttcatatgggacaactgggagaagggtgataaaaaagctttaacctatgtgctcctgctccctctttctcccctgtcaggacgatgccccgaattcccaccctgaagaacctagaggatcttgttactgaataccacgggaacttttcggtgagaacgctgtcataagcatgctgcagtctatcaactgccaactgcctgccagcaagacagacagagtgtgggggtgggggcagagaggagagggaaggaggccctgcactaactgtcaggatgtggccgaccaaatggggcatggactatacagagagagacacacacagaagtgcagattatagattgaatgaggcagatggcaactggtattgggggcccaggagcctgtgtatcccttctgtaatcaattacagtggttgcagacatcatgagtactcctttggcacagagctcggtcttttacttcctgcccctaattgacccctgacctggacatatctgtctttaggcctggagtggtgtgtctaagggactggctgagagtctgcagccagactacagtgaacgactctgcctcgtcagtgagattcccccaaaaggaggggcccttggggaggggcctggggcctccccatgcaaccagcatagcccctactgggcccccccatgttacaccctaaagcctgaaacctgaaccccaatcctctgacagaagaaccccagggtcctgtagccctaagtggtactaactttccttcattcaacccacctgcgtctcatactcacctcaccccactgtggctgatttggaattttgtgcccccatgtaagcaccccttcatttggcattccccacttgagaattacccttttgccccgaacatgtttttcttctccctccctctttccctcccttcctctttccatctaccctccgattgttcctgaaccgatgagaaataaagtttctgttgataatcatc

SEQ ID NO: 14766 - DNA, 1534 bp, Homo sapiens
  source 1..1534: mol_type = unassigned DNA
agaggaaacgtgtgggtggggaggggtagtgggtgagggacccaggttcctgacacagacagactacacccagggaatgaagagcaagcgccatgttgaagccatcattaccattcacatccctcttattcctgcagctgcccctgctgggagtggggctgaacacgacaattctgacgcccaatgggaatgaagacaccacagctgatttcttcctgaccactatgcccactgactccctcagtgtttccactctgcccctcccagaggttcagtgttttgtgttcaatgtcgagtacatgaattgcacttggaacagcagctctgagccccagcctaccaacctcactctgcattattggtacaagaactcggataatgataaagtccagaagtgcagccactatctattctctgaagaaatcacttctggctgtcagttgcaaaaaaaggagatccacctctaccaaacatttgttgttcagctccaggacccacgggaacccaggagacaggccacacagatgctaaaactgcagaatctggtgatcccctgggctccagagaacctaacacttcacaaactgagtgaatcccagctagaactgaactggaacaacagattcttgaaccactgtttggagcacttggtgcagtaccggactgactgggaccacagctggactgaacaatcagtggattatagacataagttctccttgcctagtgtggatgggcagaaacgctacacgtttcgtgttcggagccgctttaacccactctgtggaagtgctcagcattggagtgaatggagccacccaatccactgggggagcaatacttcaaaagagaatcctttcctgtttgcattggaagccgtggttatctctgttggctccatgggattgattatcagccttctctgtgtgtatttctggctggaacggacgatgccccgaattcccaccctgaagaacctagaggatcttgttactgaataccacgggaacttttcggcctggagtggtgtgtctaagggactggctgagagtctgcagccagactacagtgaacgactctgcctcgtcagtgagattcccccaaaaggaggggcccttggggaggggcctggggcctccccatgcaaccagcatagcccctactgggcccccccatgttacaccctaaagcctgaaacctgaaccccaatcctctgacagaagaaccccagggtcctgtagccctaagtggtactaactttccttcattcaacccacctgcgtctcatactcacctcaccccactgtggctgatttggaattttgtgcccccatgtaagcaccccttcatttggcattccccacttgagaattacccttttgccccgaacatgtttttcttctccctcagtctggcccttccttttcgcaggattcttcctccctccctctttccctcccttcctctttccatctaccctccgattgttcctgaaccgatgagaaataaagtttctgttgataatcatcaaaaa

SEQ ID NO: 14767 - DNA, 540 bp, Homo sapiens
  source 1..540: mol_type = unassigned DNA
atgggaatgaagacaccacagctggaacaatcagtggattatagacataagttctccttgcctagtgtggatgggcagaaacgctacacgtttcgtgttcggagccgctttaacccactctgtggaagtgctcagcattggagtgaatggagccacccaatccactgggggagcaatacttcaaaagagaatcctttcctgtttgcattggaagccgtggttatctctgttggctccatgggattgattatcagccttctctgtgtgtatttctggctggaacggacgatgccccgaattcccaccctgaagaacctagaggatcttgttactgaataccacgggaacttttcggcctggagtggtgtgtctaagggactggctgagagtctgcagccagactacagtgaacgactctgcctcgtcagtgagattcccccaaaaggaggggcccttggggaggggcctggggcctccccatgcaaccagcatagcccctactgggcccccccatgttacaccctaaagcctgaaacctga

SEQ ID NO: 14768 - DNA, 3485 bp, Homo sapiens
  source 1..3485: mol_type = unassigned DNA
tccagctgggtagccgggggagcgcgcgtgggggctccgcgagtcgctcgcccttggtttctggggaagcctgggggacgcggctgtggcggaggcgccctgggactcaggtcgcctggagcgtggcacgcagagccccaggcgcggagctgaggccgcgcggccgcgcttggccccagcgggcgtgggactgagcagtctgctgccccccgacatgtgacccagccccgccgcccatgcgggctcccggccgcccggccctgcggccgctgccgctgccgccgctgctgctgttgctcctggcggcgccttggggacgggcagttccctgtgtctctggtggtttgcctaaacctgcaaacatcaccttcttatccatcaacatgaagaatgtcctacaatggactccaccagagggtcttcaaggagttaaagttacttacactgtgcagtatttcatatatgggcaaaagaaatggctgaataaatcagaatgcagaaatatcaatagaacctactgtgatctttctgctgaaacttctgactacgaacaccagtattatgccaaagttaaggccatttggggaacaaagtgttccaaatgggctgaaagtggacggttctatccttttttagaaacacaaattggcccaccagaggtggcactgactacagatgagaagtccatttctgttgtcctgacagctccagagaagtggaagagaaatccagaagaccttcctgtttccatgcaacaaatatactccaatctgaagtataacgtgtctgtgttgaatactaaatcaaacagaacgtggtcccagtgtgtgaccaaccacacgctggtgctcacctggctggagccgaacactctttactgcgtacacgtggagtccttcgtcccagggccccctcgccgtgctcagccttctgagaagcagtgtgccaggactttgaaagatcaatcatcagagttcaaggctaaaatcatcttctggtatgttttgcccgtatctattaccgtgtttcttttttctgtgatgggctattccatctaccgatatatccacgttggcaaagagaaacacccagcaaatttgattttgatttatggaaatgaatttgacaaaagattctttgtgcctgctgaaaaaatcgtgattaactttatcaccctcaatatctcggatgattctaaaatttctcatcaggatatgagtttactgggaaaaagcagtgatgtatccagccttaatgatcctcagcccagcgggaacctgaggccccctcaggaggaagaggaggtgaaacatttagggtatgcttcgcatttgatggaaattttttgtgactctgaagaaaacacggaaggtacttctctcacccagcaagagtccctcagcagaacaatacccccggataaaacagtcattgaatatgaatatgatgtcagaaccactgacatttgtgcggggcctgaagagcaggagctcagtttgcaggaggaggtgtccacacaaggaacattattggagtcgcaggcagcgttggcagtcttgggcccgcaaacgttacagtactcatacacccctcagctccaagacttagaccccctggcgcaggagcacacagactcggaggaggggccggaggaagagccatcgacgaccctggtcgactgggatccccaaactggcaggctgtgtattccttcgctgtccagcttcgaccaggattcagagggctgcgagccttctgagggggatgggctcggagaggagggtcttctatctagactctatgaggagccggctccagacaggccaccaggagaaaatgaaacctatctcatgcaattcatggaggaatgggggttatatgtgcagatggaaaactgatgccaacacttccttttgccttttgtttcctgtgcaaacaagtgagtcacccctttgatcccagccataaagtacctgggatgaaagaagttttttccagtttgtcagtgtctgtgagaattacttatttcttttctctattctcatagcacgtgtgtgattggttcatgcatgtaggtctcttaacaatgatggtgggcctctggagtccaggggctggccggttgttctatgcagagaaagcagtcaataaatgtttgccagactgggtgcagaatttattcaggtgggtgtactctggcctcttggttcattattttcaaacaagcacacttgtacaattattttctgggtacttcccatatgcacatagcactgtaaaaaatatttcccaaagatcactcattttataaataccactttttcagaattgggtttattgcgagcaggaggagatacttaaaacatgcacatataccaggttggtggtaagttggtcgcatgtgaaaacctcaactatttaatcatcatgattcatattttgagtgaatacatcaggcacagaccttcatgatatcacacactcttggctactttaagaggccatctttaatactttatgagtagttctggagtgtaaacataaacgagtattcttttgtagtcagaaaagtgtcctctcaataatttagtaggggcttattgtctctcaaaactaacctaaaagaaaatgacacattttataatagaatattacatttatttctggaagtgtgttttcaaaaagatatttacatagtctgtaaactagaaagtgttaggtaaagctctaggttactgtgttactattataatattaaacattcgaataggcagtcgttcaaagactctttggaatatctatgaatgaatatcctctattcttataatattaaaacccataagtaaatataggacatacaagagaaatgagttaaatgactatgtaagggagagtttattaaaatttgatgaaatttactgtaggaactaaactatgccataaaacaatagctttctagttcatttccagtaactgttcccatctcctttaccacttgttaagaaaattaaattcttcagtcacgctgctttaaaatgggacaaaatctattaagttgaaccatatataattgtggatatttggctgtttttaatctgacaagcagtaacttcatatggtttgccttaatatatatttgttttagtcatgaactcataatccattgatgctctttcatgagaagagatatcacccatatttccttattgatattattggtacaggcagacaaccctggtaggagagatggattctggggtcatgacctttcgtgattatccgcaaatgcaaacagtttcagatctaatggtttaatttagggagtaattatattaatcagagtgttctgttattctcaatctttatagaaacgattctgctggttttgaagaacagatgtattacactaactgtaaaagtagttcaagagtgagaaagaataaattgttattaagagcaaaagaaaaataaagtgattgatgata

SEQ ID NO: 14769 - DNA, 1244 bp, Homo sapiens
  source 1..1244: mol_type = unassigned DNA
tccagctgggtagccgggggagcgcgcgtgggggctccgcgagtcgctcgcccttggtttctggggaagcctgggggacgcggctgtggcggaggcgccctgggactcaggtcgcctggagcgtggcacgcagagccccaggcgcggagctgaggccgcgcggccgcgcttggccccagcgggcgtgggactgagcagtctgctgccccccgacatgtgacccagccccgccgcccatgcgggctcccggccgcccggccctgcggccgctgccgctgccgccgctgctgctgttgctcctggcggcgccttggggacgggcagttccctgtgtctctggtggtttgcctaaacctgcaaacatcaccttcttatccatcaacatgaagaatgtcctacaatggactccaccagagggtcttcaaggagttaaagttacttacactgtgcagtatttcatatatgggcaaaagaaatggctgaataaatcagaatgcagaaatatcaatagaacctactgtgatctttctgctgaaacttctgactacgaacaccagtattatgccaaagttaaggccatttggggaacaaagtgttccaaatgggctgaaagtggacggttctatccttttttagaaacacaaattggcccaccagaggtggcactgactacagatgagaagtccatttctgttgtcctgacagctccagagaagtggaagagaaatccagaagaccttcctgtttccatgcaacaaatatactccaatctgaagtataacgtgtctgtgttgaatactaaatcaaacagaacggtaagcctgaaatggaatggggcatacattcatgtaccactctgtagctaatgtgggaacaaacaaccctgatgcattgattctctgcatgtgaatctgggaagtcatgatgttcaaaagatacgccgcacaaaataaagttctatatacagaaattttacagaactaacttcagatcttctttacagaaactctgttgacaggatatggtgttgttattggagtgtagagagattgtacacttcactttgatgaagagctttcacttgcacagtctttctctgagaagaagaaaaaaatgtgagcaaggacccaggacaatgaataagaactctatccatgtgttgtttagaattgttctcagcattggtccagttcctgaccatgctctgctgagctaaaggaaaagagtatattgaaactgttgct

SEQ ID NO: 14770 - DNA, 3503 bp, Homo sapiens
  source 1..3503: mol_type = unassigned DNA
gaccatcagaccggcctgaataccagaatctctttgcaatgcactcgcctcgctcattaccagaaggaggttttacctgcctagtgacctggttggtctgggcatgaaccccgagaggtggaaactctcagactctcaggactgacagccgagtggctggggactataaatccgcgagaactgccctcgcgctgccatccagctgggtagccgggggagcgcgcgtgggggctccgcgagtcgctcgcccttggtttctggggaagcctgggggacgcggctgtggcggaggcgccctgggactcaggtcgcctggagcgtggcacgcagagccccaggcgcggagctgaggccgcgcggccgcgcttggccccagcgggcgtgggactgagcagtctgctgccccccgacatgtgacccagccccgccgcccatgcgggctcccggccgcccggccctgcggccgctgccgctgccgccgctgctgctgttgctcctggcggcgccttggggacgggcagttccctgtgtctctggtggtttgcctaaacctgcaaacatcaccttcttatccatcaacatgaagaatgtcctacaatggactccaccagagggtcttcaaggagttaaagttacttacactgtgcagtatttcatcacaaattggcccaccagaggtggcactgactacagatgagaagtccatttctgttgtcctgacagctccagagaagtggaagagaaatccagaagaccttcctgtttccatgcaacaaatatactccaatctgaagtataacgtgtctgtgttgaatactaaatcaaacagaacgtggtcccagtgtgtgaccaaccacacgctggtgctcacctggctggagccgaacactctttactgcgtacacgtggagtccttcgtcccagggccccctcgccgtgctcagccttctgagaagcagtgtgccaggactttgaaagatcaatcatcagagttcaaggctaaaatcatcttctggtatgttttgcccgtatctattaccgtgtttcttttttctgtgatgggctattccatctaccgatatatccacgttggcaaagagaaacacccagcaaatttgattttgatttatggaaatgaatttgacaaaagattctttgtgcctgctgaaaaaatcgtgattaactttatcaccctcaatatctcggatgattctaaaatttctcatcaggatatgagtttactgggaaaaagcagtgatgtatccagccttaatgatcctcagcccagcgggaacctgaggccccctcaggaggaagaggaggtgaaacatttagggtatgcttcgcatttgatggaaattttttgtgactctgaagaaaacacggaaggtacttctctcacccagcaagagtccctcagcagaacaatacccccggataaaacagtcattgaatatgaatatgatgtcagaaccactgacatttgtgcggggcctgaagagcaggagctcagtttgcaggaggaggtgtccacacaaggaacattattggagtcgcaggcagcgttggcagtcttgggcccgcaaacgttacagtactcatacacccctcagctccaagacttagaccccctggcgcaggagcacacagactcggaggaggggccggaggaagagccatcgacgaccctggtcgactgggatccccaaactggcaggctgtgtattccttcgctgtccagcttcgaccaggattcagagggctgcgagccttctgagggggatgggctcggagaggagggtcttctatctagactctatgaggagccggctccagacaggccaccaggagaaaatgaaacctatctcatgcaattcatggaggaatgggggttatatgtgcagatggaaaactgatgccaacacttccttttgccttttgtttcctgtgcaaacaagtgagtcacccctttgatcccagccataaagtacctgggatgaaagaagttttttccagtttgtcagtgtctgtgagaattacttatttcttttctctattctcatagcacgtgtgtgattggttcatgcatgtaggtctcttaacaatgatggtgggcctctggagtccaggggctggccggttgttctatgcagagaaagcagtcaataaatgtttgccagactgggtgcagaatttattcaggtgggtgtactctggcctcttggttcattattttcaaacaagcacacttgtacaattattttctgggtacttcccatatgcacatagcactgtaaaaaatatttcccaaagatcactcattttataaataccactttttcagaattgggtttattgcgagcaggaggagatacttaaaacatgcacatataccaggttggtggtaagttggtcgcatgtgaaaacctcaactatttaatcatcatgattcatattttgagtgaatacatcaggcacagaccttcatgatatcacacactcttggctactttaagaggccatctttaatactttatgagtagttctggagtgtaaacataaacgagtattcttttgtagtcagaaaagtgtcctctcaataatttagtaggggcttattgtctctcaaaactaacctaaaagaaaatgacacattttataatagaatattacatttatttctggaagtgtgttttcaaaaagatatttacatagtctgtaaactagaaagtgttaggtaaagctctaggttactgtgttactattataatattaaacattcgaataggcagtcgttcaaagactctttggaatatctatgaatgaatatcctctattcttataatattaaaacccataagtaaatataggacatacaagagaaatgagttaaatgactatgtaagggagagtttattaaaatttgatgaaatttactgtaggaactaaactatgccataaaacaatagctttctagttcatttccagtaactgttcccatctcctttaccacttgttaagaaaattaaattcttcagtcacgctgctttaaaatgggacaaaatctattaagttgaaccatatataattgtggatatttggctgtttttaatctgacaagcagtaacttcatatggtttgccttaatatatatttgttttagtcatgaactcataatccattgatgctctttcatgagaagagatatcacccatatttccttattgatattattggtacaggcagacaaccctggtaggagagatggattctggggtcatgacctttcgtgattatccgcaaatgcaaacagtttcagatctaatggtttaatttagggagtaattatattaatcagagtgttctgttattctcaatctttatagaaacgattctgctggttttgaagaacagatgtattacactaactgtaaaagtagttcaagagtgagaaagaataaattgttattaagagcaaaagaaaaataaagtgattgatgata

SEQ ID NO: 14771 - DNA, 2023 bp, Homo sapiens
  source 1..2023: mol_type = unassigned DNA
agtcccaggttcccgccaccaccgccgcggccgcgcggaggggcccctgtggatgccgcgtctcggccgccgggccccgcagtcctgcaagccgcgcgtcgcgagatccgcgctttaaaagccaaactccccgaaagggtcagccccgaaggaacatgatccagaaagacgcagcttcttaaattccctgtgtctctggtggtttgcctaaacctgcaaacatcaccttcttatccatcaacatgaagaatgtcctacaatggactccaccagagggtcttcaaggagttaaagttacttacactgtgcagtatttcatatatgggcaaaagaaatggctgaataaatcagaatgcagaaatatcaatagaacctactgtgatctttctgctgaaacttctgactacgaacaccagtattatgccaaagttaaggccatttggggaacaaagtgttccaaatgggctgaaagtggacggttctatccttttttagaaacacaaattggcccaccagaggtggcactgactacagatgagaagtccatttctgttgtcctgacagctccagagaagtggaagagaaatccagaagaccttcctgtttccatgcaacaaatatactccaatctgaagtataacgtgtctgtgttgaatactaaatcaaacagaacgtggtcccagtgtgtgaccaaccacacgctggtgctcacctggctggagccgaacactctttactgcgtacacgtggagtccttcgtcccagggccccctcgccgtgctcagccttctgagaagcagtgtgccaggactttgaaagatcaatcatcagagttcaaggctaaaatcatcttctggtatgttttgcccgtatctattaccgtgtttcttttttctgtgatgggctattccatctaccgatatatccacgttggcaaagagaaacacccagcaaatttgattttgatttatggaaatgaatttgacaaaagattctttgtgcctgctgaaaaaatcgtgattaactttatcaccctcaatatctcggatgattctaaaatttctcatcaggatatgagtttactgggaaaaagcagtgatgtatccagccttaatgatcctcagcccagcgggaacctgaggccccctcaggaggaagaggaggtgaaacatttagggtatgcttcgcatttgatggaaattttttgtgactctgaagaaaacacggaaggtacttctctcacccagcaagagtccctcagcagaacaatacccccggataaaacagtcattgaatatgaatatgatgtcagaaccactgacatttgtgcggggcctgaagagcaggagctcagtttgcaggaggaggtgtccacacaaggaacattattggagtcgcaggcagcgttggcagtcttgggcccgcaaacgttacagtactcatacacccctcagctccaagacttagaccccctggcgcaggagcacacagactcggaggaggggccggaggaagagccatcgacgaccctggtcgactgggatccccaaactggcaggctgtgtattccttcgctgtccagcttcgaccaggattcagagggctgcgagccttctgagggggatgggctcggagaggagggtcttctatctagactctatgaggagccggctccagacaggccaccaggagaaaatgaaacctatctcatgcaattcatggaggaatgggggttatatgtgcagatggaaaactgatgccaacacttccttttgccttttgtttcctgtgcaaacaagtgagtcacccctttgatcccagccataaagtacctgggatgaaagaagttttttccagtttgtcagtgtctgtgagaattacttatttcttttctctattctcatagcacgtgtgtgattggttcatgcatgtaggtctcttaacaatgatggtgggcctctggagtccaggggctggccggttgttctatgcagagaaagcagtcaataaatgtttgccagac

SEQ ID NO: 14772 - DNA, 3162 bp, Homo sapiens
  source 1..3162: mol_type = unassigned DNA
ccgtctctttcctctgtctgctgctctgtgggacacctgcctggaggcccagctgcccgtcatcagagtgacaggtcttatgacagcctgattggtgactcgggctgggtgtggattctcaccccaggcctctgcctgctttctcagaccctcatctgtcacccccacgctgaacccagctgccacccccagaagcccatcagactgcccccagcacacggaatggatttctgagaaagaagccgaaacagaaggcccgtgggagtcagcatgccgcgtggctgggccgcccccttgctcctgctgctgctccagggaggctggggctgccccgacctcgtctgctacaccgattacctccagacggtcatctgcatcctggaaatgtggaacctccaccccagcacgctcacccttacctggcaagaccagtatgaagagctgaaggacgaggccacctcctgcagcctccacaggtcggcccacaatgccacgcatgccacctacacctgccacatggatgtattccacttcatggccgacgacattttcagtgtcaacatcacagaccagtctggcaactactcccaggagtgtggcagctttctcctggctgagagcatcaagccggctccccctttcaacgtgactgtgaccttctcaggacagtataatatctcctggcgctcagattacgaagaccctgccttctacatgctgaagggcaagcttcagtatgagctgcagtacaggaaccggggagacccctgggctgtgagtccgaggagaaagctgatctcagtggactcaagaagtgtctccctcctccccctggagttccgcaaagactcgagctatgagctgcaggtgcgggcagggcccatgcctggctcctcctaccaggggacctggagtgaatggagtgacccggtcatctttcagacccagtcagaggagttaaaggaaggctggaaccctcacctgctgcttctcctcctgcttgtcatagtcttcattcctgccttctggagcctgaagacccatccattgtggaggctatggaagaagatatgggccgtccccagccctgagcggttcttcatgcccctgtacaagggctgcagcggagacttcaagaaatgggtgggtgcacccttcactggctccagcctggagctgggaccctggagcccagaggtgccctccaccctggaggtgtacagctgccacccaccacggagcccggccaagaggctgcagctcacggagctacaagaaccagcagagctggtggagtctgacggtgtgcccaagcccagcttctggccgacagcccagaactcggggggctcagcttacagtgaggagagggatcggccatacggcctggtgtccattgacacagtgactgtgctagatgcagaggggccatgcacctggccctgcagctgtgaggatgacggctacccagccctggacctggatgctggcctggagcccagcccaggcctagaggacccactcttggatgcagggaccacagtcctgtcctgtggctgtgtctcagctggcagccctgggctaggagggcccctgggaagcctcctggacagactaaagccaccccttgcagatggggaggactgggctgggggactgccctggggtggccggtcacctggaggggtctcagagagtgaggcgggctcacccctggccggcctggatatggacacgtttgacagtggctttgtgggctctgactgcagcagccctgtggagtgtgacttcaccagccccggggacgaaggacccccccggagctacctccgccagtgggtggtcattcctccgccactttcgagccctggaccccaggccagctaatgaggctgactggatgtccagagctggccaggccactgggccctgagccagagacaaggtcacctgggctgtgatgtgaagacacctgcagcctttggtctcctggatgggcctttgagcctgatgtttacagtgtctgtgtgtgtgtgtgcatatgtgtgtgtgtgcatatgcatgtgtgtgtgtgtgtgtgtcttaggtgcgcagtggcatgtccacgtgtgtgtgtgattgcacgtgcctgtgggcctgggataatgcccatggtactccatgcattcacctgccctgtgcatgtctggactcacggagctcacccatgtgcacaagtgtgcacagtaaacgtgtttgtggtcaacagatgacaacagccgtcctccctcctagggtcttgtgttgcaagttggtccacagcatctccggggctttgtgggatcagggcattgcctgtgactgaggcggagcccagccctccagcgtctgcctccaggagctgcaagaagtccatattgttccttatcacctgccaacaggaagcgaaaggggatggagtgagcccatggtgacctcgggaatggcaattttttgggcggcccctggacgaaggtctgaatcccgactctgataccttctggctgtgctacctgagccaagtcgcctcccctctctgggctagagtttccttatccagacagtggggaaggcatgacacacctgggggaaattggcgatgtcacccgtgtacggtacgcagcccagagcagaccctcaataaacgtcagcttccttccttctgcggccagagccgaggcgggcgggggtgagaacatcaatcgtcagcgacagcctgggcacccgcggggccgtcccgcctgcagagggccactcgggggggtttccaggcttaaaatcagtccgtttcgtctcttggaaacagctccccaccaaccaagatttctttttctaacttctgctactaagtttttaaaaattccctttatgcacccaagagatatttattaaacaccaattacgtagcaggccatggctcatgggacccaccccccgtggcactcatggagggggctgcaggttggaactatgcagtgtgctccggccacacatcctgctgggccccctaccctgccccaattcaatcctgccaataaatcctgtcttatttgttcatcctggagaattgaagggaggtcaagttgtttgtcaatgatttgtcagagaacctgttgaaatgtgaattaagaagctaagaaaata

SEQ ID NO: 14773 - DNA, 4495 bp, Homo sapiens
  source 1..4495: mol_type = unassigned DNA
ctagaggcagctcagatagaggagctctttgggaagagacgccgggcaggcagaagcagcaggtaccccctccacatccctagggctctgtgatgtaggcagaggcccgtgggagtcagcatgccgcgtggctgggccgcccccttgctcctgctgctgctccagggaggctggggctgccccgacctcgtctgctacaccgattacctccagacggtcatctgcatcctggaaatgtggaacctccaccccagcacgctcacccttacctggcaagaccagtatgaagagctgaaggacgaggccacctcctgcagcctccacaggtcggcccacaatgccacgcatgccacctacacctgccacatggatgtattccacttcatggccgacgacattttcagtgtcaacatcacagaccagtctggcaactactcccaggagtgtggcagctttctcctggctgagagcatcaagccggctccccctttcaacgtgactgtgaccttctcaggacagtataatatctcctggcgctcagattacgaagaccctgccttctacatgctgaagggcaagcttcagtatgagctgcagtacaggaaccggggagacccctgggctgtgagtccgaggagaaagctgatctcagtggactcaagaagtgtctccctcctccccctggagttccgcaaagactcgagctatgagctgcaggtgcgggcagggcccatgcctggctcctcctaccaggggacctggagtgaatggagtgacccggtcatctttcagacccagtcagaggagttaaaggaaggctggaaccctcacctgctgcttctcctcctgcttgtcatagtcttcattcctgccttctggagcctgaagacccatccattgtggaggctatggaagaagatatgggccgtccccagccctgagcggttcttcatgcccctgtacaagggctgcagcggagacttcaagaaatgggtgggtgcacccttcactggctccagcctggagctgggaccctggagcccagaggtgccctccaccctggaggtgtacagctgccacccaccacggagcccggccaagaggctgcagctcacggagctacaagaaccagcagagctggtggagtctgacggtgtgcccaagcccagcttctggccgacagcccagaactcggggggctcagcttacagtgaggagagggatcggccatacggcctggtgtccattgacacagtgactgtgctagatgcagaggggccatgcacctggccctgcagctgtgaggatgacggctacccagccctggacctggatgctggcctggagcccagcccaggcctagaggacccactcttggatgcagggaccacagtcctgtcctgtggctgtgtctcagctggcagccctgggctaggagggcccctgggaagcctcctggacagactaaagccaccccttgcagatggggaggactgggctgggggactgccctggggtggccggtcacctggaggggtctcagagagtgaggcgggctcacccctggccggcctggatatggacacgtttgacagtggctttgtgggctctgactgcagcagccctgtggagtgtgacttcaccagccccggggacgaaggacccccccggagctacctccgccagtgggtggtcattcctccgccactttcgagccctggaccccaggccagctaatgaggctgactggatgtccagagctggccaggccactgggccctgagccagagacaaggtcacctgggctgtgatgtgaagacacctgcagcctttggtctcctggatgggcctttgagcctgatgtttacagtgtctgtgtgtgtgtgtgcatatgtgtgtgtgtgcatatgcatgtgtgtgtgtgtgtgtgtcttaggtgcgcagtggcatgtccacgtgtgtgtgtgattgcacgtgcctgtgggcctgggataatgcccatggtactccatgcattcacctgccctgtgcatgtctggactcacggagctcacccatgtgcacaagtgtgcacagtaaacgtgtttgtggtcaacagatgacaacagccgtcctccctcctagggtcttgtgttgcaagttggtccacagcatctccggggctttgtgggatcagggcattgcctgtgactgaggcggagcccagccctccagcgtctgcctccaggagctgcaagaagtccatattgttccttatcacctgccaacaggaagcgaaaggggatggagtgagcccatggtgacctcgggaatggcaattttttgggcggcccctggacgaaggtctgaatcccgactctgataccttctggctgtgctacctgagccaagtcgcctcccctctctgggctagagtttccttatccagacagtggggaaggcatgacacacctgggggaaattggcgatgtcacccgtgtacggtacgcagcccagagcagaccctcaataaacgtcagcttccttccttctgcggccagagccgaggcgggcgggggtgagaacatcaatcgtcagcgacagcctgggcacccgcggggccgtcccgcctgcagagggccactcgggggggtttccaggcttaaaatcagtccgtttcgtctcttggaaacagctccccaccaaccaagatttctttttctaacttctgctactaagtttttaaaaattccctttatgcacccaagagatatttattaaacaccaattacgtagcaggccatggctcatgggacccaccccccgtggcactcatggagggggctgcaggttggaactatgcagtgtgctccggccacacatcctgctgggccccctaccctgccccaattcaatcctgccaataaatcctgtcttatttgttcatcctggagaattgaagggaggtcaagttgtttgtcaatgatttgtcagagaacctgttgaaatgtgaattaagaagctaagaaaatatttcttagcaacattttctttttcttttttttttttttcttttgagacagagtctcactctcgtcgcccaggctggaatgcagtggtgcgatctcggctctctgcaacctctgtctcccgggttcaagcgatttcctgcgtcagccccagagtagctggaattacaggcacacaccaccacgcctggctaatttttgtatttttagtagagctggggccaccctggcccggccccgtcttcctccccaaaggtcagactgcaggctgcagggctgtgctggaggagccagctctagctcacccatgcttttgcaacagggtcgggttggaagtcagcacaggtcagtcctgcggaaggttccttcgtgactcatctgtgaagtggggtggttgggagaggtagctgagagaatgcatgagagtcctcggtgcctggcaggaggctggaaggttctagaacactgatggttataagagtgggactgtgagcctgggatcggggggtgtgagacttggatgggagcacaagagtggaaacacagcttctgcacggagcaggcgcagccctcaacaccccgtgcacctgcaccctagggactcttgggtccagatgtgctgtggttttcacaccttcttgggggcaacaggttccaggagccacctgtgggtgccacctgagccacaggctcccaggaaagcagcacagctctcctgcacccagagcttgctgggtggcggaggggaacacagatggttggggaaggcctgaggccagattgggggactctggactggggcagatgaggctcctcagaatcccacctttgaagggaactcagcttataaacacagaggagcaaagttggagggccgggcgtagtggctcacacctgtgatctcagcactttgggaggccaaggaaggtggatcacttgaggccaggagttcgagaccagcctgggcaacatagcaaggccccatctctacaaaaattattattttttaaaaaaattagccaggtgtggtggtgcttgcctatagtcccagctactcgggaggctaaggtgggaggatcgctggagcccaggaatttgaggctgcagtgagctgtgattacaccgttgcactccagcctgggtcacagatcaagaccctgtctcttaaaaataaaagttggagacaagagctggctcacctgaaaggagggattagtaggtaggagggtggatggaggatggatggatgtgtgggtggataggaagatggtattaagttggtgcaaaagtctttgatattactcttaatggctttaataaaaagcttgaaggaagaatgattggttggatagacagagataaatgcatactggaaacaaagataaagataaaacacaagttataccaggccagcaactctattttgttcactgcctttagtcccagcctggcacatagtaggcactcaataaagcctgatttgtagc

SEQ ID NO: 14774 - DNA, 3263 bp, Homo sapiens
  source 1..3263: mol_type = unassigned DNA
ggtagagtgattttccctcggtgactcaactgggacgtagcaggtcgggcagtcaagccaggtgaccccatgagctgtcgctgcatctttctcatgaagcacggggaacgggtcggatggcccgtgggagtcagcatgccgcgtggctgggccgcccccttgctcctgctgctgctccagggaggctggggctgccccgacctcgtctgctacaccgattacctccagacggtcatctgcatcctggaaatgtggaacctccaccccagcacgctcacccttacctggcaagaccagtatgaagagctgaaggacgaggccacctcctgcagcctccacaggtcggcccacaatgccacgcatgccacctacacctgccacatggatgtattccacttcatggccgacgacattttcagtgtcaacatcacagaccagtctggcaactactcccaggagtgtggcagctttctcctggctgagagcatcaagccggctccccctttcaacgtgactgtgaccttctcaggacagtataatatctcctggcgctcagattacgaagaccctgccttctacatgctgaagggcaagcttcagtatgagctgcagtacaggaaccggggagacccctgggctgtgagtccgaggagaaagctgatctcagtggactcaagaagtgtctccctcctccccctggagttccgcaaagactcgagctatgagctgcaggtgcgggcagggcccatgcctggctcctcctaccaggggacctggagtgaatggagtgacccggtcatctttcagacccagtcagaggagttaaaggaaggctggaaccctcacctgctgcttctcctcctgcttgtcatagtcttcattcctgccttctggagcctgaagacccatccattgtggaggctatggaagaagatatgggccgtccccagccctgagcggttcttcatgcccctgtacaagggctgcagcggagacttcaagaaatgggtgggtgcacccttcactggctccagcctggagctgggaccctggagcccagaggtgccctccaccctggaggtgtacagctgccacccaccacggagcccggccaagaggctgcagctcacggagctacaagaaccagcagagctggtggagtctgacggtgtgcccaagcccagcttctggccgacagcccagaactcggggggctcagcttacagtgaggagagggatcggccatacggcctggtgtccattgacacagtgactgtgctagatgcagaggggccatgcacctggccctgcagctgtgaggatgacggctacccagccctggacctggatgctggcctggagcccagcccaggcctagaggacccactcttggatgcagggaccacagtcctgtcctgtggctgtgtctcagctggcagccctgggctaggagggcccctgggaagcctcctggacagactaaagccaccccttgcagatggggaggactgggctgggggactgccctggggtggccggtcacctggaggggtctcagagagtgaggcgggctcacccctggccggcctggatatggacacgtttgacagtggctttgtgggctctgactgcagcagccctgtggagtgtgacttcaccagccccggggacgaaggacccccccggagctacctccgccagtgggtggtcattcctccgccactttcgagccctggaccccaggccagctaatgaggctgactggatgtccagagctggccaggccactgggccctgagccagagacaaggtcacctgggctgtgatgtgaagacacctgcagcctttggtctcctggatgggcctttgagcctgatgtttacagtgtctgtgtgtgtgtgtgcatatgtgtgtgtgtgcatatgcatgtgtgtgtgtgtgtgtgtcttaggtgcgcagtggcatgtccacgtgtgtgtgtgattgcacgtgcctgtgggcctgggataatgcccatggtactccatgcattcacctgccctgtgcatgtctggactcacggagctcacccatgtgcacaagtgtgcacagtaaacgtgtttgtggtcaacagatgacaacagccgtcctccctcctagggtcttgtgttgcaagttggtccacagcatctccggggctttgtgggatcagggcattgcctgtgactgaggcggagcccagccctccagcgtctgcctccaggagctgcaagaagtccatattgttccttatcacctgccaacaggaagcgaaaggggatggagtgagcccatggtgacctcgggaatggcaattttttgggcggcccctggacgaaggtctgaatcccgactctgataccttctggctgtgctacctgagccaagtcgcctcccctctctgggctagagtttccttatccagacagtggggaaggcatgacacacctgggggaaattggcgatgtcacccgtgtacggtacgcagcccagagcagaccctcaataaacgtcagcttccttccttctgcggccagagccgaggcgggcgggggtgagaacatcaatcgtcagcgacagcctgggcacccgcggggccgtcccgcctgcagagggccactcgggggggtttccaggcttaaaatcagtccgtttcgtctcttggaaacagctccccaccaaccaagatttctttttctaacttctgctactaagtttttaaaaattccctttatgcacccaagagatatttattaaacaccaattacgtagcaggccatggctcatgggacccaccccccgtggcactcatggagggggctgcaggttggaactatgcagtgtgctccggccacacatcctgctgggccccctaccctgccccaattcaatcctgccaataaatcctgtcttatttgttcatcctggagaattgaagggaggtcaagttgtttgtcaatgatttgtcagagaacctgttgaaatgtgaattaagaagctaagaaaatatttcttagcaacattttctttttcttttttttttttttcttttgagacagagtctcactctcgtcgcccaggctggaatgcagtggtgcgatctcggctctctgcaacctctgtctcccgggttcaagcgatttcctgcgtcagccccagagtagctggaattacaggcacacaccaccacgcctggctaatttttgtatttttagtagagctggggccaccctggcccggccccg

SEQ ID NO: 14775 - DNA, 2886 bp, Homo sapiens
  source 1..2886: mol_type = unassigned DNA
ctcactttaccactactcgctatagagccctggtcaagttctctccacctctctatctatgtctcagtttcttcatctgtaacatcaaatgaataataataccaatctcctagacttcataagaggattaacaaagacaaaatatgggaaaaacataacatggcgtcccataattattagatcttattattgacactaaaatggcattaaaattaccaaaaggaagacagcatctgtttcctctttggtcctgagctggttaaaaggaacactggttgcctgaacagtcacacttgcaaccatgatgcctaaacattgctttctaggcttcctcatcagtttcttccttactggtgtagcaggaactcagtcaacgcatgagtctctgaagcctcagagggtacaatttcagtcccgaaattttcacaacattttgcaatggcagcctgggagggcacttactggcaacagcagtgtctattttgtgcagtacaaaatcatgttctcatgcagcatgaaaagctctcaccagaagccaagtggatgctggcagcacatttcttgtaacttcccaggctgcagaacattggctaaatatggacagagacaatggaaaaataaagaagactgttggggtactcaagaactctcttgtgaccttaccagtgaaacctcagacatacaggaaccttattacgggagggtgagggcggcctcggctgggagctactcagaatggagcatgacgccgcggttcactccctggtgggaaacaaaaatagatcctccagtcatgaatataacccaagtcaatggctctttgttggtaattctccatgctccaaatttaccatatagataccaaaaggaaaaaaatgtatctatagaagattactatgaactactataccgagtttttataattaacaattcactagaaaaggagcaaaaggtttatgaaggggctcacagagcggttgaaattgaagctctaacaccacactccagctactgtgtagtggctgaaatatatcagcccatgttagacagaagaagtcagagaagtgaagagagatgtgtggaaattccatgacttgtggaatttggcattcagcaatgtggaaattctaaagctccctgagaacaggatgactcgtgtttgaaggatcttatttaaaattgtttttgtattttcttaaagcaatattcactgttacaccttggggacttctttgtttatccattcttttatcctttatatttcatttgtaaactatatttgaacgacattccccccgaaaaattgaaatgtaaagatgaggcagagaataaagtgttctatgaaattcagaactttatttctgaatgtaacatccctaataacaaccttcattcttctaatacagcaaaataaaaatttaacaaccaaggaatagtatttaagaaaatgttgaaataatttttttaaaatagcattacagactgaggcggtcctgaagcaatggtttttcactctcttattgagccaattaaattgacattgctttgacaatttaaaacttctataaaggtgaatatttttcatacatttctattttatatgaatatactttttatatatttattattattaaatatttctacttaatgaatcaaaattttgttttaaagtctactttatgtaaataagaacaggttttggggaaaaaaatcttatgatttctggattgatatctgaattaaaactatcaacaacaaggaagtctgctctgtacaattgtccctcatttaaaagatatattaagcttttcttttctgtttgtttttgttttgtttagtttttaatcctgtcttagaagaacttatctttattctcaaaattaaatgtaatttttttagtgacaaagaagaaaggaaacctcattactcaatccttctggccaagagtgtcttgcttgtggcgccttcctcatctctatataggaggatcccatgaatgatggtttattgggaactgctggggtcgaccccatacagagaactcagcttgaagctggaagcacacagtgggtagcaggagaaggaccggtgttggtaggtgcctacagagactatagagctagacaaagccctccaaactggcccctcctgctcactgcctctcctgagtagaaatctggtgacctaaggctcagtgtggtcaacagaaagctgccttcttcacttgaggctaagtcttcatatatgtttaaggttgtctttctagtgaggagatacatatcagagaacatttgtacaattccccatgaaaattgctccaaagttgataacaatatagtcggtgcttctagttatatgcaagtactcagtgataaatggattaaaaaatattcagaaatgtattggggggtggaggagaataagaggcagagcaagagctagagaattggtttccttgcttccctgtatgctcagaaaacattgatttgagcatagacgcagagactgaaaaaaaaatttactttgatctctgtttttgaattcttattatttatattttgcttactaccttttttgccttttgtccttttgtggagagggcgatgaattaagagtagtggggtgggtggcgagtaagtaaaatttcaaatagcattttagtgaatgcaattcagtagtcctgaagcctgacttaataaaacaaaattcatttatggttgtttcatgaaagttattagataggatcaagttttgtttgtatattgtttgccttgctctgtttttgcttttgtgcttaggcaagtgcaaaatactctatggaaatcataattgtcatcttcttcatggtgttagggatatattgtcacatgatttcaataaatcctt

SEQ ID NO: 14776 - DNA, 2620 bp, Homo sapiens
  source 1..2620: mol_type = unassigned DNA
ctcactttaccactactcgctatagagccctggtcaagttctctccacctctctatctatgtctcagtttcttcatctgtaacatcaaatgaataataataccaatctcctagacttcataagaggattaacaaagacaaaatatgggaaaaacataacatggcgtcccataattattagatcttattattgacactaaaatggcattaaaattaccaaaaggaagacagcatctgtttcctctttggtcctgagctggttaaaaggaacactggttgcctgaacagtcacacttgcaaccatgatgcctaaacattgctttctaggcttcctcatcagtttcttccttactggtgtagcaggaactcagtcaacgcatgagtctctgaagcctcagagggtacaatttcagtcccgaaattttcacaacattttgcaatggcagcctgggagggcacttactggcaacagcagtgtctattttgtgcagtacaaaatatatggacagagacaatggaaaaataaagaagactgttggggtactcaagaactctcttgtgaccttaccagtgaaacctcagacatacaggaaccttattacgggagggtgagggcggcctcggctgggagctactcagaatggagcatgacgccgcggttcactccctggtgggaaagagcaaaaggtttatgaaggggctcacagagcggttgaaattgaagctctaacaccacactccagctactgtgtagtggctgaaatatatcagcccatgttagacagaagaagtcagagaagtgaagagagatgtgtggaaattccatgacttgtggaatttggcattcagcaatgtggaaattctaaagctccctgagaacaggatgactcgtgtttgaaggatcttatttaaaattgtttttgtattttcttaaagcaatattcactgttacaccttggggacttctttgtttatccattcttttatcctttatatttcatttgtaaactatatttgaacgacattccccccgaaaaattgaaatgtaaagatgaggcagagaataaagtgttctatgaaattcagaactttatttctgaatgtaacatccctaataacaaccttcattcttctaatacagcaaaataaaaatttaacaaccaaggaatagtatttaagaaaatgttgaaataatttttttaaaatagcattacagactgaggcggtcctgaagcaatggtttttcactctcttattgagccaattaaattgacattgctttgacaatttaaaacttctataaaggtgaatatttttcatacatttctattttatatgaatatactttttatatatttattattattaaatatttctacttaatgaatcaaaattttgttttaaagtctactttatgtaaataagaacaggttttggggaaaaaaatcttatgatttctggattgatatctgaattaaaactatcaacaacaaggaagtctgctctgtacaattgtccctcatttaaaagatatattaagcttttcttttctgtttgtttttgttttgtttagtttttaatcctgtcttagaagaacttatctttattctcaaaattaaatgtaatttttttagtgacaaagaagaaaggaaacctcattactcaatccttctggccaagagtgtcttgcttgtggcgccttcctcatctctatataggaggatcccatgaatgatggtttattgggaactgctggggtcgaccccatacagagaactcagcttgaagctggaagcacacagtgggtagcaggagaaggaccggtgttggtaggtgcctacagagactatagagctagacaaagccctccaaactggcccctcctgctcactgcctctcctgagtagaaatctggtgacctaaggctcagtgtggtcaacagaaagctgccttcttcacttgaggctaagtcttcatatatgtttaaggttgtctttctagtgaggagatacatatcagagaacatttgtacaattccccatgaaaattgctccaaagttgataacaatatagtcggtgcttctagttatatgcaagtactcagtgataaatggattaaaaaatattcagaaatgtattggggggtggaggagaataagaggcagagcaagagctagagaattggtttccttgcttccctgtatgctcagaaaacattgatttgagcatagacgcagagactgaaaaaaaaatttactttgatctctgtttttgaattcttattatttatattttgcttactaccttttttgccttttgtccttttgtggagagggcgatgaattaagagtagtggggtgggtggcgagtaagtaaaatttcaaatagcattttagtgaatgcaattcagtagtcctgaagcctgacttaataaaacaaaattcatttatggttgtttcatgaaagttattagataggatcaagttttgtttgtatattgtttgccttgctctgtttttgcttttgtgcttaggcaagtgcaaaatactctatggaaatcataattgtcatcttcttcatggtgttagggatatattgtcacatgatttcaataaatcctt

SEQ ID NO: 14777 - DNA, 2790 bp, Homo sapiens
  source 1..2790: mol_type = unassigned DNA
ctcactttaccactactcgctatagagccctggtcaagttctctccacctctctatctatgtctcagtttcttcatctgtaacatcaaatgaataataataccaatctcctagacttcataagaggattaacaaagacaaaatatgggaaaaacataacatggcgtcccataattattagatcttattattgacactaaaatggcattaaaattaccaaaaggaagacagcatctgtttcctctttggtcctgagctggttaaaaggaacactggttgcctgaacagtcacacttgcaaccatgatgcctaaacattgctttctaggcttcctcatcagtttcttccttactggtgtagcaggaactcagtcaacgcatgagtctctgaagcctcagagggtacaatttcagtcccgaaattttcacaacattttgcaatggcagcctgggagggcacttactggcaacagcagtgtctattttgtgcagtacaaaatatatggacagagacaatggaaaaataaagaagactgttggggtactcaagaactctcttgtgaccttaccagtgaaacctcagacatacaggaaccttattacgggagggtgagggcggcctcggctgggagctactcagaatggagcatgacgccgcggttcactccctggtgggaaacaaaaatagatcctccagtcatgaatataacccaagtcaatggctctttgttggtaattctccatgctccaaatttaccatatagataccaaaaggaaaaaaatgtatctatagaagattactatgaactactataccgagtttttataattaacaattcactagaaaaggagcaaaaggtttatgaaggggctcacagagcggttgaaattgaagctctaacaccacactccagctactgtgtagtggctgaaatatatcagcccatgttagacagaagaagtcagagaagtgaagagagatgtgtggaaattccatgacttgtggaatttggcattcagcaatgtggaaattctaaagctccctgagaacaggatgactcgtgtttgaaggatcttatttaaaattgtttttgtattttcttaaagcaatattcactgttacaccttggggacttctttgtttatccattcttttatcctttatatttcatttgtaaactatatttgaacgacattccccccgaaaaattgaaatgtaaagatgaggcagagaataaagtgttctatgaaattcagaactttatttctgaatgtaacatccctaataacaaccttcattcttctaatacagcaaaataaaaatttaacaaccaaggaatagtatttaagaaaatgttgaaataatttttttaaaatagcattacagactgaggcggtcctgaagcaatggtttttcactctcttattgagccaattaaattgacattgctttgacaatttaaaacttctataaaggtgaatatttttcatacatttctattttatatgaatatactttttatatatttattattattaaatatttctacttaatgaatcaaaattttgttttaaagtctactttatgtaaataagaacaggttttggggaaaaaaatcttatgatttctggattgatatctgaattaaaactatcaacaacaaggaagtctgctctgtacaattgtccctcatttaaaagatatattaagcttttcttttctgtttgtttttgttttgtttagtttttaatcctgtcttagaagaacttatctttattctcaaaattaaatgtaatttttttagtgacaaagaagaaaggaaacctcattactcaatccttctggccaagagtgtcttgcttgtggcgccttcctcatctctatataggaggatcccatgaatgatggtttattgggaactgctggggtcgaccccatacagagaactcagcttgaagctggaagcacacagtgggtagcaggagaaggaccggtgttggtaggtgcctacagagactatagagctagacaaagccctccaaactggcccctcctgctcactgcctctcctgagtagaaatctggtgacctaaggctcagtgtggtcaacagaaagctgccttcttcacttgaggctaagtcttcatatatgtttaaggttgtctttctagtgaggagatacatatcagagaacatttgtacaattccccatgaaaattgctccaaagttgataacaatatagtcggtgcttctagttatatgcaagtactcagtgataaatggattaaaaaatattcagaaatgtattggggggtggaggagaataagaggcagagcaagagctagagaattggtttccttgcttccctgtatgctcagaaaacattgatttgagcatagacgcagagactgaaaaaaaaatttactttgatctctgtttttgaattcttattatttatattttgcttactaccttttttgccttttgtccttttgtggagagggcgatgaattaagagtagtggggtgggtggcgagtaagtaaaatttcaaatagcattttagtgaatgcaattcagtagtcctgaagcctgacttaataaaacaaaattcatttatggttgtttcatgaaagttattagataggatcaagttttgtttgtatattgtttgccttgctctgtttttgcttttgtgcttaggcaagtgcaaaatactctatggaaatcataattgtcatcttcttcatggtgttagggatatattgtcacatgatttcaataaatcctt

SEQ ID NO: 14778 - DNA, 4549 bp, Homo sapiens
  source 1..4549: mol_type = unassigned DNA
cggcaggaaggccatggcggggcccgagcgctggggccccctgctcctgtgcctgctgcaggccgctccagggaggccccgtctggcccctccccagaatgtgacgctgctctcccagaacttcagcgtgtacctgacatggctcccagggcttggcaacccccaggatgtgacctattttgtggcctatcagagctctcccacccgtagacggtggcgcgaagtggaagagtgtgcgggaaccaaggagctgctatgttctatgatgtgcctgaagaaacaggacctgtacaacaagttcaagggacgcgtgcggacggtttctcccagctccaagtccccctgggtggagtccgaatacctggattacctttttgaagtggagccggccccacctgtcctggtgctcacccagacggaggagatcctgagtgccaatgccacgtaccagctgcccccctgcatgcccccactggatctgaagtatgaggtggcattctggaaggagggggccggaaacaagaccctatttccagtcactccccatggccagccagtccagatcactctccagccagctgccagcgaacaccactgcctcagtgccagaaccatctacacgttcagtgtcccgaaatacagcaagttctctaagcccacctgcttcttgctggaggtcccagaagccaactgggctttcctggtgctgccatcgcttctgatactgctgttagtaattgccgcagggggtgtgatctggaagaccctcatggggaacccctggtttcagcgggcaaagatgccacgggccctggacttttctggacacacacaccctgtggcaacctttcagcccagcagaccagagtccgtgaatgacttgttcctctgtccccaaaaggaactgaccagaggggtcaggccgacgcctcgagtcagggccccagccacccaacagacaagatggaagaaggaccttgcagaggacgaagaggaggaggatgaggaggacacagaagatggcgtcagcttccagccctacattgaaccaccttctttcctggggcaagagcaccaggctccagggcactcggaggctggtggggtggactcagggaggcccagggctcctctggtcccaagcgaaggctcctctgcttgggattcttcagacagaagctgggccagcactgtggactcctcctgggacagggctgggtcctctggctatttggctgagaaggggccaggccaagggccgggtggggatgggcaccaagaatctctcccaccacctgaattctccaaggactcgggtttcctggaagagctcccagaagataacctctcctcctgggccacctggggcaccttaccaccggagccgaatctggtccctgggggacccccagtttctcttcagacactgaccttctgctgggaaagcagccctgaggaggaagaggaggcgagggaatcagaaattgaggacagcgatgcgggcagctggggggctgagagcacccagaggaccgaggacaggggccggacattggggcattacatggccaggtgagctgtcccccgacatcccaccgaatctgatgctgctgctgcctttgcaaggactactgggcttcccaagaaactcaagagcctccgtacctcccctgggcggcggaggggcattgcacttccgggaagtccacctagcggctgtttgcctgtcgggctgagcaacaagatgcccctccctcctgtgacccgccctctttaggctgagctataagaggggtggacacagggtgggctgaggtcagaggttggtggggtgtcatcacccccattgtccctagggtgacaggccagggggaaaaattatccccggacaacatgaaacaggtgaggtcaggtcactgcggacatcaagggcggacaccaccaaggggccctctggaacttgagaccactggaggcacacctgctatacctcatgcctttcccagcagccactgaactcccccatcccagggctcagcctcctgattcatgggtcccctagttaggcccagataaaaatccagttggctgagggttttggatgggaagggaagggtggctgtcctcaaatcctggtctttggagtcatggcactgtacggttttagtgtcagacagaccggggttcaaatcccagctctgctgttcactggttgtatgatcttggggaagacatcttccttctctgcctcggcttcctcatctgcagctacgcctgggtgtggtgagggttctaggggatctcagatgtgtgtagcacggagcctgctgtgtcctgggtgctctctacgtggtggccggtagaattctccatctatccaggctccaggagacccctgggcatctcccacctgtggcccctaaacccagagtgactgagagcacttaacattcagcttgtctcatccccagtctacctccttccttctaccctcactgcctcccagtcaggagagtgagctctcagaagccagagccccacccaaggggaccctggtctctccgccttcacctagcaatgggaaccctgcttcccaggggaggaaccaactgctccaccttctagggacccagtttgttggagtaggacagtaacatggcaggaatcggacttctgggcctgtaatcccagtttggatggcacgttagactcttggttgaccgttgtggtccttagaagtcccattctcccttccagttatgagaaaccaatgccttctagattcaggtgactatccttacctgggggtgctgatgcatcctcagttaacctacacccacctgaatatagatgagcgtagctgagttttcacccgtaggaccgaagtgttttgtggtggagtatctgaacaaccttggctctgtggccattcaacctgccaggactaacatttctggatttgtgaagaagggatcttcaaagccattgaacccacagagctgtgttgctttaaagccaccacaagggtacagcattaaatggcagaactggaaaagcttcttagggcatctcatccagggattctcaaaccatgtcccccagaggccttgggctgcagttgcagggggcgccatggggctataggagcctcccactttcaccagagcagcctcactgtgccctgattcacacactgtggctttccacgtgaggttttgtttagagggatccactactcaagaaaaagttagcaaaccactccttttgttgcaaaggagctgaggtcaagggtggcaaaggcacttgtccaaggtcgcccagcagtgctgctctgatgacttgtgcacatccccaagggtaagagcttcgatctctgcacagccgggccaacctctgaccccttgtccatgtcagtaaaatatgaaggtcacagccaggatttctaagggtcaggaggccttcaccgctgctggggcacacacacacacatgcatacacacatacgacacacacctgtgtctccccaggggttttccctgcagtgaggcttgtccagatgattgagcccaggagaggaagaacaaacaaactacggagctggggagggctgtggcttggggccagctcccagggaaattcccagacctgtaccgatgttctctctggcaccagccgagctgcttcgtggaggtaacttcaaaaaagtaaaagctatcatcagcatcatcttagacttgtatgaaataaccactccgtttctattcttaaaccttaccatttttgttttgttttgtttttttgagtcggagttttgttctttttgcctaggctggagtgcagtggtacaatctcggctcactgcaacctccacctcccgggttcaagtgattctcctgcctcagcctcccaagtagctgggattacaggcacccgccaccacacctggctaatttttttgtatttttagtagagacggggtttcaccatgttggccaggctggtctcgaactcctgacctcaggtgatccgcccgcctcggcctcccaaagtgctgggattacaggcgtgagccaccgcgcccagccaaaccttactatttttttaaagaattttttccagagtttaatttctgacatagcttaagttttccagtaactctaaactccatctcctttatcgtcattaagtcattcacaaaaagccaggagaagcatttggaaagggcatgataatcagtataataatttgccttgtgtggtcagcacttaactgtttacaaagccctttcacgtgcacagcaggtgggaactgcgcggtgtgggctgggcctgcgctggaagcatatcccgtgaaaagtgttagtgccttaggtgaaagcaacatgtatccctttagactactaacggtatatgttgttcttatgtatttgtatttatttctattttttctatgtttatgtcatatttaaacgatatcctactgcttgttggtattaccctaaactgtttaaataaagagctctatttttaaagaaaaaaggtacaattga

SEQ ID NO: 14779 - DNA, 1476 bp, Homo sapiens
  source 1..1476: mol_type = unassigned DNA
cggcaggaaggccatggcggggcccgagcgctggggccccctgctcctgtgcctgctgcaggccgctccagggaggccccgtctggcccctccccagaatgtgacgctgctctcccagaacttcagcgtgtacctgacatggctcccagggcttggcaacccccaggatgtgacctattttgtggcctatcagagctctcccacccgtagacggtggcgcgaagtggaagagtgtgcgggaaccaaggagctgctatgttctatgatgtgcctgaagaaacaggacctgtacaacaagttcaagggacgcgtgcggacggtttctcccagctccaagtccccctgggtggagtccgaatacctggattacctttttgaagtggagccggccccacctgtcctggtgctcacccagacggaggagatcctgagtgccaatgccacgtaccagctgcccccctgcatgcccccactggatctgaagtatgaggtggcattctggaaggagggggccggaaacaagaccctatttccagtcactccccatggccagccagtccagatcactctccagccagctgccagcgaacaccactgcctcagtgccagaaccatctacacgttcagtgtcccgaaatacagcaagttctctaagcccacctgcttcttgctggaggtcccaggacttttctggacacacacaccctgtggcaacctttcagcccagcagaccagagtccgtgaatgacttgttcctctgtccccaaaaggaactgaccagaggggtcaggccgacgcctcgagtcagggccccagccacccaacagacaagatggaagaaggaccttgcagaggacgaagaggaggaggatgaggaggacacagaagatggcgtcagcttccagccctacattgaaccaccttctttcctggggcaagagcaccaggctccagggcactcggaggctggtggggtggactcagggaggcccagggctcctctggtcccaagcgaaggctcctctgcttgggattcttcagacagaagctgggccagcactgtggactcctcctgggacagggctgggtcctctggctatttggctgagaaggggccaggccaagggccgggtggggatgggcaccaagaatctctcccaccacctgaattctccaaggactcgggtttcctggaagagctcccagaagataacctctcctcctgggccacctggggcaccttaccaccggagccgaatctggtccctgggggacccccagtttctcttcagacactgaccttctgctgggaaagcagccctgaggaggaagaggaggcgagggaatcagaaattgaggacagcgatgcgggcagctggggggctgagagcacccagaggaccgaggacaggggccggacattggggcattacatggccaggtgagctgtcccccgacatcccaccgaatctgatg

SEQ ID NO: 14780 - DNA, 674 bp, Homo sapiens
  source 1..674: mol_type = unassigned DNA
atggcggggcccgagcgctggggccccctgctcctgtgcctgctgcaggccgctccagggaggccccgtctggcccctccccagaatgtgacgctgctctcccagaacttcagcgtgtacctgacatggctcccagggcttggcaacccccaggatgtgacctattttgtggcctatcagagctctcccacccgtagacggtggcgcgaagtggaagagtgtgcgggaaccaaggagctgctatgttctatgatgtgcctgaagaaacaggacctgtacaacaagttcaagggacgcgtgcggacggtttctcccagctccaagtccccctgggtggagtccgaatacctggattacctttttgaagtggagccggccccacctgtcctggtgctcacccagacggaggagatcctgagtgccaatgccacgtaccagctgcccccctgcatgcccccactggatctgaagtatgaggtggcattctggaaggagggggccggaaacaaggtgggaagctcctttcctgcccccaggctaggcccgctcctccaccccttcttactcaggttcttctcaccctcccagcctgctcctgcacccctcctccaggaagtcttccctgtacactcctgacttctggcagtcagccctaataaaatctgatcaaagta

SEQ ID NO: 14781 - DNA, 953 bp, Homo sapiens
  source 1..953: mol_type = unassigned DNA
tcctcctaaagggccgcataatattgcgcgtcgtggcgtgtgccttactgggaagctactgctgtccaggtgaacaccacagccttcggggtcagaaagacagctttccccagaacaagcacctgaagctctggggcctgccgctccccgggagagaaggaggccccgtctggcccctccccagaatgtgacgctgctctcccagaacttcagcgtgtacctgacatggctcccagggcttggcaacccccaggatgtgacctattttgtggcctatcagagctctcccacccgtagacggtggcgcgaagtggaagagtgtgcgggaaccaaggagctgctatgttctatgatgtgcctgaagaaacaggacctgtacaacaagttcaagggacgcgtgcggacggtttctcccagctccaagtccccctgggtggagtccgaatacctggattacctttttgaagtggagccggccccacctgtcctggtgctcacccagacggaggagatcctgagtgccaatgccacgtaccagctgcccccctgcatgcccccactggatctgaagtatgaggtggcattctggaaggagggggccggaaacaagaccctatttccagtcactccccatggccagccagtccagatcactctccagccagctgccagcgaacaccactgcctcagtgccagaaccatctacacgttcagtgtcccgaaatacagcaagttctctaagcccacctgcttcttgctggaggtcccagaagccaactgggctttcctggtgctgccatcgcttctgatactgctgttagtaattgccgcagggggtgtgatctggaagaccctcatggggaacccctggtttcagcgggcaaagatgccacgggccctggtatagcaaatctgggggtgtgcagcaggtggggaggggttgagagtaaggg

SEQ ID NO: 14782 - DNA, 1476 bp, Homo sapiens
  source 1..1476: mol_type = unassigned DNA
atggcggggcccgagcgctggggccccctgctcctgtgcctgctgcaggccgctccagggaggccccgtctggcccctccccagaatgtgacgctgctctcccagaacttcagcgtgtacctgacatggctcccagggcttggcaacccccaggatgtgacctattttgtggcctatcagagctctcccacccgtagacggtggcgcgaagtggaagagtgtgcgggaaccaaggagctgctatgttctatgatgtgcctgaagaaacaggacctgtacaacaagttcaagggacgcgtgcggacggtttctcccagctccaagtccccctgggtggagtccgaatacctggattacctttttgaagtggagccggccccacctgtcctggtgctcacccagacggaggagatcctgagtgccaatgccacgtaccagctgcccccctgcatgcccccactggatctgaagtatgaggtggcattctggaaggagggggccggaaacaagaccctatttccagtcactccccatggccagccagtccagatcactctccagccagctgccagcgaacaccactgcctcagtgccagaaccatctacacgttcagtgtcccgaaatacagcaagttctctaagcccacctgcttcttgctggaggtcccagaagccaactgggctttcctggtgctgccatcgcttctgatactgctgttagtaattgccgcagggggtgtgatctggaagaccctcatggggaacccctggtttcagcgggcaaagatgccacgggccctggaactgaccagaggggtcaggccgacgcctcgagtcagggccccagccacccaacagacaagatggaagaaggaccttgcagaggacgaagaggaggaggatgaggaggacacagaagatggcgtcagcttccagccctacattgaaccaccttctttcctggggcaagagcaccaggctccagggcactcggaggctggtggggtggactcagggaggcccagggctcctctggtcccaagcgaaggctcctctgcttgggattcttcagacagaagctgggccagcactgtggactcctcctgggacagggctgggtcctctggctatttggctgagaaggggccaggccaagggccgggtggggatgggcaccaagaatctctcccaccacctgaattctccaaggactcgggtttcctggaagagctcccagaagataacctctcctcctgggccacctggggcaccttaccaccggagccgaatctggtccctgggggacccccagtttctcttcagacactgaccttctgctgggaaagcagccctgaggaggaagaggaggcgagggaatcagaaattgaggacagcgatgcgggcagctggggggctgagagcacccagaggaccgaggacaggggccggacattggggcattacatggccaggtga

SEQ ID NO: 14783 - DNA, 1050 bp, Homo sapiens
  source 1..1050: mol_type = unassigned DNA
gaggttccatgtcagataaagatccttccgacgcctgccccacaccaccacctccccccgccttgcccggggttgtgggcaccttgctgctgcacatataaggcgggaggctgttgccaactcttcagagccccacgaaggaccagaacaagacagagtgcctcctgccgatccaaacatgagccgcctgcccgtcctgctcctgctccaactcctggtccgccccggactccaagctcccatgacccagacaacgcccttgaagacaagctgggttaactgctctaacatgatcgatgaaattataacacacttaaagcagccacctttgcctttgctggacttcaacaacctcaatggggaagaccaagacattctgatggaaaataaccttcgaaggccaaacctggaggcattcaacagggctgtcaagagtttacagaacgcatcagcaattgagagcattcttaaaaatctcctgccatgtctgcccctggccacggccgcacccacgcgacatccaatccatatcaaggacggtgactggaatgaattccggaggaaactgacgttctatctgaaaacccttgagaatgcgcaggctcaacagacgactttgagcctcgcgatcttttgagtccaacgtccagctcgttctctgggccttctcaccacagagcctcgggacatcaaaaacagcagaacttctgaaacctctgggtcatctctcacacattccaggaccagaagcatttcaccttttcctgcggcatcagatgaattgttaattatctaatttctgaaatgtgcagctcccatttggccttgtgcggttgtgttctcatttttatcccattgagactatttatttatgtatgtatgtatttatttatttattgcctggagtgtgaactgtatttattttagcagaggagccatgtcctgctgcttctgcaaaaaactcagagtggggtggggagcatgttcatttgtacctcgagttttaaactggttcctagggatgtgtgagaataaactagactctgaaca

SEQ ID NO: 14784 - DNA, 1706 bp, Homo sapiens
  source 1..1706: mol_type = unassigned DNA
gtcaggttcatggttacgaagctgctgaccccaggatcccagcccgtgggagagaagggggtctctgacagcccccacccctccccactgccagatccttattgggtctgagtttcaggggtggggccccagctggaggttataaaacagctcaatcggggagtacaaccttcggtttctcttcggggaaagctgctttcagcgcacacgggaagatatcagaaacatcctaggatcaggacaccccagatcttctcaactggaaccacgaaggctgtttcttccacacagtactttgatctccatttaagcaggcacctctgtcctgcgttccggagctgcgttcccgatggtcctcctttggctcacgctgctcctgatcgccctgccctgtctcctgcaaacgaaggaagatccaaacccaccaatcacgaacctaaggatgaaagcaaaggctcagcagttgacctgggaccttaacagaaatgtgaccgatatcgagtgtgttaaagacgccgactattctatgccggcagtgaacaatagctattgccagtttggagcaatttccttatgtgaagtgaccaactacaccgtccgagtggccaacccaccattctccacgtggatcctcttccctgagaacagtgggaagccttgggcaggtgcggagaatctgacctgctggattcatgacgtggatttcttgagctgcagctgggcggtaggcccgggggcccccgcggacgtccagtacgacctgtacttgaacgttgccaacaggcgtcaacagtacgagtgtcttcactacaaaacggatgctcagggaacacgtatcgggtgtcgtttcgatgacatctctcgactctccagcggttctcaaagttcccacatcctggtgcggggcaggagcgcagccttcggtatcccctgcacagataagtttgtcgtcttttcacagattgagatattaactccacccaacatgactgcaaagtgtaataagacacattcctttatgcactggaaaatgagaagtcatttcaatcgcaaatttcgctatgagcttcagatacaaaagagaatgcagcctgtaatcacagaacaggtcagagacagaacctccttccagctactcaatcctggaacgtacacagtacaaataagagcccgggaaagagtgtatgaattcttgagcgcctggagcaccccccagcgcttcgagtgcgaccaggaggagggcgcaaacacacgtgcctggcggacgtcgctgctgatcgcgctggggacgctgctggccctggtctgtgtcttcgtgatctgcagaaggtatctggtgatgcagagactctttccccgcatccctcacatgaaagaccccatcggtgacagcttccaaaacgacaagctggtggtctgggaggcgggcaaagccggcctggaggagtgtctggtgactgaagtacaggtcgtgcagaaaacttgagactggggttcagggcttgtgggggtctgcctcaatctccctggccgggccaggcgcctgcacagactggctgctggacctgcgcacgcagcccaggaatggacattcctaacgggtggtgggcatgggagatgcctgtgtaatttcgtccgaagctgccaggaagaagaacagaactttgtgtgtttatttcatgataaagtgatttttttttttttaa

SEQ ID NO: 14785 - DNA, 903 bp, Homo sapiens
  source 1..903: mol_type = unassigned DNA
atggtcctcctttggctcacgctgctcctgatcgccctgccctgtctcctgcaaacgaaggaaggtgggaagccttgggcaggtgcggagaatctgacctgctggattcatgacgtggatttcttgagctgcagctgggcggtaggcccgggggcccccgcggacgtccagtacgacctgtacttgaacgttgccaacaggcgtcaacagtacgagtgtcttcactacaaaacggatgctcagggaacacgtatcgggtgtcgtttcgatgacatctctcgactctccagcggttctcaaagttcccacatcctggtgcggggcaggagcgcagccttcggtatcccctgcacagataagtttgtcgtcttttcacagattgagatattaactccacccaacatgactgcaaagtgtaataagacacattcctttatgcactggaaaatgagaagtcatttcaatcgcaaatttcgctatgagcttcagatacaaaagagaatgcagcctgtaatcacagaacaggtcagagacagaacctccttccagctactcaatcctggaacgtacacagtacaaataagagcccgggaaagagtgtatgaattcttgagcgcctggagcaccccccagcgcttcgagtgcgaccaggaggagggcgcaaacacacgtgcctggcggacgtcgctgctgatcgcgctggggacgctgctggccctggtctgtgtcttcgtgatctgcagaaggtatctggtgatgcagagactctttccccgcatccctcacatgaaagaccccatcggtgacagcttccaaaacgacaagctggtggtctgggaggcgggcaaagccggcctggaggagtgtctggtgactgaagtacaggtcgtgcagaaaacttga

SEQ ID NO: 14786 - DNA, 662 bp, Homo sapiens
  source 1..662: mol_type = unassigned DNA
cttcggggaaagctgctttcagcgcacacgggaagatatcagaaacatcctaggatcaggacaccccagatcttctcaactggaaccacgaaggctgtttcttccacacagtactttgatctccatttaagcaggcacctctgtcctgcgttccggagctgcgttcccgatggtcctcctttggctcacgctgctcctgatcgccctgccctgtctcctgcaaacgaaggaaggtgggaagccttgggcaggtgcggagaatctgacctgctggattcatgacgtggatttcttgagctgcagctgggcggtaggcccgggggcccccgcggacgtccagtacgacctgtacttgaacgttgccaacaggcgtcaacagtacgagtgtcttcactacaaaacggatgctcagggaacacgtatcgggtgtcgtttcgatgacatctctcgactctccagcggttctcaaagttcccacatcctggtgcggggcaggagcgcagccttcggtatcccctgcacagataagtttgtcgtcttttcacagattgagatattaactccacccaacatgactgcaaagtgtaataagacacattcctttatgcactggaaaatgagaagtcatttcaatcgcaaatttcgctatgagcttcagatac

SEQ ID NO: 14787 - DNA, 2212 bp, Homo sapiens
  source 1..2212: mol_type = unassigned DNA
ttaacaataatgcaatccatttcccagcataagtgggtaagtgccactttgacttgggctgggcttaaaagcacaagaaaagctcgcagacaatcagagtggaaacactcccacatcttagtgtggataaattaaagtccagattgttcttcctgtcctgacttgtgctgtgggaggtggagttgcctttgatgcaaatcctttgagccagcagaacatctgtggaacatcccctgatacatgaagctctctccccagccttcatgtgttaacctggggatgatgtggacctgggcactgtggatgctcccctcactctgcaaattcagcctggcagcgcttttggagaaaaacatgataattgtacaaccaatagttctacaagtgaaaatcgtgcttcgtgctcttttttccttccaagaataacgatcccagataattataccattgaggtggaagctgaaaatggagatggtgtaattaaatctcatatgacatactggagattagagaacatagcgaaaactgaaccacctaagattttccgtgtgaaaccagttttgggcatcaaacgaatgattcaaattgaatggataaagcctgagttggcgcctgtttcatctgatttaaaatacacacttcgattcaggacagtcaacagtaccagctggatggaagtcaacttcgctaagaaccgtaaggataaaaaccaaacgtacaacctcacggggctgcagccttttacagaatatgtcatagctctgcgatgtgcggtcaaggagtcaaagttctggagtgactggagccaagaaaaaatgggaatgactgaggaagaagctccatgtggcctggaactgtggagagtcctgaaaccagctgaggcggatggaagaaggccagtgcggttgttatggaagaaggcaagaggagccccagtcctagagaaaacacttggctacaacatatggtactatccagaaagcaacactaacctcacagaaacaatgaacactactaaccagcagcttgaactgcatctgggaggcgagagcttttgggtgtctatgatttcttataattctcttgggaagtctccagtggccaccctgaggattccagctattcaagaaaaatcatttcagtgcattgaggtcatgcaggcctgcgttgctgaggaccagctagtggtgaagtggcaaagctctgctctagacgtgaacacttggatgattgaatggtttccggatgtggactcagagcccaccaccctttcctgggaatctgtgtctcaggccacgaactggacgatccagcaagataaattaaaacctttctggtgctataacatctctgtgtatccaatgttgcatgacaaagttggcgagccatattccatccaggcttatgccaaagaaggcgttccatcagaaggtcctgagaccaaggtggagaacattggcgtgaagacggtcacgatcacatggaaagagattcccaagagtgagagaaagggtatcatctgcaactacaccatcttttaccaagctgaaggtggaaaaggattctgtaagcacgcccatagcgaagtggaaaaaaaccccaagccccagatagatgctatggatagacctgttgtaggcatggctcccccatctcattgtgacttgcaacctggcatgaatcacttagcttctttaaatctctctgaaaatggggccaagagcacccaccttttggggttttgggggttaaatgagagtgaagtgacagtacctgagaggagagtcctgaggaaatggaaggagttgttataatttgtcctggttaggccctgaattgacctcccgggagctccccgaccatcattcccaggaatggcgtgcctggcttaaagagtgaggaggaacagaccctgtcaccatgacttctactgcccctgccaaatcatgcttttgtttttcagtccaccttatctcctgacatcttaaatactgggcaaggcttggattcttgcttaggctaaataattttttcttatggtaaaatacacgtaaaatatttttccagtttaaacatttgaaagtgtacaatttagtggcattagaagcattcacaatattgtgcaaccatcaccactatttccagaactcttctatttctgcccaaatagaagccctatacccattcattagtcactccccattcctctcct

SEQ ID NO: 14788 - DNA, 2021 bp, Homo sapiens
  source 1..2021: mol_type = unassigned DNA
cagcagaacatctgtggaacatcccctgatacatgaagctctctccccagccttcatgtgttaacctggggatgatgtggacctgggcactgtggatgctcccctcactctgcaaattcagcctggcagctctgccagctaagcctgagaacatttcctgtgtctactactataggaaaaatttaacctgcacttggagtccaggaaaggaaaccagttatacccagtacacagttaagagaacttacgcttttggagaaaaacatgataattgtacaaccaatagttctacaagtgaaaatcgtgcttcgtgctcttttttccttccaagaataacgatcccagataattataccattgaggtggaagctgaaaatggagatggtgtaattaaatctcatatgacatactggagattagagaacatagcgaaaactgaaccacctaagattttccgtgtgaaaccagttttgggcatcaaacgaatgattcaaattgaatggataaagcctgagttggcgcctgtttcatctgatttaaaatacacacttcgattcaggacagtcaacagtaccagctggatggaagtcaacttcgctaagaaccgtaaggataaaaaccaaacgtacaacctcacggggctgcagccttttacagaatatgtcatagctctgcgatgtgcggtcaaggagtcaaagttctggagtgactggagccaagaaaaaatgggaatgactgaggaagaagctccatgtggcctggaactgtggagagtcctgaaaccagctgaggcggatggaagaaggccagtgcggttgttatggaagaaggcaagaggagccccagtcctagagaaaacacttggctacaacatatggtactatccagaaagcaacactaacctcacagaaacaatgaacactactaaccagcagcttgaactgcatctgggaggcgagagcttttgggtgtctatgatttcttataattctcttgggaagtctccagtggccaccctgaggattccagctattcaagaaaaatcatttcagtgcattgaggtcatgcaggcctgcgttgctgaggaccagctagtggtgaagtggcaaagctctgctctagacgtgaacacttggatgattgaatggtttccggatgtggactcagagcccaccaccctttcctgggaatctgtgtctcaggccacgaactggacgatccagcaagataaattaaaacctttctggtgctataacatctctgtgtatccaatgttgcatgacaaagttggcgagccatattccatccaggcttatgccaaagaaggcgttccatcagaaggtcctgagaccaaggtggagaacattggcgtgaagacggtcacgatcacatggaaagagattcccaagagtgagagaaagggtatcatctgcaactacaccatcttttaccaagctgaaggtggaaaaggattctccaagacagtcaattccagcatcttgcagtacggcctggagtccctgaaacgaaagacctcttacattgttcaggtcatggccagcaccagtgctgggggaaccaacgggaccagcataaatttcaagacattgtcattcagtgtctttgagattatcctcataacttctctgattggtggaggccttcttattctcattatcctgacagtggcatatggtctcaaaaaacccaacaaattgactcatctgtgttggcccaccgttcccaaccctgctgaaagtagtatagccacatggcatggagatgatttcaaggataagctaaacctgaaggagtctgatgactctgtgaacacagaagacaggatcttaaaaccatgttccacccccagtgacaagttggtgattgacaagttggtggtgaactttgggaatgttctgcaagaaattttcacagatgaagccagaacgggtcaggaaaacaatttaggaggggaaaagaatgggactagaattctgtcttcctgcccaacttcaatataa

SEQ ID NO: 14789 - DNA, 2529 bp, Homo sapiens
  source 1..2529: mol_type = unassigned DNA
tgtgtgtgcagtatgaaaattgagacaggaaggcagagtgtcagcttgttccacctcagctgggaatgtgcatcaggcaactcaagtttttcaccacggcatgtgtctgtgaatgtccgcaaaacattctctctccccagccttcatgtgttaacctggggatgatgtggacctgggcactgtggatgctcccctcactctgcaaattcagcctggcagctctgccagctaagcctgagaacatttcctgtgtctactactataggaaaaatttaacctgcacttggagtccaggaaaggaaaccagttatacccagtacacagttaagagaacttacgcttttggagaaaaacatgataattgtacaaccaatagttctacaagtgaaaatcgtgcttcgtgctcttttttccttccaagaataacgatcccagataattataccattgaggtggaagctgaaaatggagatggtgtaattaaatctcatatgacatactggagattagagaacatagcgaaaactgaaccacctaagattttccgtgtgaaaccagttttgggcatcaaacgaatgattcaaattgaatggataaagcctgagttggcgcctgtttcatctgatttaaaatacacacttcgattcaggacagtcaacagtaccagctggatggaagtcaacttcgctaagaaccgtaaggataaaaaccaaacgtacaacctcacggggctgcagccttttacagaatatgtcatagctctgcgatgtgcggtcaaggagtcaaagttctggagtgactggagccaagaaaaaatgggaatgactgaggaagaagctccatgtggcctggaactgtggagagtcctgaaaccagctgaggcggatggaagaaggccagtgcggttgttatggaagaaggcaagaggagccccagtcctagagaaaacacttggctacaacatatggtactatccagaaagcaacactaacctcacagaaacaatgaacactactaaccagcagcttgaactgcatctgggaggcgagagcttttgggtgtctatgatttcttataattctcttgggaagtctccagtggccaccctgaggattccagctattcaagaaaaatcatttcagtgcattgaggtcatgcaggcctgcgttgctgaggaccagctagtggtgaagtggcaaagctctgctctagacgtgaacacttggatgattgaatggtttccggatgtggactcagagcccaccaccctttcctgggaatctgtgtctcaggccacgaactggacgatccagcaagataaattaaaacctttctggtgctataacatctctgtgtatccaatgttgcatgacaaagttggcgagccatattccatccaggcttatgccaaagaaggcgttccatcagaaggtcctgagaccaaggtggagaacattggcgtgaagacggtcacgatcacatggaaagagattcccaagagtgagagaaagggtatcatctgcaactacaccatcttttaccaagctgaaggtggaaaaggattctccaagacagtcaattccagcatcttgcagtacggcctggagtccctgaaacgaaagacctcttacattgttcaggtcatggccagcaccagtgctgggggaaccaacgggaccagcataaatttcaagacattgtcattcagtgtctttgagattatcctcataacttctctgattggtggaggccttcttattctcattatcctgacagtggcatatggtctcaaaaaacccaacaaattgactcatctgtgttggcccaccgttcccaaccctgctgaaagtagtatagccacatggcatggagatgatttcaaggataagctaaacctgaaggagtctgatgactctgtgaacacagaagacaggatcttaaaaccatgttccacccccagtgacaagttggtgattgacaagttggtggtgaactttgggaatgttctgcaagaaattttcacagatgaagccagaacgggtcaggaaaacaatttaggaggggaaaagaatgggactagaattctgtcttcctgcccaacttcaatataagtgtggactaaaatgcgagaaaggtgtcctgtggtctatgcaaattagaaaggacatgcagagttttccaactaggaagactgaatctgtggccccaagagaaccatctctgaagactgggtatgtggtcttttccacacatggaccacctacggatgcaatctgtaatgcatgtgcatgagaagtctgttattaagtagagtgtgaaaacatggttatggtaataggaacagcttttaaaatgcttttgtatttgggcctttcatacaaaaaagccataataccattttcatgtaatgctatacttctatactattttcatgtaatactatacttctatactattttcatgtaatactatacttctatactattttcatgtaatactatacttctatattaaagttttacccactca

SEQ ID NO: 14790 - DNA, 2903 bp, Homo sapiens
  source 1..2903: mol_type = unassigned DNA
tgaaaagacatgtgtgtgcagtatgaaaattgagacaggaaggcagagtgtcagcttgttccacctcagctgggaatgtgcatcaggcaactcaagtttttcaccacggcatgtgtctgtgaatgtccgcaaaacattagtttcactcttgtcgccaggttggagtacaatggcacgatcttggctcactgcaacctctgcctcccgggttcaagcgattctcctgcctcagcctcccgagtagctgggattacagttaacaataatgcaatccatttcccagcataagtgggtaagtgccactttgacttgggctgggcttaaaagcacaagaaaagctcgcagacaatcagagtggaaacactcccacatcttagtgtggataaattaaagtccagattgttcttcctgtcctgacttgtgctgtgggaggtggagttgcctttgatgcaaatcctttgagccagcagaacatctgtggaacatcccctgatacatgaagctctctccccagccttcatgtgttaacctggggatgatgtggacctgggcactgtggatgctcccctcactctgcaaattcagcctggcagctctgccagctaagcctgagaacatttcctgtgtctactactataggaaaaatttaacctgcacttggagtccaggaaaggaaaccagttatacccagtacacagttaagagaacttacgcttttggagaaaaacatgataattgtacaaccaatagttctacaagtgaaaatcgtgcttcgtgctcttttttccttccaagaataacgatcccagataattataccattgaggtggaagctgaaaatggagatggtgtaattaaatctcatatgacatactggagattagagaacatagcgaaaactgaaccacctaagattttccgtgtgaaaccagttttgggcatcaaacgaatgattcaaattgaatggataaagcctgagttggcgcctgtttcatctgatttaaaatacacacttcgattcaggacagtcaacagtaccagctggatggaagtcaacttcgctaagaaccgtaaggataaaaaccaaacgtacaacctcacggggctgcagccttttacagaatatgtcatagctctgcgatgtgcggtcaaggagtcaaagttctggagtgactggagccaagaaaaaatgggaatgactgaggaagaagctccatgtggcctggaactgtggagagtcctgaaaccagctgaggcggatggaagaaggccagtgcggttgttatggaagaaggcaagaggagccccagtcctagagaaaacacttggctacaacatatggtactatccagaaagcaacactaacctcacagaaacaatgaacactactaaccagcagcttgaactgcatctgggaggcgagagcttttgggtgtctatgatttcttataattctcttgggaagtctccagtggccaccctgaggattccagctattcaagaaaaatcatttcagtgcattgaggtcatgcaggcctgcgttgctgaggaccagctagtggtgaagtggcaaagctctgctctagacgtgaacacttggatgattgaatggtttccggatgtggactcagagcccaccaccctttcctgggaatctgtgtctcaggccacgaactggacgatccagcaagataaattaaaacctttctggtgctataacatctctgtgtatccaatgttgcatgacaaagttggcgagccatattccatccaggcttatgccaaagaaggcgttccatcagaaggtcctgagaccaaggtggagaacattggcgtgaagacggtcacgatcacatggaaagagattcccaagagtgagagaaagggtatcatctgcaactacaccatcttttaccaagctgaaggtggaaaaggattctccaagacagtcaattccagcatcttgcagtacggcctggagtccctgaaacgaaagacctcttacattgttcaggtcatggccagcaccagtgctgggggaaccaacgggaccagcataaatttcaagacattgtcattcagtgtctttgagattatcctcataacttctctgattggtggaggccttcttattctcattatcctgacagtggcatatggtctcaaaaaacccaacaaattgactcatctgtgttggcccaccgttcccaaccctgctgaaagtagtatagccacatggcatggagatgatttcaaggataagctaaacctgaaggagtctgatgactctgtgaacacagaagacaggatcttaaaaccatgttccacccccagtgacaagttggtgattgacaagttggtggtgaactttgggaatgttctgcaagaaattttcacagatgaagccagaacgggtcaggaaaacaatttaggaggggaaaagaatgggactagaattctgtcttcctgcccaacttcaatataagtgtggactaaaatgcgagaaaggtgtcctgtggtctatgcaaattagaaaggacatgcagagttttccaactaggaagactgaatctgtggccccaagagaaccatctctgaagactgggtatgtggtcttttccacacatggaccacctacggatgcaatctgtaatgcatgtgcatgagaagtctgttattaagtagagtgtgaaaacatggttatggtaataggaacagcttttaaaatgcttttgtatttgggcctttcatacaaaaaagccataataccattttcatgtaatgctatacttctatactattttcatgtaatactatacttctatactattttcatgtaatactatacttctatactattttcatgtaatactatacttctatattaaagttttacccactca

SEQ ID NO: 14791 - DNA, 2426 bp, Homo sapiens
  source 1..2426: mol_type = unassigned DNA
caccagacagcactccagcactctgcttggggggcattcgaaacagcaaaatcactcataaaaggcaaaaaattgcaaaaaaaaatagtaataaccagcatggcactaaatagaccatgaaaagacatgtgtgtgcagtatgaaaattgagacaggaaggcagagtgtcagcttgttccacctcagctgggaatgtgcatcaggcaactcaagtttttcaccacggcatgtgtctgtgaatgtccgcaaaacattctctctccccagccttcatgtgttaacctggggatgatgtggacctgggcactgtggatgctcccctcactctgcaaattcagcctggcagctctgccagctaagcctgagaacatttcctgtgtctactactataggaaaaatttaacctgcacttggagtccaggaaaggaaaccagttatacccagtacacagttaagagaacttacgcttttggagaaaaacatgataattgtacaaccaatagttctacaagtgaaaatcgtgcttcgtgctcttttttccttccaagaataacgatcccagataattataccattgaggtggaagctgaaaatggagatggtgtaattaaatctcatatgacatactggagattagagaacatagcgaaaactgaaccacctaagattttccgtgtgaaaccagttttgggcatcaaacgaatgattcaaattgaatggataaagcctgagttggcgcctgtttcatctgatttaaaatacacacttcgattcaggacagtcaacagtaccagctggatggaagtcaacttcgctaagaaccgtaaggataaaaaccaaacgtacaacctcacggggctgcagccttttacagaatatgtcatagctctgcgatgtgcggtcaaggagtcaaagttctggagtgactggagccaagaaaaaatgggaatgactgaggaagaagctccatgtggcctggaactgtggagagtcctgaaaccagctgaggcggatggaagaaggccagtgcggttgttatggaagaaggcaagaggagccccagtcctagagaaaacacttggctacaacatatggtactatccagaaagcaacactaacctcacagaaacaatgaacactactaaccagcagcttgaactgcatctgggaggcgagagcttttgggtgtctatgatttcttataattctcttgggaagtctccagtggccaccctgaggattccagctattcaagaaaaatcatttcagtgcattgaggtcatgcaggcctgcgttgctgaggaccagctagtggtgaagtggcaaagctctgctctagacgtgaacacttggatgattgaatggtttccggatgtggactcagagcccaccaccctttcctgggaatctgtgtctcaggccacgaactggacgatccagcaagataaattaaaacctttctggtgctataacatctctgtgtatccaatgttgcatgacaaagttggcgagccatattccatccaggcttatgccaaagaaggcgttccatcagaaggtcctgagaccaaggtggagaacattggcgtgaagacggtcacgatcacatggaaagagattcccaagagtgagagaaagggtatcatctgcaactacaccatcttttaccaagctgaaggtggaaaaggattctgtaagcacgcccatagcgaagtggaaaaaaaccccaagccccagatagatgctatggatagacctgttgtaggcatggctcccccatctcattgtgacttgcaacctggcatgaatcacttagcttctttaaatctctctgaaaatggggccaagagcacccaccttttggggttttgggggttaaatgagagtgaagtgacagtacctgagaggagagtcctgaggaaatggaaggagttgttataatttgtcctggttaggccctgaattgacctcccgggagctccccgaccatcattcccaggaatggcgtgcctggcttaaagagtgaggaggaacagaccctgtcaccatgacttctactgcccctgccaaatcatgcttttgtttttcagtccaccttatctcctgacatcttaaatactgggcaaggcttggattcttgcttaggctaaataattttttcttatggtaaaatacacgtaaaatatttttccagtttaaacatttgaaagtgtacaatttagtggcattagaagcattcacaatattgtgcaaccatcaccactatttccagaactcttctatttctgcccaaatagaagccctatacccattcattagtcactccccattcctctcctcccacagcccctggcaactaccaaactgctttgtgtctctatggattgcctattttggatatttcatatacatagaatcataaaata

SEQ ID NO: 14792 - DNA, 2577 bp, Homo sapiens
  source 1..2577: mol_type = unassigned DNA
tgtgtgtgcagtatgaaaattgagacaggaaggcagagtgtcagcttgttccacctcagctgggaatgtgcatcaggcaactcaagtttttcaccacggcatgtgtctgtgaatgtccgcaaaacattctctctccccagccttcatgtgttaacctggggatgatgtggacctgggcactgtggatgctcccctcactctgcaaattcagcctggcagctctgccagctaagcctgagaacatttcctgtgtctactactataggaaaaatttaacctgcacttggagtccaggaaaggaaaccagttatacccagtacacagttaagagaacttacgcttttggagaaaaacatgataattgtacaaccaatagttctacaagtgaaaatcgtgcttcgtgctcttttttccttccaagaataacgatcccagataattataccattgaggtggaagctgaaaatggagatggtgtaattaaatctcatatgacatactggagattagagaacatagcgaaaactgaaccacctaagattttccgtgtgaaaccagttttgggcatcaaacgaatgattcaaattgaatggataaagcctgagttggcgcctgtttcatctgatttaaaatacacacttcgattcaggacagtcaacagtaccagctggatggaagtcaacttcgctaagaaccgtaaggataaaaaccaaacgtacaacctcacggggctgcagccttttacagaatatgtcatagctctgcgatgtgcggtcaaggagtcaaagttctggagtgactggagccaagaaaaaatgggaatgactgaggaagaagctccatgtggcctggaactgtggagagtcctgaaaccagctgaggcggatggaagaaggccagtgcggttgttatggaagaaggcaagaggagccccagtcctagagaaaacacttggctacaacatatggtactatccagaaagcaacactaacctcacagaaacaatgaacactactaaccagcagcttgaactgcatctgggaggcgagagcttttgggtgtctatgatttcttataattctcttgggaagtctccagtggccaccctgaggattccagctattcaagaaaaatcatttcagtgcattgaggtcatgcaggcctgcgttgctgaggaccagctagtggtgaagtggcaaagctctgctctagacgtgaacacttggatgattgaatggtttccggatgtggactcagagcccaccaccctttcctgggaatctgtgtctcaggccacgaactggacgatccagcaagataaattaaaacctttctggtgctataacatctctgtgtatccaatgttgcatgacaaagttggcgagccatattccatccaggcttatgccaaagaaggcgttccatcagaaggtcctgagaccaaggtggagaacattggcgtgaagacggtcacgatcacatggaaagagattcccaagagtgagagaaagggtatcatctgcaactacaccatcttttaccaagctgaaggtggaaaaggattctccaagacagtcaattccagcatcttgcagtacggcctggagtccctgaaacgaaagacctcttacattgttcaggtcatggccagcaccagtgctgggggaaccaacgggaccagcataaatttcaagacattgtcattcagtgtctttgagattatcctcataacttctctgattggtggaggccttcttattctcattatcctgacagtggcatatggtctcaaaaaacccaacaaattgactcatctgtgttggcccaccgttcccaaccctgctgaaagtagtatagccacatggcatggagatgatttcaaggataagctaaacctgaaggagtctgatgactctgtgaacacagaagacaggatcttaaaaccatgttccacccccagtgacaagttggtgattgacaagttggtggtgaactttgggaatgttctgcaagaaattttcacagatgaagccagaacgggtcaggaaaacaatttaggaggggaaaagaatgggtatgtgacctgccccttcaggcctgattgtcccctggggaaaagttttgaggagctcccagtttcacctgagattccgcccagaaaatcccaatacctacgttcgaggatgccagaggggacccgcccagaagccaaagagcagcttctcttttctggtcaaagtttagtaccagatcatctgtgtgaggaaggagccccaaatccatatttgaaaaattcagtgacagccagggaatttcttgtgtctgaaaaacttccagagcacaccaagggagaagtctaaatgcgaccatagcatgagaccctcggggcctcagtgtggatggcccttgccagagaagatgtcaagactcggcacgcagcgcttgcttggccctgccacatcctgcctaggttaaagtttcccctgccccttgagctgccagttgaacttggtcggcaaagatgcgaccttgtactgggaagaagggatggtgataagcccgagttttgtaaaggaa

SEQ ID NO: 14793 - DNA, 2414 bp, Homo sapiens
  source 1..2414: mol_type = unassigned DNA
cagcagaacatctgtggaacatcccctgatacatgaagctctctccccagccttcatgtgttaacctggggatgatgtggacctgggcactgtggatgctcccctcactctgcaaattcagcctggcagttcctaacaggccatggacccgtaccttgcccagcggttgaggaatcctgctagactacagcctggcaacctcccccggacttgctgtacctggtgaaataggctaccagccagatgaccttggtgcatgggacccatccgcatctctgccagctaagcctgagaacatttcctgtgtctactactataggaaaaatttaacctgcacttggagtccaggaaaggaaaccagttatacccagtacacagttaagagaacttacgcttttggagaaaaacatgataattgtacaaccaatagttctacaagtgaaaatcgtgcttcgtgctcttttttccttccaagaataacgatcccagataattataccattgaggtggaagctgaaaatggagatggtgtaattaaatctcatatgacatactggagattagagaacatagcgaaaactgaaccacctaagattttccgtgtgaaaccagttttgggcatcaaacgaatgattcaaattgaatggataaagcctgagttggcgcctgtttcatctgatttaaaatacacacttcgattcaggacagtcaacagtaccagctggatggaagtcaacttcgctaagaaccgtaaggataaaaaccaaacgtacaacctcacggggctgcagccttttacagaatatgtcatagctctgcgatgtgcggtcaaggagtcaaagttctggagtgactggagccaagaaaaaatgggaatgactgaggaagaagctccatgtggcctggaactgtggagagtcctgaaaccagctgaggcggatggaagaaggccagtgcggttgttatggaagaaggcaagaggagccccagtcctagagaaaacacttggctacaacatatggtactatccagaaagcaacactaacctcacagaaacaatgaacactactaaccagcagcttgaactgcatctgggaggcgagagcttttgggtgtctatgatttcttataattctcttgggaagtctccagtggccaccctgaggattccagctattcaagaaaaatcatttcagtgcattgaggtcatgcaggcctgcgttgctgaggaccagctagtggtgaagtggcaaagctctgctctagacgtgaacacttggatgattgaatggtttccggatgtggactcagagcccaccaccctttcctgggaatctgtgtctcaggccacgaactggacgatccagcaagataaattaaaacctttctggtgctataacatctctgtgtatccaatgttgcatgacaaagttggcgagccatattccatccaggcttatgccaaagaaggcgttccatcagaaggtcctgagaccaaggtggagaacattggcgtgaagacggtcacgatcacatggaaagagattcccaagagtgagagaaagggtatcatctgcaactacaccatcttttaccaagctgaaggtggaaaaggattctccaagacagtcaattccagcatcttgcagtacggcctggagtccctgaaacgaaagacctcttacattgttcaggtcatggccagcaccagtgctgggggaaccaacgggaccagcataaatttcaagacattgtcattcagtgtctttgagattatcctcataacttctctgattggtggaggccttcttattctcattatcctgacagtggcatatggtctcaaaaaacccaacaaattgactcatctgtgttggcccaccgttcccaaccctgctgaaagtagtatagccacatggcatggagatgatttcaaggataagctaaacctgaaggagtctgatgactctgtgaacacagaagacaggatcttaaaaccatgttccacccccagtgacaagttggtgattgacaagttggtggtgaactttgggaatgttctgcaagaaattttcacagatgaagccagaacgggtcaggaaaacaatttaggaggggaaaagaatgggtatgtgacctgccccttcaggcctgattgtcccctggggaaaagttttgaggagctcccagtttcacctgagattccgcccagaaaatcccaatacctacgttcgaggatgccagaggggacccgcccagaagccaaagagcagcttctcttttctggtcaaagtttagtaccagatcatctgtgtgaggaaggagccccaaatccatatttgaaaaattcagtgacagccagggaatttcttgtgtctgaaaaacttccagagcacaccaagggagaagtctaa

SEQ ID NO: 14794 - DNA, 2672 bp, Homo sapiens
  source 1..2672: mol_type = unassigned DNA
ggagagtcccacctctaacatctcctgtaggcctggcaatggcaggcaggaaagacagaggaaggaaggagggagaagggaaggagtgaaggaaggagtgaaaaaggggagtctacaccctgtggagctcaagatggtcctgagtggggcgctgtgcttccgaatgaaggactcggcattgaaggtgctttatctgcataataaccagcttctagctggagggctgcatgcagggaaggtcattaaaggtgaagagatcagcgtggtccccaatcggtggctggatgccagcctgtcccccgtcatcctgggtgtccagggtggaagccagtgcctgtcatgtggggtggggcaggagccgactctaacactagagccagtgaacatcatggagctctatcttggtgccaaggaatccaagagcttcaccttctaccggcgggacatggggctcacctccagcttcgagtcggctgcctacccgggctggttcctgtgcacggtgcctgaagccgatcagcctgtcagactcacccagcttcccgagaatggtggctggaatgcccccatcacagacttctacttccagcagtgtgactagggcaacgtgccccccagaactccctgggcagagccagctcgggtgaggggtgagtggaggagacccatggcggacaatcactctctctgctctcaggacccccacgtctgacttagtgggcacctgaccactttgtcttctggttcccagtttggataaattctgagatttggagctcagtccacggtcctcccccactggatggtgctactgctgtggaatcttgtaaaaaccatgtggggtaaactgggaataacatgaaaagatttctgtggaggtggggtgggggagtggtgggaatcattcctgcttaatggtaactgaccagtgttaccctgagccccgcaggccaacccatccccagttgagccttatagggtcagtagctctccacatgaagacctgtcactcaccactatgcaggagagggaggtggtcatagagtcagggatctatggcccttggcccagccccacctccttccctttaatcctgccactgtcatatgctacctttcctatctcttccctcatcatcttgttgtgggcatgaggaggtgctgatgtcagaagaaatggctcgagctcagaagataaaagataagtagggtatgctgatcctcttttaaaaacccaagatacaatcaaaatcccagatgctggtctctattcccatgaaaaagtgctcatgacatattgagaagacctacttacaaagtggcatatattgcaatttattttaattaaaagatacctatttatatatttctttatagaaaaaagtctggaagagtttacttcaattgtagcaatgtcagggtggtggcagtataggtgatttttcttttaattctgttaatttacctgtatttcctaatttttctacaatgaagatgaattccttgtataaaaataagaaaagaaattaatcttgaggtaagcagagtagacatcatctctgattgtcctcagcctccacttccccagagtaaattcaaattgaatcgagctctgctgctctggttggttgtagtagtgatcaggaaacagatctcagcaaagccactgaggaggaggctgtgctgagtttgtgtggctggaatctctgggtaaggaacttaaagaacaaaaatcatctggtaattctttcctagaaggatcacagcccctgggattccaaggcattggatccagtctctaagaaggctgctgtactggttgaattgtgtccccctcaaattcacatccttcttggaatctcagtctgtgagtttatttggagataaggtctctgcagatgtagttagttaagacaaggtcatgctggatgaaggtagacctaaattcaatatgactggtttccttgtatgaaaaggagaggacacagagacagaggagatgcggggaagactatgtaaagatgaaggcagagatcggagttttgcagccacaagctaagaaacaccaaggattgtggcaaccatcagaagcttggaagaggcaaagaagaattcttccctagaggctttagagggataacggctctgctgaaaccttaatctcagacttccagcctcctgaacgaagaaagaataaatttcggctgttttaagccaccaaggataattggttacagcagctctaggaaactaatacagctgctaaaatgatccctgtctcctcgtgtttacattctgtgtgtgtcccctcccacaatgtaccaaagttgtctttgtgaccaatagaatatggcagaagtgatggcatgccacttccaagattaggttataaaagacactgcagcttctacttgagccctctctctctgccacccaccgcccccaatctatcttggctcactcgctctgggggaagctagctgccatgctatgagcaggcctataaagagacttacgtggtaaaaaatgaagtctcctgcccacagccacattagtgaacctagaagcagagactctgtgagataatcgatgtttgttgttttaagttgctcagttttggtctaacttgttatgcagcaatagataaataatatgcagagaaagagaaacaaa

SEQ ID NO: 14795 - DNA, 2700 bp, Homo sapiens
  source 1..2700: mol_type = unassigned DNA
cgctgggaatcctgctcctcctcaggtcctggcagtttcagggcccctccctaggccttacttaaaaggctgaggcatccttggaggaacaggcagactccacagctcccgccaggagaaaggaacattctgaggggagtctacaccctgtggagctcaagatggtcctgagtggggcgctgtgcttccgaatgaaggactcggcattgaaggtgctttatctgcataataaccagcttctagctggagggctgcatgcagggaaggtcattaaaggtgaagagatcagcgtggtccccaatcggtggctggatgccagcctgtcccccgtcatcctgggtgtccagggtggaagccagtgcctgtcatgtggggtggggcaggagccgactctaacactagagccagtgaacatcatggagctctatcttggtgccaaggaatccaagagcttcaccttctaccggcgggacatggggctcacctccagcttcgagtcggctgcctacccgggctggttcctgtgcacggtgcctgaagccgatcagcctgtcagactcacccagcttcccgagaatggtggctggaatgcccccatcacagacttctacttccagcagtgtgactagggcaacgtgccccccagaactccctgggcagagccagctcgggtgaggggtgagtggaggagacccatggcggacaatcactctctctgctctcaggacccccacgtctgacttagtgggcacctgaccactttgtcttctggttcccagtttggataaattctgagatttggagctcagtccacggtcctcccccactggatggtgctactgctgtggaatcttgtaaaaaccatgtggggtaaactgggaataacatgaaaagatttctgtggaggtggggtgggggagtggtgggaatcattcctgcttaatggtaactgaccagtgttaccctgagccccgcaggccaacccatccccagttgagccttatagggtcagtagctctccacatgaagacctgtcactcaccactatgcaggagagggaggtggtcatagagtcagggatctatggcccttggcccagccccacctccttccctttaatcctgccactgtcatatgctacctttcctatctcttccctcatcatcttgttgtgggcatgaggaggtgctgatgtcagaagaaatggctcgagctcagaagataaaagataagtagggtatgctgatcctcttttaaaaacccaagatacaatcaaaatcccagatgctggtctctattcccatgaaaaagtgctcatgacatattgagaagacctacttacaaagtggcatatattgcaatttattttaattaaaagatacctatttatatatttctttatagaaaaaagtctggaagagtttacttcaattgtagcaatgtcagggtggtggcagtataggtgatttttcttttaattctgttaatttacctgtatttcctaatttttctacaatgaagatgaattccttgtataaaaataagaaaagaaattaatcttgaggtaagcagagtagacatcatctctgattgtcctcagcctccacttccccagagtaaattcaaattgaatcgagctctgctgctctggttggttgtagtagtgatcaggaaacagatctcagcaaagccactgaggaggaggctgtgctgagtttgtgtggctggaatctctgggtaaggaacttaaagaacaaaaatcatctggtaattctttcctagaaggatcacagcccctgggattccaaggcattggatccagtctctaagaaggctgctgtactggttgaattgtgtccccctcaaattcacatccttcttggaatctcagtctgtgagtttatttggagataaggtctctgcagatgtagttagttaagacaaggtcatgctggatgaaggtagacctaaattcaatatgactggtttccttgtatgaaaaggagaggacacagagacagaggagatgcggggaagactatgtaaagatgaaggcagagatcggagttttgcagccacaagctaagaaacaccaaggattgtggcaaccatcagaagcttggaagaggcaaagaagaattcttccctagaggctttagagggataacggctctgctgaaaccttaatctcagacttccagcctcctgaacgaagaaagaataaatttcggctgttttaagccaccaaggataattggttacagcagctctaggaaactaatacagctgctaaaatgatccctgtctcctcgtgtttacattctgtgtgtgtcccctcccacaatgtaccaaagttgtctttgtgaccaatagaatatggcagaagtgatggcatgccacttccaagattaggttataaaagacactgcagcttctacttgagccctctctctctgccacccaccgcccccaatctatcttggctcactcgctctgggggaagctagctgccatgctatgagcaggcctataaagagacttacgtggtaaaaaatgaagtctcctgcccacagccacattagtgaacctagaagcagagactctgtgagataatcgatgtttgttgttttaagttgctcagttttggtctaacttgttatgcagcaatagataaataatatgcagagaaagagaaacaaa

SEQ ID NO: 14796 - DNA, 403 bp, Homo sapiens
  source 1..403: mol_type = unassigned DNA
ttttctgttgtttattccaaaataggggagtctacaccctgtggagctcaagatggtcctgagtggggcgctgtgcttccgaatgaaggactcggcattgaaggtgctttatctgcataataaccagcttctagctggagggctgcatgcagggaaggtcattaaaggtgaagagatcagcgtggtccccaatcggtggctggatgccagcctgtcccccgtcatcctgggtgtccagggtggaagccagtgcctgtcatgtggggtggggcaggagccgactctaacactagagccagtgaacatcatggagctctatcttggtgccaaggaatccaagagcttcaccttctaccggcgggacatggggctcacctccagcttcgagtcggctgcctacccg

SEQ ID NO: 14797 - DNA, 3446 bp, Homo sapiens
  source 1..3446: mol_type = unassigned DNA
caggtgccttggcatctcccaatggggtggctttgctctgggctcctgttccctgtgagctgcctggtcctgctgcaggtggcaagctctgggaacatgaaggtcttgcaggagcccacctgcgtctccgactacatgagcatctctacttgcgagtggaagatgaatggtcccaccaattgcagcaccgagctccgcctgttgtaccagctggtttttctgctctccgaagcccacacgtgtatccctgagaacaacggaggcgcggggtgcgtgtgccacctgctcatggatgacgtggtcagtgcggataactatacactggacctgtgggctgggcagcagctgctgtggaagggctccttcaagcccagcgagcatgtgaaacccagggccccaggaaacctgacagttcacaccaatgtctccgacactctgctgctgacctggagcaacccgtatccccctgacaattacctgtataatcatctcacctatgcagtcaacatttggagtgaaaacgacccggcagatttcagaatctataacgtgacctacctagaaccctccctccgcatcgcagccagcaccctgaagtctgggatttcctacagggcacgggtgagggcctgggctcagtgctataacaccacctggagtgagtggagccccagcaccaagtggcacaactcctacagggagcccttcgagcagcacctcctgctgggcgtcagcgtttcctgcattgtcatcctggccgtctgcctgttgtgctatgtcagcatcaccaagattaagaaagaatggtgggatcagattcccaacccagcccgcagccgcctcgtggctataataatccaggatgctcaggggtcacagtgggagaagcggtcccgaggccaggaaccagccaagtgcccacactggaagaattgtcttaccaagctcttgccctgttttctggagcacaacatgaaaagggatgaagatcctcacaaggctgccaaagagatgcctttccagggctctggaaaatcagcatggtgcccagtggagatcagcaagacagtcctctggccagagagcatcagcgtggtgcgatgtgtggagttgtttgaggccccggtggagtgtgaggaggaggaggaggtagaggaagaaaaagggagcttctgtgcatcgcctgagagcagcagggatgacttccaggagggaagggagggcattgtggcccggctaacagagagcctgttcctggacctgctcggagaggagaatgggggcttttgccagcaggacatgggggagtcatgccttcttccaccttcgggaagtacgagtgctcacatgccctgggatgagttcccaagtgcagggcccaaggaggcacctccctggggcaaggagcagcctctccacctggagccaagtcctcctgccagcccgacccagagtccagacaacctgacttgcacagagacgcccctcgtcatcgcaggcaaccctgcttaccgcagcttcagcaactccctgagccagtcaccgtgtcccagagagctgggtccagacccactgctggccagacacctggaggaagtagaacccgagatgccctgtgtcccccagctctctgagccaaccactgtgccccaacctgagccagaaacctgggagcagatcctccgccgaaatgtcctccagcatggggcagctgcagcccccgtctcggcccccaccagtggctatcaggagtttgtacatgcggtggagcagggtggcacccaggccagtgcggtggtgggcttgggtcccccaggagaggctggttacaaggccttctcaagcctgcttgccagcagtgctgtgtccccagagaaatgtgggtttggggctagcagtggggaagaggggtataagcctttccaagacctcattcctggctgccctggggaccctgccccagtccctgtccccttgttcacctttggactggacagggagccacctcgcagtccgcagagctcacatctcccaagcagctccccagagcacctgggtctggagccgggggaaaaggtagaggacatgccaaagcccccacttccccaggagcaggccacagacccccttgtggacagcctgggcagtggcattgtctactcagcccttacctgccacctgtgcggccacctgaaacagtgtcatggccaggaggatggtggccagacccctgtcatggccagtccttgctgtggctgctgctgtggagacaggtcctcgccccctacaacccccctgagggccccagacccctctccaggtggggttccactggaggccagtctgtgtccggcctccctggcaccctcgggcatctcagagaagagtaaatcctcatcatccttccatcctgcccctggcaatgctcagagctcaagccagacccccaaaatcgtgaactttgtctccgtgggacccacatacatgagggtctcttaggtgcatgtcctcttgttgctgagtctgcagatgaggactagggcttatccatgcctgggaaatgccacctcctggaaggcagccaggctggcagatttccaaaagacttgaagaaccatggtatgaaggtgattggccccactgacgttggcctaacactgggctgcagagactggaccccgcccagcattgggctgggctcgccacatcccatgagagtagagggcactgggtcgccgtgccccacggcaggcccctgcaggaaaactgaggcccttgggcacctcgacttgtgaacgagttgttggctgctccctccacagcttctgcagcagactgtccctgttgtaactgcccaaggcatgttttgcccaccagatcatggcccacgtggaggcccacctgcctctgtctcactgaactagaagccgagcctagaaactaacacagccatcaagggaatgacttgggcggccttgggaaatcgatgagaaattgaacttcagggagggtggtcattgcctagaggtgctcattcatttaacagagcttccttaggttgatgctggaggcagaatcccggctgtcaaggggtgttcagttaaggggagcaacagaggacatgaaaaattgctatgactaaagcagggacaatttgctgccaaacacccatgcccagctgtatggctgggggctcctcgtatgcatggaacccccagaataaatatgctcagccaccctgtgggccgggcaatccagacagcaggcataaggcaccagttaccctgcatgttggcccagacctcaggtgctagggaaggcgggaaccttgggttgagtaatgctcgtctgtgtgttttagtttcatcacctgttatctgtgtttgctgaggagagtggaacagaaggggtggagttttgtataaataaagtttctttgtctcttt

SEQ ID NO: 14798 - DNA, 2900 bp, Homo sapiens
  source 1..2900: mol_type = unassigned DNA
gcgcggcgcgggccagggaagggccacccaggggtcccccacttcccgcttgggcgcccggacggcgaatggagcaggggcgcgcaggtgccttggcatctcccaatggggtggctttgctctgggctcctgttccctgtgagctgcctggtcctgctgcaggtggcaagctctggactcttcaggatgccgtgtggagaaaggaagagggtggaagccaggaggtctggagggaggtctggagtggaggagatgagaggctccggatccctctgggaggtagatttgaggacagattggaattgaggtgaaagacagagaaagagaagtggccaggatgactccaagatttctgacctaaactactgggaaggacgcggttgtcatttctgaaatgcagaaggatgccagaagagaagggaacatgaaggtcttgcaggagcccacctgcgtctccgactacatgagcatctctacttgcgagtggaagatgaatggtcccaccaattgcagcaccgagctccgcctgttgtaccagctggtttttctgctctccgaagcccacacgtgtatccctgagaacaacggaggcgcggggtgcgtgtgccacctgctcatggatgacgtggtcagtgcggataactatacactggacctgtgggctgggcagcagctgctgtggaagggctccttcaagcccagcgagcatgtgaaacccagggccccaggaaacctgacagttcacaccaatgtctccgacactctgctgctgacctggagcaacccgtatccccctgacaattacctgtataatcatctcacctatgcagtcaacatttggagtgaaaacgacccggcagatttcagaatctataacgtgacctacctagaaccctccctccgcatcgcagccagcaccctgaagtctgggatttcctacagggcacgggtgagggcctgggctcagtgctataacaccacctggagtgagtggagccccagcaccaagtggcacaactcctacagggagcccttcgagcagcacctcctgctgggcgtcagcgtttcctgcattgtcatcctggccgtctgcctgttgtgctatgtcagcatcaccaagattaagaaagaatggtgggatcagattcccaacccagcccgcagccgcctcgtggctataataatccaggatgctcaggggtcacagtgggagaagcggtcccgaggccaggaaccagccaagtgcccacactggaagaattgtcttaccaagctcttgccctgttttctggagcacaacatgaaaagggatgaagatcctcacaaggctgccaaagagatgcctttccagggctctggaaaatcagcatggtgcccagtggagatcagcaagacagtcctctggccagagagcatcagcgtggtgcgatgtgtggagttgtttgaggccccggtggagtgtgaggaggaggaggaggtagaggaagaaaaagggagcttctgtgcatcgcctgagagcagcagggatgacttccaggagggaagggagggcattgtggcccggctaacagagagcctgttcctggacctgctcggagaggagaatgggggcttttgccagcaggacatgggggagtcatgccttcttccaccttcgggaagtacgagtgctcacatgccctgggatgagttcccaagtgcagggcccaaggaggcacctccctggggcaaggagcagcctctccacctggagccaagtcctcctgccagcccgacccagagtccagacaacctgacttgcacagagacgcccctcgtcatcgcaggcaaccctgcttaccgcagcttcagcaactccctgagccagtcaccgtgtcccagagagctgggtccagacccactgctggccagacacctggaggaagtagaacccgagatgccctgtgtcccccagctctctgagccaaccactgtgccccaacctgagccagaaacctgggagcagatcctccgccgaaatgtcctccagcatggggcagctgcagcccccgtctcggcccccaccagtggctatcaggagtttgtacatgcggtggagcagggtggcacccaggccagtgcggtggtgggcttgggtcccccaggagaggctggttacaaggccttctcaagcctgcttgccagcagtgctgtgtccccagagaaatgtgggtttggggctagcagtggggaagaggggtataagcctttccaagacctcattcctggctgccctggggaccctgccccagtccctgtccccttgttcacctttggactggacagggagccacctcgcagtccgcagagctcacatctcccaagcagctccccagagcacctgggtctggagccgggggaaaaggtagaggacatgccaaagcccccacttccccaggagcaggccacagacccccttgtggacagcctgggcagtggcattgtctactcagcccttacctgccacctgtgcggccacctgaaacagtgtcatggccaggaggatggtggccagacccctgtcatggccagtccttgctgtggctgctgctgtggagacaggtcctcgccccctacaacccccctgagggccccagacccctctccaggtggggttccactggaggccagtctgtgtccggcctccctggcaccctcgggcatctcagagaagagtaaatcctcatcatccttccatcctgcccctggcaatgctcagagctcaagccagacccccaaaatcgtgaactttgtctccgtgggacccacatacatgagggtctcttaggtgcatgtcctcttgttgctgagtctgcagatgaggactagggcttatccatgcctgggaaatgccacctcct

SEQ ID NO: 14799 - DNA, 794 bp, Homo sapiens
  source 1..794: mol_type = unassigned DNA
aaagccccgcgcggcgcgggccagggaagggccacccaggggtcccccacttcccgcttgggcgcccggacggcgaatggagcaggggcgcgcaggtgccttggcatctcccaatggggtggctttgctctgggctcctgttccctgtgagctgcctggtcctgctgcaggtggcaagctctgggaacatgaaggtcttgcaggagcccacctgcgtctccgactacatgagcatctctacttgcgagtggaagatgaatggtcccaccaattgcagcaccgagctccgcctgttgtaccagctggtttttctgctctccgaagcccacacgtgtatccctgagaacaacggaggcgcggggtgcgtgtgccacctgctcatggatgacgtggtcagtgcggataactatacactggacctgtgggctgggcagcagctgctgtggaagggctccttcaagcccagcgagcatgtgaaacccagggccccaggaaacctgacagttcacaccaatgtctccgacactctgctgctgacctggagcaacccgtatccccctgacaattacctgtataatcatctcacctatgcagtcaacatttggagtgaaaacgacccggcagatttcagaatctataacgtgacctacctagaaccctccctccgcatcgcagccagcaccctgaagtctgggatttcctacagggcacgggtgagggcctgggctcagtgctataacaccacctggagtgagtggagccccagcaccaagtggcacaactttagtgtttgc

SEQ ID NO: 14800 - DNA, 3667 bp, Homo sapiens
  source 1..3667: mol_type = unassigned DNA
cccgcgcggcgcgggccagggaagggccacccaggggtcccccacttcccgcttgggcgcccggacggcgaatggagcaggggcgcgcagataattaaagatttacacacagctggaagaaatcatagagaagccgggcgtggtggctcatgcctataatcccagcacttttggaggctgaggcgggcagatcacttgagatcaggagttcgagaccagcctggtgccttggcatctcccaatggggtggctttgctctgggctcctgttccctgtgagctgcctggtcctgctgcaggtggcaagctctgggaacatgaaggtcttgcaggagcccacctgcgtctccgactacatgagcatctctacttgcgagtggaagatgaatggtcccaccaattgcagcaccgagctccgcctgttgtaccagctggtttttctgctctccgaagcccacacgtgtatccctgagaacaacggaggcgcggggtgcgtgtgccacctgctcatggatgacgtggtcagtgcggataactatacactggacctgtgggctgggcagcagctgctgtggaagggctccttcaagcccagcgagcatgtgaaacccagggccccaggaaacctgacagttcacaccaatgtctccgacactctgctgctgacctggagcaacccgtatccccctgacaattacctgtataatcatctcacctatgcagtcaacatttggagtgaaaacgacccggcagatttcagaatctataacgtgacctacctagaaccctccctccgcatcgcagccagcaccctgaagtctgggatttcctacagggcacgggtgagggcctgggctcagtgctataacaccacctggagtgagtggagccccagcaccaagtggcacaactcctacagggagcccttcgagcagcacctcctgctgggcgtcagcgtttcctgcattgtcatcctggccgtctgcctgttgtgctatgtcagcatcaccaagattaagaaagaatggtgggatcagattcccaacccagcccgcagccgcctcgtggctataataatccaggatgctcaggggtcacagtgggagaagcggtcccgaggccaggaaccagccaagtgcccacactggaagaattgtcttaccaagctcttgccctgttttctggagcacaacatgaaaagggatgaagatcctcacaaggctgccaaagagatgcctttccagggctctggaaaatcagcatggtgcccagtggagatcagcaagacagtcctctggccagagagcatcagcgtggtgcgatgtgtggagttgtttgaggccccggtggagtgtgaggaggaggaggaggtagaggaagaaaaagggagcttctgtgcatcgcctgagagcagcagggatgacttccaggagggaagggagggcattgtggcccggctaacagagagcctgttcctggacctgctcggagaggagaatgggggcttttgccagcaggacatgggggagtcatgccttcttccaccttcgggaagtacgagtgctcacatgccctgggatgagttcccaagtgcagggcccaaggaggcacctccctggggcaaggagcagcctctccacctggagccaagtcctcctgccagcccgacccagagtccagacaacctgacttgcacagagacgcccctcgtcatcgcaggcaaccctgcttaccgcagcttcagcaactccctgagccagtcaccgtgtcccagagagctgggtccagacccactgctggccagacacctggaggaagtagaacccgagatgccctgtgtcccccagctctctgagccaaccactgtgccccaacctgagccagaaacctgggagcagatcctccgccgaaatgtcctccagcatggggcagctgcagcccccgtctcggcccccaccagtggctatcaggagtttgtacatgcggtggagcagggtggcacccaggccagtgcggtggtgggcttgggtcccccaggagaggctggttacaaggccttctcaagcctgcttgccagcagtgctgtgtccccagagaaatgtgggtttggggctagcagtggggaagaggggtataagcctttccaagacctcattcctggctgccctggggaccctgccccagtccctgtccccttgttcacctttggactggacagggagccacctcgcagtccgcagagctcacatctcccaagcagctccccagagcacctgggtctggagccgggggaaaaggtagaggacatgccaaagcccccacttccccaggagcaggccacagacccccttgtggacagcctgggcagtggcattgtctactcagcccttacctgccacctgtgcggccacctgaaacagtgtcatggccaggaggatggtggccagacccctgtcatggccagtccttgctgtggctgctgctgtggagacaggtcctcgccccctacaacccccctgagggccccagacccctctccaggtggggttccactggaggccagtctgtgtccggcctccctggcaccctcgggcatctcagagaagagtaaatcctcatcatccttccatcctgcccctggcaatgctcagagctcaagccagacccccaaaatcgtgaactttgtctccgtgggacccacatacatgagggtctcttaggtgcatgtcctcttgttgctgagtctgcagatgaggactagggcttatccatgcctgggaaatgccacctcctggaaggcagccaggctggcagatttccaaaagacttgaagaaccatggtatgaaggtgattggccccactgacgttggcctaacactgggctgcagagactggaccccgcccagcattgggctgggctcgccacatcccatgagagtagagggcactgggtcgccgtgccccacggcaggcccctgcaggaaaactgaggcccttgggcacctcgacttgtgaacgagttgttggctgctccctccacagcttctgcagcagactgtccctgttgtaactgcccaaggcatgttttgcccaccagatcatggcccacgtggaggcccacctgcctctgtctcactgaactagaagccgagcctagaaactaacacagccatcaagggaatgacttgggcggccttgggaaatcgatgagaaattgaacttcagggagggtggtcattgcctagaggtgctcattcatttaacagagcttccttaggttgatgctggaggcagaatcccggctgtcaaggggtgttcagttaaggggagcaacagaggacatgaaaaattgctatgactaaagcagggacaatttgctgccaaacacccatgcccagctgtatggctgggggctcctcgtatgcatggaacccccagaataaatatgctcagccaccctgtgggccgggcaatccagacagcaggcataaggcaccagttaccctgcatgttggcccagacctcaggtgctagggaaggcgggaaccttgggttgagtaatgctcgtctgtgtgttttagtttcatcacctgttatctgtgtttgctgaggagagtggaacagaaggggtggagttttgtataaataaagtttctttgtctcttta

SEQ ID NO: 14801 - DNA, 1106 bp, Homo sapiens
  source 1..1106: mol_type = unassigned DNA
ccccgcgcggcgcgggccagggaagggccacccaggggtcccccacttcccgcttgggcgcccggacggcgaatggagcaggggcgcgcagataattaaagatttacacacagctggaagaaatcatagagaagccgggcgtggtggctcatgcctataatcccagcacttttggaggctgaggcgggcagatcacttgagatcaggagttcgagaccagcctggtgccttggcatctcccaatggggtggctttgctctgggctcctgttccctgtgagctgcctggtcctgctgcaggtggcaagctctgggaacatgaaggtcttgcaggagcccacctgcgtctccgactacatgagcatctctacttgcgagtggaagatgaatggtcccaccaattgcagcaccgagctccgcctgttgtaccagctggtttttctgctctccgaagcccacacgtgtatccctgagaacaacggaggcgcggggtgcgtgtgccacctgctcatggatgacgtggtcagtgcggataactatacactggacctgtgggctgggcagcagctgctgtggaagggctccttcaagcccagcgagcatgtgaaacccagggccccaggaaacctgacagttcacaccaatgtctccgacactctgctgctgacctggagcaacccgtatccccctgacaattacctgtataatcatctcacctatgcagtcaacatttggagtgaaaacgacccggcagatttcagaatctataacgtgacctacctagaaccctccctccgcatcgcagccagcaccctgaagtctgggatttcctacagggcacgggtgagggcctgggctcagtgctataacaccacctggagtgagtggagccccagcaccaagtggcacaactcaaatatttgctgagttcctcctacatggctagccctgtgctagacactggggaatcggcgatgaacaaagcagatagaaatccccactcttgtggagctgacattctggagggagagacaaaaagcaaacatataaagaaagaaagaaatcacatggatctggatgacagtgagtgctgggaagaaaataaaa

SEQ ID NO: 14802 - DNA, 2656 bp, Homo sapiens
  source 1..2656: mol_type = unassigned DNA
gcgcggcgcgggccagggaagggccacccaggggtcccccacttcccgcttgggcgcccggacggcgaatggagcaggggcgcgcaggtgccttggcatctcccaatggggtggctttgctctgggctcctgttccctgtgagctgcctggtcctgctgcaggtggcaagctctgggaacatgaaggtcttgcaggagcccacctgcgtctccgactacatgagcatctctacttgcgagtggaagatgaatggtcccaccaattgcagcaccgagctccgcctgttgtaccagctggtttttctgctctccgaagcccacacgtgtatccctgagaacaacggaggcgcggggtgcgtgtgccacctgctcatggatgacgtggtcagtgcggataactatacactggacctgtgggctgggcagcagctgctgtggaagggctccttcaagcccagcgagcatgtgaaacccagggccccaggaaacctgacagttcacaccaatgtctccgacactctgctgctgacctggagcaacccgtatccccctgacaattacctgtataatcatctcacctatgcagtcaacatttggagtgaaaacgacccggcagatttcagaatctataacgtgacctacctagaaccctccctccgcatcgcagccagcaccctgaagtctgggatttcctacagggcacgggtgagggcctgggctcagtgctataacaccacctggagtgagtggagccccagcaccaagtggcacaactcctacagggagcccttcgagcagcacctcctgctgggcgtcagcgtttcctgcattgtcatcctggccgtctgcctgttgtgctatgtcagcatcaccaagattaagaaagaatggtgggatcagattcccaacccagcccgcagccgcctcgtggctataataatccaggatgctcaggggtcacagtgggagaagcggtcccgaggccaggaaccagccaagtgcccacactggaagaattgtcttaccaagctcttgccctgttttctggagcacaacatgaaaagggatgaagatcctcacaaggctgccaaagagatgcctttccagggctctggaaaatcagcatggtgcccagtggagatcagcaagacagtcctctggccagagagcatcagcgtggtgcgatgtgtggagttgtttgaggccccggtggagtgtgaggaggaggaggaggtagaggaagaaaaagggagcttctgtgcatcgcctgagagcagcagggatgacttccaggagggaagggagggcattgtggcccggctaacagagagcctgttcctggacctgctcggagaggagaatgggggcttttgccagcaggacatgggggagtcatgccttcttccaccttcgggaagtacgagtgctcacatgccctgggatgagttcccaagtgcagggcccaaggaggcacctccctggggcaaggagcagcctctccacctggagccaagtcctcctgccagcccgacccagagtccagacaacctgacttgcacagagacgcccctcgtcatcgcaggcaaccctgcttaccgcagcttcagcaactccctgagccagtcaccgtgtcccagagagctgggtccagacccactgctggccagacacctggaggaagtagaacccgagatgccctgtgtcccccagctctctgagccaaccactgtgccccaacctgagccagaaacctgggagcagatcctccgccgaaatgtcctccagcatggggcagctgcagcccccgtctcggcccccaccagtggctatcaggagtttgtacatgcggtggagcagggtggcacccaggccagtgcggtggtgggcttgggtcccccaggagaggctggttacaaggccttctcaagcctgcttgccagcagtgctgtgtccccagagaaatgtgggtttggggctagcagtggggaagaggggtataagcctttccaagacctcattcctggctgccctggggaccctgccccagtccctgtccccttgttcacctttggactggacagggagccacctcgcagtccgcagagctcacatctcccaagcagctccccagagcacctgggtctggagccgggggaaaaggtagaggacatgccaaagcccccacttccccaggagcaggccacagacccccttgtggacagcctgggcagtggcattgtctactcagcccttacctgccacctgtgcggccacctgaaacagtgtcatggccaggaggatggtggccagacccctgtcatggccagtccttgctgtggctgctgctgtggagacaggtcctcgccccctacaacccccctgagggccccagacccctctccaggtggggttccactggaggccagtctgtgtccggcctccctggcaccctcgggcatctcagagaagagtaaatcctcatcatccttccatcctgcccctggcaatgctcagagctcaagccagacccccaaaatcgtgaactttgtctccgtgggacccacatacatgagggtctcttaggtgcatgtcctcttgttgctgagtctgcagatgaggactagggcttatccatgcctgggaaatgccacctcct

SEQ ID NO: 14803 - DNA, 2001 bp, Homo sapiens
  source 1..2001: mol_type = unassigned DNA
ccgctgcttctcatcgcatggccaccgcatttctcaggccaggcacattgagcattggtcctgtgcctgacgctatgctagatgctggggttgcagccacgagcatagacacgacagacacggtcctcgccatcttctgttgagtactggtcggaacaagaggatcgtctgtagacaggctacagattgttttagattgaagtttcctgtcatgttcactcatctttaaatcctcatagtgaaaaaggatatgatcatcgtggcgcatgtattactcatccttttgggggccactgagatactgcaagctgacttacttcctgatgaaaagatttcacttctcccacctgtcaatttcaccattaaagttactggtttggctcaagttcttttacaatggaaaccaaatcctgatcaagagcaaaggaatgttaatctagaatatcaagtgaaaataaacgctccaaaagaagatgactatgaaaccagaatcactgaaagcaaatgtgtaaccatcctccacaaaggcttttcagcaagtgtgcggaccatcctgcagaacgaccactcactactggccagcagctgggcttctgctgaacttcatgccccaccagggtctcctggaacctcaattgtgaatttaacttgcaccacaaacactacagaagacaattattcacgtttaaggtcataccaagtttcccttcactgcacctggcttgttggcacagatgcccctgaggacacgcagtattttctctactataggtatggctcttggactgaagaatgccaagaatacagcaaagacacactggggagaaatatcgcatgctggtttcccaggacttttatcctcagcaaagggcgtgactggcttgcggtgcttgttaacggctccagcaagcactctgctatcaggccctttgatcagctgtttgcccttcacgccattgatcaaataaatcctccactgaatgtcacagcagagattgaaggaactcgtctctctatccaatgggagaaaccagtgtctgcttttccaatccattgctttgattatgaagtaaaaatacacaatacaaggaatggatatttgcagatagaaaaattgatgaccaatgcattcatctcaataattgatgatctttctaagtacgatgttcaagtgagagcagcagtgagctccatgtgcagagaggcagggctctggagtgagtggagccaacctatttatgtgggaaatgatgaacacaagcccttgagagagtggtttgtcattgtgattatggcaaccatctgcttcatcttgttaattctctcgcttatctgtaaaatatgtcatttatggatcaagttgtttccaccaattccagcaccaaaaagtaatatcaaagatctctttgtaaccactaactatgagaaagctgggtccagtgagacggaaattgaagtcatctgttatatagagaagcctggagttgagaccctggaggattctgtgttttgactgtcactttggcatcctctgatgaactcacacatgcctcagtgcctcagtgaaaagaacagggatgctggctcttggctaagaggtgttcagaatttaggcaacactcaatttacctgcgaagcaatacacccagacacaccagtcttgtatctcttaaaagtatggatgcttcatccaaatcgcctcacctacagcagggaagttgactcatccaagcattttgccatgttttttctccccatgccgtacagggtagcacctcctcacctgccaatctttgcaatttgcttgactcacctcagacttttcattcacaacagacagcttttaaggctaacgtccagctgtatttacttctggctgtgcccgtttggctgtttaagctgccaattgtagcactcagctaccatctgaggaagaaagcattttgcatcagcctggagtgaaccatgaacttggattcaagactgtcttttctatagcaa

SEQ ID NO: 14804 - DNA, 1328 bp, Homo sapiens
  source 1..1328: mol_type = unassigned DNA
ccgctgcttctcatcgcatggccaccgcatttctcaggccaggcacattgagcattggtcctgtgcctgacgctatgctagatgctggggttgcagccacgagcatagacacgacagacacggtcctcgccatcttctgttgagtactggtcggaacaagaggatcgtctgtagacaggctacagattgttttagattgaagtttcctgtcatgttcactcatctttaaatcctcatagtgaaaaaggatatgatcatcgtggcgcatgtattactcatccttttgggggccactgagatactgcaagctgacttacttcctgatgaaaagatttcacttctcccacctgtcaatttcaccattaaagttactggtttggctcaagttcttttacaatggaaaccaaatcctgatcaagagcaaaggaatgttaatctagaatatcaagtgaaaataaacgctccaaaagaagatgactatgaaaccagaatcactgaaagcaaatgtgtaaccatcctccacaaaggcttttcagcaagtgtgcggaccatcctgcagaacgaccactcactactggccagcagctgggcttctgctgaacttcatgccccaccagggtctcctggaacctcaattgtgaatttaacttgcaccacaaacactacagaagacaattattcacgtttaaggtcataccaagtttcccttcactgcacctggcttgttggcacagatgcccctgaggacacgcagtattttctctactataggtatggctcttggactgaagaatgccaagaatacagcaaagacacactggggagaaatatcgcatgctggtttcccaggacttttatcctcagcaaagggcgtgactggcttgcggtgcttgttaacggctccagcaagcactctgctatcaggccctttgatcagctgtttgcccttcacgccattgatcaaataaatcctccactgaatgtcacagcagagattgaaggaactcgtctctctatccaatgggagaaaccagtgtctgcttttccaatccattgctttgattatgaagtaaaaatacacaatacaaggaatggatatttgcagatagaaaaattgatgaccaatgcattcatctcaataattgatgatctttctaagtacgatgttcaagtgagagcagcagtgagctccatgtgcagagaggcagggctctggagtgagtggagccaacctatttatgtggggttctcaagataaaggagataacatccagctttcctgccccacaccgtatctgaaataaaaacaacagcagggatagcagatt

SEQ ID NO: 14805 - DNA, 2403 bp, Homo sapiens
  source 1..2403: mol_type = unassigned DNA
aaacaaaacagaaatgcaacgctttagagtacccacggaaaacttgtttaccttgtcaccatgagtaaaagttaattcccactcctgaagagagcaaaccaactctgaaagagagtgaaaatgcagacaagacagttatcagataatggctatctggacgagagattctttcgtttgacagcagtttggttgttgggagttccagttcagctcctgcacagttgctctgtacaaatcctcctccatatttgcttagagaaaacgtgttgccatcccatcatgaaggaagctgcctgagagtttttaaccattacagccgtgatgatgaaagagtgaagaaccgcctctaagttaaaaagtgcacccagagataaggttcgttctcaatgccctgccgctgcttctcatcgcatggccaccgcatttctcaggccaggcacattgagcattggtcctgtgcctgacgctatgctagatgctggggttgcagccacgagcatagacacgacagacacggtcctcgccatcttctgttgagtactggtcggaacaagaggatcgtctgtagacaggatatgatcatcgtggcgcatgtattactcatccttttgggggccactgagatactgcaagctgacttacttcctgatgaaaagatttcacttctcccacctgtcaatttcaccattaaagttactggtttggctcaagttcttttacaatggaaaccaaatcctgatcaagagcaaaggaatgttaatctagaatatcaagtgaaaataaacgctccaaaagaagatgactatgaaaccagaatcactgaaagcaaatgtgtaaccatcctccacaaaggcttttcagcaagtgtgcggaccatcctgcagaacgaccactcactactggccagcagctgggcttctgctgaacttcatgccccaccagggtctcctggaacctcaattgtgaatttaacttgcaccacaaacactacagaagacaattattcacgtttaaggtcataccaagtttcccttcactgcacctggcttgttggcacagatgcccctgaggacacgcagtattttctctactataggtatggctcttggactgaagaatgccaagaatacagcaaagacacactggggagaaatatcgcatgctggtttcccaggacttttatcctcagcaaagggcgtgactggcttgcggtgcttgttaacggctccagcaagcactctgctatcaggccctttgatcagctgtttgcccttcacgccattgatcaaataaatcctccactgaatgtcacagcagagattgaaggaactcgtctctctatccaatgggagaaaccagtgtctgcttttccaatccattgctttgattatgaagtaaaaatacacaatacaaggaatggatatttgcagatagaaaaattgatgaccaatgcattcatctcaataattgatgatctttctaagtacgatgttcaagtgagagcagcagtgagctccatgtgcagagaggcagggctctggagtgagtggagccaacctatttatgtgggaaatgatgaacacaagcccttgagagagtggtttgtcattgtgattatggcaaccatctgcttcatcttgttaattctctcgcttatctgtaaaatatgtcatttatggatcaagttgtttccaccaattccagcaccaaaaagtaatatcaaagatctctttgtaaccactaactatgaggtcctctgcattttcatatacatcttagattcagctgacaattttctacaaaaaaagaaagctgggtccagtgagacggaaattgaagtcatctgttatatagagaagcctggagttgagaccctggaggattctgtgttttgactgtcactttggcatcctctgatgaactcacacatgcctcagtgcctcagtgaaaagaacagggatgctggctcttggctaagaggtgttcagaatttaggcaacactcaatttacctgcgaagcaatacacccagacacaccagtcttgtatctcttaaaagtatggatgcttcatccaaatcgcctcacctacagcagggaagttgactcatccaagcattttgccatgttttttctccccatgccgtacagggtagcacctcctcacctgccaatctttgcaatttgcttgactcacctcagacttttcattcacaacagacagcttttaaggctaacgtccagctgtatttacttctggctgtgcccgtttggctgtttaagctgccaattgtagcactcagctaccatctgaggaagaaagcattttgcatcagcctggagtgaaccatgaacttggattcaagactgtcttttctatagcaagtgagagccacaaattcctc

SEQ ID NO: 14806 - DNA, 1828 bp, Homo sapiens
  source 1..1828: mol_type = unassigned DNA
agtacccacggaaaacttgtttaccttgtcaccatgagtaaaagttaattcccactcctgaagagagcaaaccaactctgaaagagagtgaaaatgcagacaagacagttatcagataatggctatctggacgagagattctttcgtttgacagcagtttggttgttgggagttccagttcagctcctgcacagttgctctgtacaaatcctcctccatatttgcttagagaaaacgtgttgccatcccatcatgaaggaagctgcctgagagtttttaaccattacagccgtgatgatgaaagagtgaagaaccgcctctaagttaaaaagtgcacccagagataaggttcgttctcaatgccctgccgctgcttctcatcgcatggccaccgcatttctcaggccaggcacattgagcattggtcctgtgcctgacgctatgctagatgctggggttgcagccacgagcatagacacgacagacacggtcctcgccatcttctgttgagtactggtcggaacaagaggatcgtctgtagacaggatatgatcatcgtggcgcatgtattactcatccttttgggggccactgagatactgcaagctgacttacttcctgatgaaaagatttcacttctcccacctgtcaatttcaccattaaagttactggtttggctcaagttcttttacaatggaaaccaaatcctgatcaagagcaaaggaatgttaatctagaatatcaagtgaaaataaacgctccaaaagaagatgactatgaaaccagaatcactgaaagcaaatgtgtaaccatcctccacaaaggcttttcagcaagtgtgcggaccatcctgcagaacgaccactcactactggccagcagctgggcttctgctgaacttcatgccccaccagggtctcctggaacctcaattgtgaatttaacttgcaccacaaacactacagaagacaattattcacgtttaaggtcataccaagtttcccttcactgcacctggcttgttggcacagatgcccctgaggacacgcagtattttctctactataggtatggctcttggactgaagaatgccaagaatacagcaaagacacactggggagaaatatcgcatgctggtttcccaggacttttatcctcagcaaagggcgtgactggcttgcggtgcttgttaacggctccagcaagcactctgctatcaggccctttgatcagctgtttgcccttcacgccattgatcaaataaatcctccactgaatgtcacagcagagattgaaggaactcgtctctctatccaatgggagaaaccagtgtctgcttttccaatccattgctttgattatgaagtaaaaatacacaatacaaggaatggatatttgcagatagaaaaattgatgaccaatgcattcatctcaataattgatgatctttctaagtacgatgttcaagtgagagcagcagtgagctccatgtgcagagaggcagggctctggagtgagtggagccaacctatttatgtggggttctcaagataaaggagataacatccagctttcctgccccacaccgtatctgaaataaaaacaacagcagggatagcagattacatgtgttttttaatttttatttattttgccaagcactatgctaaatacataatcttagtcctatcaaaaaacttgtttggaaagtttaggtaattggcttaactctgttctgcatggccaacaagtggcagggatggggctctaaccccagattaactgactctagcacttgatctctggacactctggcatggtgggac

SEQ ID NO: 14807 - DNA, 978 bp, Homo sapiens
  source 1..978: mol_type = unassigned DNA
atgatcatcgtggcgcatgtattactcatccttttgggggccactgagatactgcaagctgacttacttcctgatgaaaagatttcacttctcccacctgtcaatttcaccattaaagttactggtttggctcaagttcttttacaatggaaaccaaatcctgatcaagagcaaaggaatgttaatctagaatatcaagtgaaaataaacgctccaaaagaagatgactatgaaaccagaatcactgaaagcaaatgtgtaaccatcctccacaaaggcttttcagcaagtgtgcggaccatcctgcagaacgaccactcactactggccagcagctgggcttctgctgaacttcatgccccaccagggtctcctggaacctcaattgtgaatttaacttgcaccacaaacactacagaagacaattattcacgtttaaggtcataccaagtttcccttcactgcacctggcttgttggcacagatgcccctgaggacacgcagtattttctctactataggtatggctcttggactgaagaatgccaagaatacagcaaagacacactggggagaaatatcgcatgctggtttcccaggacttttatcctcagcaaagggcgtgactggcttgcggtgcttgttaacggctccagcaagcactctgctatcaggccctttgatcagctgtttgcccttcacgccattggaaatgatgaacacaagcccttgagagagtggtttgtcattgtgattatggcaaccatctgcttcatcttgttaattctctcgcttatctgtaaaatatgtcatttatggatcaagttgtttccaccaattccagcaccaaaaagtaatatcaaagatctctttgtaaccactaactatgagaaagctgggtccagtgagacggaaattgaagtcatctgttatatagagaagcctggagttgagaccctggaggattctgtgttttga

SEQ ID NO: 14808 - DNA, 839 bp, Homo sapiens
  source 1..839: mol_type = unassigned DNA
cagaaatgcaacgctttagagtacccacggaaaacttgtttaccttgtcaccatgagtaaaagttaattcccactcctgaagagagcaaaccaactctgaaagagagtgaaaatgcagacaagacagttatcagataatggctatctggacgagagattctttcgtttgacagcagtttggttgttgggagttccagttcagctcctgcacagttgctctgtacaaatcctcctccatatttgcttagagaaaacgtgttgccatcccatcatgaaggaagctgcctgagagtttttaaccattacagccgtgatgatgaaagagtgaagaaccgcctctaagttaaaaagtgcacccagagataagggccaggcacattgagcattggtcctgtgcctgacgctatgctagatgctggggttgcagccacgagcatagacacgacagacacggtcctcgccatcttctgttgagtactggtcggaacaagaggatcgtctgtagacaggatatgatcatcgtggcgcatgtattactcatccttttgggggccactgagatactgcaagctgacttacttcctgatgaaaagatttcacttctcccacctgtcaatttcaccattaaagttactggtttggctcaagttcttttacaatggaaaccaaatcctgatcaagagcaaaggaatgttaatctagaatatcaagtgaaaataaacgctccaaaagaagatgactatgaaaccagaatcactgaaagcaaatgtgtaaccatcctccacaaaggcttttcagcaagtgtgcggaccatcctgcagaacgaccactcactactg

SEQ ID NO: 14809 - DNA, 1664 bp, Homo sapiens
  source 1..1664: mol_type = unassigned DNA
ccgctgcttctcatcgcatggccaccgcatttctcaggccaggcacattgagcattggtcctgtgcctgacgctatgctagatgctggggttgcagccacgagcatagacacgacagacacggtcctcgccatcttctgttgagtactggtcggaacaagaggatcgtctgtagacaggctacagattgttttagattgaagtttcctgtcatgttcactcatctttaaatcctcatagtgaaaaaggatatgatcatcgtggcgcatgtattactcatccttttgggggccactgagatactgcaagctgacttacttcctgatgaaaagatttcacttctcccacctgtcaatttcaccattaaagttactggtttggctcaagttcttttacaatggaaaccaaatcctgatcaagagcaaaggaatgttaatctagaatatcaagtgaaaataaacgctccaaaagaagatgactatgaaaccagaatcactgaaagcaaatgtgtaaccatcctccacaaaggcttttcagcaagtgtgcggaccatcctgcagaacgaccactcactactggccagcagctgggcttctgctgaacttcatgccccaccagggtctcctggaacctcaattgtgaatttaacttgcaccacaaacactacagaagacaattattcacgtttaaggtcataccaagtttcccttcactgcacctggcttgttggcacagatgcccctgaggacacgcagtattttctctactataggtatggctcttggactgaagaatgccaagaatacagcaaagacacactggggagaaatatcgcatgctggtttcccaggacttttatcctcagcaaagggcgtgactggcttgcggtgcttgttaacggctccagcaagcactctgctatcaggccctttgatcagctgtttgcccttcacgccattgatcaaataaatcctccactgaatgtcacagcagagattgaaggaactcgtctctctatccaatgggagaaaccagtgtctgcttttccaatccattgctttgattatgaagtaaaaatacacaatacaaggaatggatatttgcagatagaaaaattgatgaccaatgcattcatctcaataattgatgatctttctaagtacgatgttcaagtgagagcagcagtgagctccatgtgcagagaggcagggctctggagtgagtggagccaacctatttatgtgggtaagtagcttatgtttattttacattggcagccttccttgtgatcaaaaaaggtaatcccagaaacgtacccgttcactcgtgggtcttaaaatggtttcatatctctattgtgactaattttctctcggtctactgccttttcaatcaggaatagatttgccatgaagccagtgaagtttttaagtgtctaggcttctcattagcgccaactctcctagacctggtgcctgttttttttccaagttttgtttctacttctatccattttttaaattaaactttttattttgaaataattatcacactcacaagctgtgggaagaaataatagagatcctgtgtctctttcatccagttttcctcaagggtaacatcttacaaaactatagtacaatagtggaatagaatattggtgtt

SEQ ID NO: 14810 - DNA, 2252 bp, Homo sapiens
  source 1..2252: mol_type = unassigned DNA
aaacaaaacagaaatgcaacgctttagagtacccacggaaaacttgtttaccttgtcaccatgagtaaaagttaattcccactcctgaagagagcaaaccaactctgaaagagagtgaaaatgcagacaagacagttatcagataatggctatctggacgagagattctttcgtttgacagcagtttggttgttgggagttccagttcagctcctgcacagttgctctgtacaaatcctcctccatatttgcttagagaaaacgtgttgccatcccatcatgaaggaagctgcctgagagtttttaaccattacagccgtgatgatgaaagagtgaagaaccgcctctaagttaaaaagtgcacccagagataaggttcgttctcaatgccctgccgctgcttctcatcgcatggccaccgcatttctcaggccaggcacattgagcattggtcctgtgcctgacgctatgctagatgctggggttgcagccacgagcatagacacgacagacacggtcctcgccatcttctgttgagtactggtcggaacaagaggatcgtctgtagacaggatatgatcatcgtggcgcatgtattactcatccttttgggggccactgagatactgcaagctgacttacttcctgatgaaaagatttcacttctcccacctgtcaatttcaccattaaagttactggtttggctcaagttcttttacaatggaaaccaaatcctgatcaagagcaaaggaatgttaatctagaatatcaagtgaaaataaacgctccaaaagaagatgactatgaaaccagaatcactgaaagcaaatgtgtaaccatcctccacaaaggcttttcagcaagtgtgcggaccatcctgcagaacgaccactcactactggccagcagctgggcttctgctgaacttcatgccccaccagggtctcctggaacctcaattgtgaatttaacttgcaccacaaacactacagaagacaattattcacgtttaaggtcataccaagtttcccttcactgcacctggcttgttggcacagatgcccctgaggacacgcagtattttctctactataggtatggctcttggactgaagaatgccaagaatacagcaaagacacactggggagaaatatcgcatgctggtttcccaggacttttatcctcagcaaagggcgtgactggcttgcggtgcttgttaacggctccagcaagcactctgctatcaggccctttgatcagctgtttgcccttcacgccattgatcaaataaatcctccactgaatgtcacagcagagattgaaggaactcgtctctctatccaatgggagaaaccagtgtctgcttttccaatccattgctttgattatgaagtaaaaatacacaatacaaggaatggatatttgcagatagaaaaattgatgaccaatgcattcatctcaataattgatgatctttctaagtacgatgttcaagtgagagcagcagtgagctccatgtgcagagaggcagggctctggagtgagtggagccaacctatttatgtgggaaatgatgaacacaagcccttgagagagtggtttgtcattgtgattatggcaaccatctgcttcatcttgttaattctctcgcttatctgtaaaataaagctgggtccagtgagacggaaattgaagtcatctgttatatagagaagcctggagttgagaccctggaggattctgtgttttgactgtcactttggcatcctctgatgaactcacacatgcctcagtgcctcagtgaaaagaacagggatgctggctcttggctaagaggtgttcagaatttaggcaacactcaatttacctgcgaagcaatacacccagacacaccagtcttgtatctcttaaaagtatggatgcttcatccaaatcgcctcacctacagcagggaagttgactcatccaagcattttgccatgttttttctccccatgccgtacagggtagcacctcctcacctgccaatctttgcaatttgcttgactcacctcagacttttcattcacaacagacagcttttaaggctaacgtccagctgtatttacttctggctgtgcccgtttggctgtttaagctgccaattgtagcactcagctaccatctgaggaagaaagcattttgcatcagcctggagtgaaccatgaacttggattcaagactgtcttttctatagcaagtgagagccac

SEQ ID NO: 14811 - DNA, 788 bp, Homo sapiens
  source 1..788: mol_type = unassigned DNA
tttgcaaaacgagactgttaataaaacctaccccagggtaggacggactgttcgggccaggcacattgagcattggtcctgtgcctgacgctatgctagatgctggggttgcagccacgagcatagacacgacagacacggtcctcgccatcttctgttgagtactggtcggaacaagaggatcgtctgtagacaggatatgatcatcgtggcgcatgtattactcatccttttgggggccactgagatactgcaagctgacttacttcctgatgaaaagatttcacttctcccacctgtcaatttcaccattaaagttactggtttggctcaagttcttttacaatggaaaccaaatcctgatcaagagcaaaggaatgttaatctagaatatcaagtgaaaataaacgctccaaaagaagatgactatgaaaccagaatcactgaaagcaaatgtgtaaccatcctccacaaaggcttttcagcaagtgtgcggaccatcctgcagaacgaccactcactactggccagcagctgggcttctgctgaacttcatgccccaccagggtctcctggaacctcaattgtgaatttaacttgcaccacaaacactacagaagacaattattcacgtttaaggtcataccaagtttcccttcactgcacctggcttgttggcacagatgcccctgaggacacgcagtattttctctactataggtatggctcttggactgaagaatgccaagaatacagcaaagacacactggggagaaatatcgcatgct

SEQ ID NO: 14812 - DNA, 636 bp, Homo sapiens
  source 1..636: mol_type = unassigned DNA
atgatcatcgtggcgcatgtattactcatccttttgggggccactgagatactgcaagctgacttacttcctgatgaaaagatttcacttctcccacctgtcaatttcaccattaaagttactggtttggctcaagttcttttacaatggaaaccaaatcctgatcaagagcaaaggaatgttaatctagaatatcaagtgaaaataaacgctccaaaagaagatgactatgaaaccagaatcactgaaagcaaatgtgtaaccatcctccacaaaggcttttcagcaagtgtgcggaccatcctgcagaacgaccactcactactggccagcagctgggcttctgctgaacttcatgccccaccaggaaatgatgaacacaagcccttgagagagtggtttgtcattgtgattatggcaaccatctgcttcatcttgttaattctctcgcttatctgtaaaatatgtcatttatggatcaagttgtttccaccaattccagcaccaaaaagtaatatcaaagatctctttgtaaccactaactatgagaaagctgggtccagtgagacggaaattgaagtcatctgttatatagagaagcctggagttgagaccctggaggattctgtgttttga

SEQ ID NO: 14813 - DNA, 2514 bp, Homo sapiens
  source 1..2514: mol_type = unassigned DNA
aaacaaaacagaaatgcaacgctttagagtacccacggaaaacttgtttaccttgtcaccatgagtaaaagttaattcccactcctgaagagagcaaaccaactctgaaagagagtgaaaatgcagacaagacagttatcagataatggctatctggacgagagattctttcgtttgacagcagtttggttgttgggagttccagttcagctcctgcacagttgctctgtacaaatcctcctccatatttgcttagagaaaacgtgttgccatcccatcatgaaggaagctgcctgagagtttttaaccattacagccgtgatgatgaaagagtgaagaaccgcctctaagttaaaaagtgcacccagagataaggttcgttctcaatgccctgccgctgcttctcatcgcatggccaccgcatttctcaggccaggcacattgagcattggtcctgtgcctgacgctatgctagatgctggggttgcagccacgagcatagacacgacagacacggtcctcgccatcttctgttgagtactggtcggaacaagaggatcgtctgtagacaggatatgatcatcgtggcgcatgtattactcatccttttgggggccactgagatactgcaagctgacttacttcctgatgaaaagatttcacttctcccacctgtcaatttcaccattaaagttactggtttggctcaagttcttttacaatggaaaccaaatcctgatcaagagcaaaggaatgttaatctagaatatcaagtgaaaataaacgctccaaaagaagatgactatgaaaccagaatcactgaaagcaaatgtgtaaccatcctccacaaaggcttttcagcaagtgtgcggaccatcctgcagaacgaccactcactactggccagcagctgggcttctgctgaacttcatgccccaccagggtctcctggaacctcaattgtgaatttaacttgcaccacaaacactacagaagacaattattcacgtttaaggtcataccaagtttcccttcactgcacctggcttgttggcacagatgcccctgaggacacgcagtattttctctactataggtatggctcttggactgaagaatgccaagaatacagcaaagacacactggggagaaatatcgcatgctggtttcccaggacttttatcctcagcaaagggcgtgactggcttgcggtgcttgttaacggctccagcaagcactctgctatcaggccctttgatcagctgtttgcccttcacgccattgatcaaataaatcctccactgaatgtcacagcagagattgaaggaactcgtctctctatccaatgggagaaaccagtgtctgcttttccaatccattgctttgattatgaagtaaaaatacacaatacaaggaatggatatttgcagatagaaaaattgatgaccaatgcattcatctcaataattgatgatctttctaagtacgatgttcaagtgagagcagcagtgagctccatgtgcagagaggcagggctctggagtgagtggagccaacctatttatgtgggaaatgatgaacacaagcccttgagagagtggtttgtcattgtgattatggcaaccatctgcttcatcttgttaattctctcgcttatctgtaaaatatgtcatttatggatcaagttgtttccaccaattccagcaccaaaaagtaatatcaaagatctctttgtaaccactaactatgagaaagctgggtccagtgagacggaaattgaagtcatctgttatatagagaagcctggagttgagaccctggaggattctgtgttttgactgtcactttggcatcctctgatgaactcacacatgcctcagtgcctcagtgaaaagaacagggatgctggctcttggctaagaggtgttcagaatttaggcaacactcaatttacctgcgaagcaatacacccagacacaccagtcttgtatctcttaaaagtatggatgcttcatccaaatcgcctcacctacagcagggaagttgactcatccaagcattttgccatgttttttctccccatgccgtacagggtagcacctcctcacctgccaatctttgcaatttgcttgactcacctcagacttttcattcacaacagacagcttttaaggctaacgtccagctgtatttacttctggctgtgcccgtttggctgtttaagctgccaattgtagcactcagctaccatctgaggaagaaagcattttgcatcagcctggagtgaaccatgaacttggattcaagactgtcttttctatagcaagtgagagccacaaattcctcacccccctacattctagaatgatctttttctaggtagattgtgtatgtgtgtgtatgagagagagagagagagagagagagagagaaattatctcaagctccagaggcctgatccaggatacatcatttgaaaccaactaatttaaaagcataatagagctaatatat

SEQ ID NO: 14814 - DNA, 1389 bp, Homo sapiens
  source 1..1389: mol_type = unassigned DNA
ctgccgctgcttctcatcgcatggccaccgcatttctcaggccaggcacattgagcattggtcctgtgcctgacgctatgctagatgctggggttgcagccacgagcatagacacgacagacacggtcctcgccatcttctgttgagtactggtcggaacaagaggatcgtctgtagacaggatatgatcatcgtggcgcatgtattactcatccttttgggggccactgagatactgcaagctgacttacttcctgatgaaaagatttcacttctcccacctgtcaatttcaccattaaagttactggtttggctcaagttcttttacaatggaaaccaaatcctgatcaagagcaaaggaatgttaatctagaatatcaagtgaaaataaacgctccaaaagaagatgactatgaaaccagaatcactgaaagcaaatgtgtaaccatcctccacaaaggcttttcagcaagtgtgcggaccatcctgcagaacgaccactcactactggccagcagctgggcttctgctgaacttcatgccccaccagggtctcctggaacctcaattgtgaatttaacttgcaccacaaacactacagaagacaattattcacgtttaaggtcataccaagtttcccttcactgcacctggcttgttggcacagatgcccctgaggacacgcagtattttctctactataggtatggctcttggactgaagaatgccaagaatacagcaaagacacactggggagaaatatcgcatgctggtttcccaggacttttatcctcagcaaagggcgtgactggcttgcggtgcttgttaacggctccagcaagcactctgctatcaggccctttgatcagctgtttgcccttcacgccattgatcaaataaatcctccactgaatgtcacagcagagattgaaggaactcgtctctctatccaatgggagaaaccagtgtctgcttttccaatccattgctttgattatgaagtaaaaatacacaatacaaggaatggatatttgcagatagaaaaattgatgaccaatgcattcatctcaataattgatgatctttctaagtacgatgttcaagtgagagcagcagtgagctccatgtgcagagaggcagggctctggagtgagtggagccaacctatttatgtgggtaagtagcttatgtttattttacattggcagccttccttgtgatcaaaaaaggtaatcccagaaacgtacccgttcactcgtgggtcttaaaatggtttcatatctctattgtgactaattttctctcggtctactgccttttcaatcaggaatagatttgccatgaagccagtgaagtttttaagtgtctaggcttctcattagcgcca

SEQ ID NO: 14815 - DNA, 3217 bp, Homo sapiens
  source 1..3217: mol_type = unassigned DNA
ggcgctgtggcaggaagccaccccctcggtcggccggtgcgcggggctgttgcgccatccgctccggctttcgtaaccgcaccctgggacggcccagagacgctccagcgcgagttcctcaaatgttttcctgcgttgccaggaccgtccgccgctctgagtcatgtgcgagtgggaagtcgcactgacactgagccgggccagagggagaggagccgagcgcggcgcggggccgagggactcgcagtgtgtgtagagagccgggctcctgcggatgggggctgcccccggggcctgagcccgcctgcccgcccaccgccccgccccgcccctgccacccctgccgcccggttcccattagcctgtccgcctctgcgggaccatggagtggtagccgaggaggaagcatgctggccgtcggctgcgcgctgctggctgccctgctggccgcgccgggagcggcgctggccccaaggcgctgccctgcgcaggaggtggcgagaggcgtgctgaccagtctgccaggagacagcgtgactctgacctgcccgggggtagagccggaagacaatgccactgttcactgggtgctcaggaagccggctgcaggctcccaccccagcagatgggctggcatgggaaggaggctgctgctgaggtcggtgcagctccacgactctggaaactattcatgctaccgggccggccgcccagctgggactgtgcacttgctggtggatgttccccccgaggagccccagctctcctgcttccggaagagccccctcagcaatgttgtttgtgagtggggtcctcggagcaccccatccctgacgacaaaggctgtgctcttggtgaggaagtttcagaacagtccggccgaagacttccaggagccgtgccagtattcccaggagtcccagaagttctcctgccagttagcagtcccggagggagacagctctttctacatagtgtccatgtgcgtcgccagtagtgtcgggagcaagttcagcaaaactcaaacctttcagggttgtggaatcttgcagcctgatccgcctgccaacatcacagtcactgccgtggccagaaacccccgctggctcagtgtcacctggcaagacccccactcctggaactcatctttctacagactacggtttgagctcagatatcgggctgaacggtcaaagacattcacaacatggatggtcaaggacctccagcatcactgtgtcatccacgacgcctggagcggcctgaggcacgtggtgcagcttcgtgcccaggaggagttcgggcaaggcgagtggagcgagtggagcccggaggccatgggcacgccttggacagaatccaggagtcctccagctgagaacgaggtgtccacccccatgcaggcacttactactaataaagacgatgataatattctcttcagagattctgcaaatgcgacaagcctcccaggttcaagaagacgtggaagctgcgggctctgaaggaaggcaagacaagcatgcatccgccgtactctttggggcagctggtcccggagaggcctcgacccaccccagtgcttgttcctctcatctccccaccggtgtcccccagcagcctggggtctgacaatacctcgagccacaaccgaccagatgccagggacccacggagcccttatgacatcagcaatacagactacttcttccccagatagctggctgggtggcaccagcagcctggaccctgtggatgataaaacacaaacgggctcagcaaaagatgcttctcactgccatgccagcttatctcaggggtgtgcggcctttggcttcacggaagagccttgcggaaggttctacgccaggggaaaatcagcctgctccagctgttcagctggttgaggtttcaaacctccctttccaaatgcccagcttaaaggggctagagtgaacttgggccactgtgaagagaaccatatcaagactctttggacactcacacggacactcaaaagctgggcaggttggtgggggcctcggtgtggagaagcggctggcagcccacccctcaacacctctgcacaagctgcaccctcaggcaggtgggatggatttccagccaaagcctcctccagccgccatgctcctggcccactgcatcgtttcatcttccaactcaaactcttaaaacccaagtgccttagcaaattctgtttttctaggcctggggacggcttttacttaaaccgccaaggctgggggaagaagctctctcctccctttcttccctacagttgaaaaacagctgagggtgagtgggtgaataatacagtatctcagggcctggtcgttttcaacagaattataattagttcctcattagcattttgctaaatgtgaatgatgatcctaggcatttgctgaatacagaggcaactgcattggctttgggttgcaggacctcaggtgagaagcagaggaaggagaggagaggggcacagggtctctaccatcccctgtagagtgggagctgagtgggggatcacagcctctgaaaaccaatgttctctcttctccacctcccacaaaggagagctagcagcagggagggcttctgccatttctgagatcaaaacggttttactgcagctttgtttgttgtcagctgaacctgggtaactagggaagataatattaaggaagacaatgtgaaaagaaaaatgagcctggcaagaatgtgtttaaacttggtttttaaaaaactgctgactgttttctcttgagagggtggaatatccaatattcgctgtgtcagcatagaagtaacttacttaggtgtgggggaagcaccataactttgtttagcccaaaaccaagtcaagtgaaaaaggaggaagagaaaaaatattttcctgccaggcatggtggcccacgcacttcgggaggtcgaggcaggaggatcacttgagtccagaagtttgagatcagcctgggcaatgtgataaaaccccatctctacaaaaagcataaaaattagccaagtgtggtagagtgtgcctgaagtcccagatacttggggggctgaggtgggaggatctcttgagcctgggaggtcaaggctgcagtgagccgagattgcaccactgcactccagcctgggtgacagagcaagtgagaccctgtctcaaaaaaagaaaaagaaaaagaaaaaa

SEQ ID NO: 14816 - DNA, 5914 bp, Homo sapiens
  source 1..5914: mol_type = unassigned DNA
ggcggtcccctgttctccccgctcaggtgcggcgctgtggcaggaagccaccccctcggtcggccggtgcgcggggctgttgcgccatccgctccggctttcgtaaccgcaccctgggacggcccagagacgctccagcgcgagttcctcaaatgttttcctgcgttgccaggaccgtccgccgctctgagtcatgtgcgagtgggaagtcgcactgacactgagccgggccagagggagaggagccgagcgcggcgcggggccgagggactcgcagtgtgtgtagagagccgggctcctgcggatgggggctgcccccggggcctgagcccgcctgcccgcccaccgccccgccccgcccctgccacccctgccgcccggttcccattagcctgtccgcctctgcgggaccatggagtggtagccgaggaggaagcatgctggccgtcggctgcgcgctgctggctgccctgctggccgcgccgggagcggcgctggccccaaggcgctgccctgcgcaggaggtggcgagaggcgtgctgaccagtctgccaggagacagcgtgactctgacctgcccgggggtagagccggaagacaatgccactgttcactgggtgctcaggaagccggctgcaggctcccaccccagcagatgggctggcatgggaaggaggctgctgctgaggtcggtgcagctccacgactctggaaactattcatgctaccgggccggccgcccagctgggactgtgcacttgctggtggatgttccccccgaggagccccagctctcctgcttccggaagagccccctcagcaatgttgtttgtgagtggggtcctcggagcaccccatccctgacgacaaaggctgtgctcttggtgaggaagtttcagaacagtccggccgaagacttccaggagccgtgccagtattcccaggagtcccagaagttctcctgccagttagcagtcccggagggagacagctctttctacatagtgtccatgtgcgtcgccagtagtgtcgggagcaagttcagcaaaactcaaacctttcagggttgtggaatcttgcagcctgatccgcctgccaacatcacagtcactgccgtggccagaaacccccgctggctcagtgtcacctggcaagacccccactcctggaactcatctttctacagactacggtttgagctcagatatcgggctgaacggtcaaagacattcacaacatggatggtcaaggacctccagcatcactgtgtcatccacgacgcctggagcggcctgaggcacgtggtgcagcttcgtgcccaggaggagttcgggcaaggcgagtggagcgagtggagcccggaggccatgggcacgccttggacagaatccaggagtcctccagctgagaacgaggtgtccacccccatgcaggcacttactactaataaagacgatgataatattctcttcagagattctgcaaatgcgacaagcctcccagtgcaagattcttcttcagtaccactgcccacattcctggttgctggagggagcctggccttcggaacgctcctctgcattgccattgttctgaggttcaagaagacgtggaagctgcgggctctgaaggaaggcaagacaagcatgcatccgccgtactctttggggcagctggtcccggagaggcctcgacccaccccagtgcttgttcctctcatctccccaccggtgtcccccagcagcctggggtctgacaatacctcgagccacaaccgaccagatgccagggacccacggagcccttatgacatcagcaatacagactacttcttccccagatagctggctgggtggcaccagcagcctggaccctgtggatgataaaacacaaacgggctcagcaaaagatgcttctcactgccatgccagcttatctcaggggtgtgcggcctttggcttcacggaagagccttgcggaaggttctacgccaggggaaaatcagcctgctccagctgttcagctggttgaggtttcaaacctccctttccaaatgcccagcttaaaggggctagagtgaacttgggccactgtgaagagaaccatatcaagactctttggacactcacacggacactcaaaagctgggcaggttggtgggggcctcggtgtggagaagcggctggcagcccacccctcaacacctctgcacaagctgcaccctcaggcaggtgggatggatttccagccaaagcctcctccagccgccatgctcctggcccactgcatcgtttcatcttccaactcaaactcttaaaacccaagtgccttagcaaattctgtttttctaggcctggggacggcttttacttaaaccgccaaggctgggggaagaagctctctcctccctttcttccctacagttgaaaaacagctgagggtgagtgggtgaataatacagtatctcagggcctggtcgttttcaacagaattataattagttcctcattagcattttgctaaatgtgaatgatgatcctaggcatttgctgaatacagaggcaactgcattggctttgggttgcaggacctcaggtgagaagcagaggaaggagaggagaggggcacagggtctctaccatcccctgtagagtgggagctgagtgggggatcacagcctctgaaaaccaatgttctctcttctccacctcccacaaaggagagctagcagcagggagggcttctgccatttctgagatcaaaacggttttactgcagctttgtttgttgtcagctgaacctgggtaactagggaagataatattaaggaagacaatgtgaaaagaaaaatgagcctggcaagaatgtgtttaaacttggtttttaaaaaactgctgactgttttctcttgagagggtggaatatccaatattcgctgtgtcagcatagaagtaacttacttaggtgtgggggaagcaccataactttgtttagcccaaaaccaagtcaagtgaaaaaggaggaagagaaaaaatattttcctgccaggcatggtggcccacgcacttcgggaggtcgaggcaggaggatcacttgagtccagaagtttgagatcagcctgggcaatgtgataaaaccccatctctacaaaaagcataaaaattagccaagtgtggtagagtgtgcctgaagtcccagatacttggggggctgaggtgggaggatctcttgagcctgggaggtcaaggctgcagtgagccgagattgcaccactgcactccagcctgggtgacagagcaagtgagaccctgtctcaaaaaaagaaaaagaaaaagaaaaaatattttccctattagagaagagattgtggtttcattctgtattttgtttttgtcttaaaaagtggaaaaatagcctgcctcttctctactctagggaaaaaccagcgtgtgactactcccccaggtggttatggagagggtgtccggtccctgtcccagtgccgagaaggaagcctcccacgactgcccggcagggtcctagaaattccccaccctgaaagccctgagctttctgctatcaaagaggttttaaaaaaatcccatttaaaaaaaatcccttacctcggtgccttcctctttttatttagttccttgagttgattcagctctgcaagaattgaagcaggactaaatgtctagttgtaacaccatgattaaccacttcagctgacttttctgtccgagctttgaaaattcagtggtgttagtggttacccagttagctctcaagttatcagggtattccagagtggggatatgatttaaatcagccgtgtaaccatggacccaatatttaccagaccacaaaacttttctaatactctaccctcttagaaaaaccaccaccatcaccagacaggtgcgaaaggatgaaagtgaccatgttttgtttacggttttccaggtttaagctgttactgtcttcagtaagccgtgattttcattgctgggcttgtctgtagattttagaccctattgctgcttgaggcaactcatcttaggttggcaaaaaggcaggatggccgggcgcggtggctcacgcctgtaatcctagcactttgggaggccaaggtgggaggattgcttgagctcaggagtttgagaccaacctgggtaacatagtgagacaccatctctattatgaacaataacagttaagaaaaaaaaaggcaggcaggcggttatggtggttccctcccatcccaccacataaagtttctgagacttgagaacagcaaaatgctgttaaagggaaatattaagaatgagaatctgcagtaagggtgattctgtgcccacagttcttcaattctttataccgttttacccacatgtggtgttaccaaagccgggcagaaccatgctagcggaagatgtgaaatccagatagctcattattgccaagagctaggcagctttgatctccaaattgttattgctttcatttttattgtaatggaattgctttgttttgtttttttgtttttgtattgaagagggttgttttccctttatttttcataagctaatgtaaatgaagaaaaaatgtcttctctgggctgtaggcctggctcagcgtacacaggtatacatcctaagctctctatgttctctaatctgtggtgactgaacatgtgtctcaatgcacggggcatttctacctgtgtttctgcagcacccccactgccttgagtccccagcagtgctgttatttgcctaacacctgtagccatctgccacgcagccagacgtgaaacgctgagacagagaccatttaggttaaatacgacagcttatcctgctgggtggggaaagtaaaaaatatgctggttcaaggcctaaagtaaaatgatcaataatgtttgtagcattaatgaaatattttcaagaaatgtgtccaggggtagcactggctatgttgacgaggcctttggtaactcagagagctcttggccctgatggggacttgcccttacgctttctttatcaggctctgagttcacacggagcctctggcacttccctgctgtcttgggagaaaggaaactggttgccgcggcaggttgtggaatctgttgctggaaccaggctggaagcccacctggtagtgaacagggcccagtggggcaggctgggcatgttgtggtctatgggtttgtttcctggagaatgttcaggaatgtcttcccagctgctttggtgctgagctctattatctcacagcacgtccagaaggctaacccaggtggggaggatgctgacaccagctccaggtggagttggtggtcttaatttggagatgcaggggcaacctgtgaccctttgaggcaagagccctgcacccagctgtcccgtgcagccgtgggcaggggctgcacacggaggggcaggcgggccagttcagggtccgtgccaggccctcctcagtgccctgtgaaggcctcctgtcctccgtgcggctgggcaccagcaccagggagtttctatggcaaccttagtgattattaaggaacactgtcagttttatgaacatatgctcaaatgaaattctactttaggaggaaaggattggaacagcatgtcacaaggctgttaattaacagagagaccttattggatggagatcacatctgttaaatagaatacctcaactctacgttgttttcttggagataaataatagtttcaagtttttgtttgtttgttttacctaattacctgaaagcaaataccaaaggctgatgtctgtatatggggcaaagggtcagtatatttttcagtgtttttttttctaccagctattttgcatttaaagtgaacattgtgtttggaataaatactcttaaaaaata

SEQ ID NO: 14817 - DNA, 8750 bp, Homo sapiens
  source 1..8750: mol_type = unassigned DNA
tattacatgtgtctgttgcagaaatatccgcgcaagatgttgacgttgcagacttggctagtgcaagccttgtttattttcctcaccactgaatctacaggtgaacttctagatccatgtggttatatcagtcctgaatctccagttgtacaacttcattctaatttcactgcagtttgtgtgctaaaggaaaaatgtatggattattttcatgtaaatgctaattacattgtctggaaaacaaaccattttactattcctaaggagcaatatactatcataaacagaacagcatccagtgtcacctttacagatatagcttcattaaatattcagctcacttgcaacattcttacattcggacagcttgaacagaatgtttatggaatcacaataatttcaggcttgcctccagaaaaacctaaaaatttgagttgcattgtgaacgaggggaagaaaatgaggtgtgagtgggatggtggaagggaaacacacttggagacaaacttcactttaaaatctgaatgggcaacacacaagtttgctgattgcaaagcaaaacgtgacacccccacctcatgcactgttgattattctactgtgtattttgtcaacattgaagtctgggtagaagcagagaatgcccttgggaaggttacatcagatcatatcaattttgatcctgtatataaagtgaagcccaatccgccacataatttatcagtgatcaactcagaggaactgtctagtatcttaaaattgacatggaccaacccaagtattaagagtgttataatactaaaatataacattcaatataggaccaaagatgcctcaacttggagccagattcctcctgaagacacagcatccacccgatcttcattcactgtccaagaccttaaaccttttacagaatatgtgtttaggattcgctgtatgaaggaagatggtaagggatactggagtgactggagtgaagaagcaagtgggatcacctatgaagatagaccatctaaagcaccaagtttctggtataaaatagatccatcccatactcaaggctacagaactgtacaactcgtgtggaagacattgcctccttttgaagccaatggaaaaatcttggattatgaagtgactctcacaagatggaaatcacatttacaaaattacacagttaatgccacaaaactgacagtaaatctcacaaatgatcgctatctagcaaccctaacagtaagaaatcttgttggcaaatcagatgcagctgttttaactatccctgcctgtgactttcaagctactcaccctgtaatggatcttaaagcattccccaaagataacatgctttgggtggaatggactactccaagggaatctgtaaagaaatatatacttgagtggtgtgtgttatcagataaagcaccctgtatcacagactggcaacaagaagatggtaccgtgcatcgcacctatttaagagggaacttagcagagagcaaatgctatttgataacagttactccagtatatgctgatggaccaggaagccctgaatccataaaggcataccttaaacaagctccaccttccaaaggacctactgttcggacaaaaaaagtagggaaaaacgaagctgtcttagagtgggaccaacttcctgttgatgttcagaatggatttatcagaaattatactatattttatagaaccatcattggaaatgaaactgctgtgaatgtggattcttcccacacagaatatacattgtcctctttgactagtgacacattgtacatggtacgaatggcagcatacacagatgaaggtgggaaggatggtccagaattcacttttactaccccaaagtttgctcaaggagaaattgaagccatagtcgtgcctgtttgcttagcattcctattgacaactcttctgggagtgctgttctgctttaataagcgagacctaattaaaaaacacatctggcctaatgttccagatccttcaaagagtcatattgcccagtggtcacctcacactcctccaaggcacaattttaattcaaaagatcaaatgtattcagatggcaatttcactgatgtaagtgttgtggaaatagaagcaaatgacaaaaagccttttccagaagatctgaaatcattggacctgttcaaaaaggaaaaaattaatactgaaggacacagcagtggtattggggggtcttcatgcatgtcatcttctaggccaagcatttctagcagtgatgaaaatgaatcttcacaaaacacttcgagcactgtccagtattctaccgtggtacacagtggctacagacaccaagttccgtcagtccaagtcttctcaagatccgagtctacccagcccttgttagattcagaggagcggccagaagatctacaattagtagatcatgtagatggcggtgatggtattttgcccaggcaacagtacttcaaacagaactgcagtcagcatgaatccagtccagatatttcacattttgaaaggtcaaagcaagtttcatcagtcaatgaggaagattttgttagacttaaacagcagatttcagatcatatttcacaatcctgtggatctgggcaaatgaaaatgtttcaggaagtttctgcagcagatgcttttggtccaggtactgagggacaagtagaaagatttgaaacagttggcatggaggctgcgactgatgaaggcatgcctaaaagttacttaccacagactgtacggcaaggcggctacatgcctcagtgaaggactagtagttcctgctacaacttcagcagtacctataaagtaaagctaaaatgattttatctgtgaattcagattttaaaaagtcttcactctctgaagatgatcatttgcccttaaggacaaaaatgaactgaagtttcacatgagctatttccattccagaatatctgggattctactttaagcactacataaactgactttatcctcagactagctgaatgattttgtgctgtttcaggatgtttgcactgaagaaaaacagaaagcttatctgaaatttataaaactttttgttttgctacatagaaaacagaaggtatttgaataataagcagtgatatgcttagtgagcacagctatactgattttgattagaatagtcatcagagtggcttagggacagttaatataaaagaggagcaaggtgtagaccatcatctacttctgctaaaataacttaaaaagaggtccataggccataactacatgagcccagcttttgtaatctgacaaaaaaatgaggagcagcttcgtgtatatcagtgtacacggtattccttaggtcccttccattggtagtgatgctgcgagttattactggagaaaaggaattctagagctttaacttggcagattaaaagtactcattttttattcatcaataattagtaatctcactagttttcaaaaatttgcatattattgacaacctctttgaagatgcatttcacaaactcaacagagtgccatgataagagctagggatcccccaaactatctcaagcatctaaaaaattgccatttttaaaggcttaaattgtagtagtaaaggggaaaacaggaagtagtagtaaaggggaaaaaaaaccaataaagcatctaaaaaattggcatgttaaaaggcttaaattgctaatgtgtgtatatatatatatatatatacacacacatatcattgacttttcttaagacttcagagtactgggtagatgaacactttatacagtatatatcttcagcttaaatttgttttgagtattttttttatttttaaataagtaggcaaagatttaaatttttttatttttagtaaatgtttgaggcacactaagacaacttgggcaatatttgccaaaacaaaacagaaccccaaaaaatgtacatcttgttcttagcaaatatcattattgtagagacacttaataaagagatggtattttaatgtctgcagttctgaggtagggtggaacttagttctacattgtgatttaggaatttttaaaaccttttttcttcaagggagaagtgacccaggcctcgagtttagtgctaaagccgctagtgtacttatgctgtcccctaaccaccacgtgcgatatggaagcagatgctaaatataggggttttcttagaaagtaagaggaaattagcaagcgttattagtgattgactactgctatcaagtgaattcaaaggaaacaggtttttatgccatatttaagttacagaaaccaggcatgcttagaatagtttctagaggttattggagaatagaaagctaagaaaacttggtatacatttacaatggaaatataattacactttttactctcagaatattgttcacattagacttcctgtttatcttttatattcttgcatttatataatgcctcatcctttcaaagttctttcacatattatatgatcttctttatgaaaaaaatagatgtttcattctgatatattcagtttcccactttaggcaaaagtagattaatagaatgacgaattcaaagtagatgaggaaaatcaggcacagagaagtaaaggtagggatagacccaaatttacacaacaagataatgacatctccagcttttaagttgatcatcaaaggctgggctggatttgtcttgctgtatgtgtcaggaaatttatacctattacattttccattttctcaaaatttaagtcacatgactaatatttagctgcaactttcctcataacaaatagtgtcatgaagaatgttgtagtgtgaagtttgtacatttcagggtcagatatacaatatgaactcttaatctacaggaatgagaatggaggatcattgaaggccatgatataaacaaatttgcatgttgaagcctgtataaaacatggtacagtgagtgaatatacccccatccccaagaacactttatacatattaaatggatatatgattactgtgcaaaaattcattctggaaatgaacatatatttgagcactaatatgtaatgtacacctgccctaaggagaaaataaattataaaactttttacattcaaaattactttcccaagcatgtcttagaataatctatgtgttgatgcatgtaaattgtactttaggtaggcaaagaaatctggttatttatgtaaaaactagtctaataaagttagttagtggctttatcactttaaatctttagtgtccaaaagtggtgtttaaagtaatagcacatcagaaaaccttgtctggacaaaactagttcactcactgcttctgcacctgcagttgctccctttagggttataaaataatgacccaaatgttacatgtgttgatattataacttgtcagttactgatgtctgtggtatcctaccctcatctctgaaagggataatactgaataattattagaaaactataaaacttcacactttgtaccattaaaacctaaaattttaatcttgtccttttttactatggatcagtcggcactcgggaacagcagcaaggaaaaaaagcaaatttcattcacatgttctgtgttcatacctcttctctacctaattgttcatttaaatttcagccttattccttgataagggattttaccacatgaagtcatccagtgaccctagctcttattgtgaagttagtggagtatacttagaaatgttacaactttaaaatgttacaaaacattcattaaagctcatatttaaagtagagcatctagtttgagaaatagaaatcaattattaaagatgtcttttttctacccatttaactagttaaaaccatgacatgtaaatgtagaagtagaataatcatagaattccctaaaatatttctgtttactaacatatattgaccaagtacatcaagcaggagagatcttccttcattctgttatagtccacatcattctaattttgctcagttgttattaagagcatattcctaaaccatacacttttgtttcaataaagttttattttgttgagatgaataaaataacaaagttataagctgcataagacaaaagttcaattgttcaaaaaaaatttactgggatagctttctattacaggtattgttagattatattgtgctgataagattactttctaaaaaatttgtacttttctgtaaattaaaagaatatggagtcataaaatggcaagtgttttaggattagcctaaaattggacattgtcattgatttcaaagaaggtatgaactagcagtcttacagcctaattcttctttggactggtccttggcagcagttccttttcagactcgataaacagaattcagatgatgtaagtcaaaacaaaactttacaaagccaagcgtattatcttttgcattaacctatttttttccatcatacatgctactagtatgtgcattagcatgatattctcatatacattgcattaaaaattaaaaggtggcagctcagggtgagctcttctgttgctcatttgttcctaaatttttaagggctttttctcagtcaatagtttgtacaaactggttagtttaacttcattacccatttcattaaagttgatgggtcgtgtgatgagatgcatttaaggccgatagtgatagatgttttttttatttcttgaacacaggctttgtctgaatgatgttcttttatctcttgaacacaagctttgaatgataactacaggttttaagtgctgttacattaataccataatgtgatgtgttagaaacaaagggatatttcaaaggtagatatttgaaaattctctagtctcaatatgtatgtgtattgaatatactctaaaaataaatgtgcaatttgctagtaggacaatgcagtgactgactagcattaggtatgtttcttttatatcctagctatgtcccactttcttctaagtgcaatcctttcatgttcacttgctgttttaccccatctactctaacttcatttggaaggcttgtctagagtatagcatgtatttttacctttgcagtgaattgcatgtgctaattgtaaccacagctatttttatgttgacataactccaaatgttatattaaatgttctattatatattagctctaatcccttaagtaaattttaagaaataaatacttgttcaaattttttttctgtatgtggttactatcatctgactatgcatatttgtaacagcatttatcattagtggtgttagctaaataagcatcttagtgtaaatgagatgcttcgtgtgggttttgtgacattttaaatgacataatggaatgtgatttaaaagaaaaccagtacactatcttggtcttaataacatagaatggagatggcaaatttatccactagttttccagatttactatttaatagctgaggtctgaaatcgtagcatcctccctcctagtggacattaaaaaaaaaaaaaaaaaaaaaaacctacttggttgtcaagagcccaagtatggaggtgctgcgccatcttgtggcctgtctgtgcccaccctgcactctgctggagtctccatccttgttgcagtgagacttgaagttcaagattgatacatggcatcctcctgctacttcttgaggttactaagtagtatatgaaactaatcagtcagcaagtccacctggaaggaaaagaaaatctcaactattaatgtgccttcacattgtgattttgtctaaaaaaatgtagtgagtcaaaaaacccacaagccagccaacagtaactccttcacatatataccagagtttatagaaataacatgtcagctttgggctatgtgctcctttgtttaaaatcttctatttggttatggcttgtataggctcaagcctgatttctttaaggtgtggtggctcatcttatcctaatgtgtatgatagatacagtccatcctgctttggaaaagattatgtaactccttgagagcatactctttctctagcccaaaggcagtgagagagttttcttgttcaggattgcttaactttccatttaagctttttctttttaaattaatacaaacttctacactttcaaaatacgaaatatattacaactgcgtataggctcttccatacttaagtccagtgcttgggcaagttaatggagtgaaagactacaagcaaagaggaactgaggtagaaaaagaagaatgtgtgaaagcagcaggaagctcagccaactcgaaagcagggtgaacagcttgagtcctgttgctgctgatcggggttggctcttggacaacttagtaagatcatggaaaggctgcttgggttctccatagaaaagttctgtctccatcaagggaggaaaatgtacctttcaactcaaaattcaatatttgtttttaaatatagctattttccccaaccgctaaagattttcaacagatacgaagccagagcttagttttagaaacctgtggacattcaaacctgattctttattccctgtgactatggttatgtcattttacatgtcaaaaaagtgtatctagaattgtcatttcttatttttgagctttttttagtgagaattatcccctcacttaaatggctttttatttaaacatctgtgcattctgtatgaaattgtagtctttctgggataacatggtgagctatatggtggtaatccacacac

SEQ ID NO: 14818 - DNA, 8667 bp, Homo sapiens
  source 1..8667: mol_type = unassigned DNA
tattacatgtgtctgttgcagaaatatccgcgcaagatgttgacgttgcagacttggctagtgcaagccttgtttattttcctcaccactgaatctacaggtgaacttctagatccatgtggttatatcagtcctgaatctccagttgtacaacttcattctaatttcactgcagtttgtgtgctaaaggaaaaatgtatggattattttcatgtaaatgctaattacattgtctggaaaacaaaccattttactattcctaaggagcaatatactatcataaacagaacagcatccagtgtcacctttacagatatagcttcattaaatattcagctcacttgcaacattcttacattcggacagcttgaacagaatgtttatggaatcacaataatttcaggcttgcctccagaaaaacctaaaaatttgagttgcattgtgaacgaggggaagaaaatgaggtgtgagtgggatggtggaagggaaacacacttggagacaaacttcactttaaaatctgaatgggcaacacacaagtttgctgattgcaaagcaaaacgtgacacccccacctcatgcactgttgattattctactgtgtattttgtcaacattgaagtctgggtagaagcagagaatgcccttgggaaggttacatcagatcatatcaattttgatcctgtatataaagtgaagcccaatccgccacataatttatcagtgatcaactcagaggaactgtctagtatcttaaaattgacatggaccaacccaagtattaagagtgttataatactaaaatataacattcaatataggaccaaagatgcctcaacttggagccagattcctcctgaagacacagcatccacccgatcttcattcactgtccaagaccttaaaccttttacagaatatgtgtttaggattcgctgtatgaaggaagatggtaagggatactggagtgactggagtgaagaagcaagtgggatcacctatgaagataacattgcctccttttgaagccaatggaaaaatcttggattatgaagtgactctcacaagatggaaatcacatttacaaaattacacagttaatgccacaaaactgacagtaaatctcacaaatgatcgctatctagcaaccctaacagtaagaaatcttgttggcaaatcagatgcagctgttttaactatccctgcctgtgactttcaagctactcaccctgtaatggatcttaaagcattccccaaagataacatgctttgggtggaatggactactccaagggaatctgtaaagaaatatatacttgagtggtgtgtgttatcagataaagcaccctgtatcacagactggcaacaagaagatggtaccgtgcatcgcacctatttaagagggaacttagcagagagcaaatgctatttgataacagttactccagtatatgctgatggaccaggaagccctgaatccataaaggcataccttaaacaagctccaccttccaaaggacctactgttcggacaaaaaaagtagggaaaaacgaagctgtcttagagtgggaccaacttcctgttgatgttcagaatggatttatcagaaattatactatattttatagaaccatcattggaaatgaaactgctgtgaatgtggattcttcccacacagaatatacattgtcctctttgactagtgacacattgtacatggtacgaatggcagcatacacagatgaaggtgggaaggatggtccagaattcacttttactaccccaaagtttgctcaaggagaaattgaagccatagtcgtgcctgtttgcttagcattcctattgacaactcttctgggagtgctgttctgctttaataagcgagacctaattaaaaaacacatctggcctaatgttccagatccttcaaagagtcatattgcccagtggtcacctcacactcctccaaggcacaattttaattcaaaagatcaaatgtattcagatggcaatttcactgatgtaagtgttgtggaaatagaagcaaatgacaaaaagccttttccagaagatctgaaatcattggacctgttcaaaaaggaaaaaattaatactgaaggacacagcagtggtattggggggtcttcatgcatgtcatcttctaggccaagcatttctagcagtgatgaaaatgaatcttcacaaaacacttcgagcactgtccagtattctaccgtggtacacagtggctacagacaccaagttccgtcagtccaagtcttctcaagatccgagtctacccagcccttgttagattcagaggagcggccagaagatctacaattagtagatcatgtagatggcggtgatggtattttgcccaggcaacagtacttcaaacagaactgcagtcagcatgaatccagtccagatatttcacattttgaaaggtcaaagcaagtttcatcagtcaatgaggaagattttgttagacttaaacagcagatttcagatcatatttcacaatcctgtggatctgggcaaatgaaaatgtttcaggaagtttctgcagcagatgcttttggtccaggtactgagggacaagtagaaagatttgaaacagttggcatggaggctgcgactgatgaaggcatgcctaaaagttacttaccacagactgtacggcaaggcggctacatgcctcagtgaaggactagtagttcctgctacaacttcagcagtacctataaagtaaagctaaaatgattttatctgtgaattcagattttaaaaagtcttcactctctgaagatgatcatttgcccttaaggacaaaaatgaactgaagtttcacatgagctatttccattccagaatatctgggattctactttaagcactacataaactgactttatcctcagactagctgaatgattttgtgctgtttcaggatgtttgcactgaagaaaaacagaaagcttatctgaaatttataaaactttttgttttgctacatagaaaacagaaggtatttgaataataagcagtgatatgcttagtgagcacagctatactgattttgattagaatagtcatcagagtggcttagggacagttaatataaaagaggagcaaggtgtagaccatcatctacttctgctaaaataacttaaaaagaggtccataggccataactacatgagcccagcttttgtaatctgacaaaaaaatgaggagcagcttcgtgtatatcagtgtacacggtattccttaggtcccttccattggtagtgatgctgcgagttattactggagaaaaggaattctagagctttaacttggcagattaaaagtactcattttttattcatcaataattagtaatctcactagttttcaaaaatttgcatattattgacaacctctttgaagatgcatttcacaaactcaacagagtgccatgataagagctagggatcccccaaactatctcaagcatctaaaaaattgccatttttaaaggcttaaattgtagtagtaaaggggaaaacaggaagtagtagtaaaggggaaaaaaaaccaataaagcatctaaaaaattggcatgttaaaaggcttaaattgctaatgtgtgtatatatatatatatatatacacacacatatcattgacttttcttaagacttcagagtactgggtagatgaacactttatacagtatatatcttcagcttaaatttgttttgagtattttttttatttttaaataagtaggcaaagatttaaatttttttatttttagtaaatgtttgaggcacactaagacaacttgggcaatatttgccaaaacaaaacagaaccccaaaaaatgtacatcttgttcttagcaaatatcattattgtagagacacttaataaagagatggtattttaatgtctgcagttctgaggtagggtggaacttagttctacattgtgatttaggaatttttaaaaccttttttcttcaagggagaagtgacccaggcctcgagtttagtgctaaagccgctagtgtacttatgctgtcccctaaccaccacgtgcgatatggaagcagatgctaaatataggggttttcttagaaagtaagaggaaattagcaagcgttattagtgattgactactgctatcaagtgaattcaaaggaaacaggtttttatgccatatttaagttacagaaaccaggcatgcttagaatagtttctagaggttattggagaatagaaagctaagaaaacttggtatacatttacaatggaaatataattacactttttactctcagaatattgttcacattagacttcctgtttatcttttatattcttgcatttatataatgcctcatcctttcaaagttctttcacatattatatgatcttctttatgaaaaaaatagatgtttcattctgatatattcagtttcccactttaggcaaaagtagattaatagaatgacgaattcaaagtagatgaggaaaatcaggcacagagaagtaaaggtagggatagacccaaatttacacaacaagataatgacatctccagcttttaagttgatcatcaaaggctgggctggatttgtcttgctgtatgtgtcaggaaatttatacctattacattttccattttctcaaaatttaagtcacatgactaatatttagctgcaactttcctcataacaaatagtgtcatgaagaatgttgtagtgtgaagtttgtacatttcagggtcagatatacaatatgaactcttaatctacaggaatgagaatggaggatcattgaaggccatgatataaacaaatttgcatgttgaagcctgtataaaacatggtacagtgagtgaatatacccccatccccaagaacactttatacatattaaatggatatatgattactgtgcaaaaattcattctggaaatgaacatatatttgagcactaatatgtaatgtacacctgccctaaggagaaaataaattataaaactttttacattcaaaattactttcccaagcatgtcttagaataatctatgtgttgatgcatgtaaattgtactttaggtaggcaaagaaatctggttatttatgtaaaaactagtctaataaagttagttagtggctttatcactttaaatctttagtgtccaaaagtggtgtttaaagtaatagcacatcagaaaaccttgtctggacaaaactagttcactcactgcttctgcacctgcagttgctccctttagggttataaaataatgacccaaatgttacatgtgttgatattataacttgtcagttactgatgtctgtggtatcctaccctcatctctgaaagggataatactgaataattattagaaaactataaaacttcacactttgtaccattaaaacctaaaattttaatcttgtccttttttactatggatcagtcggcactcgggaacagcagcaaggaaaaaaagcaaatttcattcacatgttctgtgttcatacctcttctctacctaattgttcatttaaatttcagccttattccttgataagggattttaccacatgaagtcatccagtgaccctagctcttattgtgaagttagtggagtatacttagaaatgttacaactttaaaatgttacaaaacattcattaaagctcatatttaaagtagagcatctagtttgagaaatagaaatcaattattaaagatgtcttttttctacccatttaactagttaaaaccatgacatgtaaatgtagaagtagaataatcatagaattccctaaaatatttctgtttactaacatatattgaccaagtacatcaagcaggagagatcttccttcattctgttatagtccacatcattctaattttgctcagttgttattaagagcatattcctaaaccatacacttttgtttcaataaagttttattttgttgagatgaataaaataacaaagttataagctgcataagacaaaagttcaattgttcaaaaaaaatttactgggatagctttctattacaggtattgttagattatattgtgctgataagattactttctaaaaaatttgtacttttctgtaaattaaaagaatatggagtcataaaatggcaagtgttttaggattagcctaaaattggacattgtcattgatttcaaagaaggtatgaactagcagtcttacagcctaattcttctttggactggtccttggcagcagttccttttcagactcgataaacagaattcagatgatgtaagtcaaaacaaaactttacaaagccaagcgtattatcttttgcattaacctatttttttccatcatacatgctactagtatgtgcattagcatgatattctcatatacattgcattaaaaattaaaaggtggcagctcagggtgagctcttctgttgctcatttgttcctaaatttttaagggctttttctcagtcaatagtttgtacaaactggttagtttaacttcattacccatttcattaaagttgatgggtcgtgtgatgagatgcatttaaggccgatagtgatagatgttttttttatttcttgaacacaggctttgtctgaatgatgttcttttatctcttgaacacaagctttgaatgataactacaggttttaagtgctgttacattaataccataatgtgatgtgttagaaacaaagggatatttcaaaggtagatatttgaaaattctctagtctcaatatgtatgtgtattgaatatactctaaaaataaatgtgcaatttgctagtaggacaatgcagtgactgactagcattaggtatgtttcttttatatcctagctatgtcccactttcttctaagtgcaatcctttcatgttcacttgctgttttaccccatctactctaacttcatttggaaggcttgtctagagtatagcatgtatttttacctttgcagtgaattgcatgtgctaattgtaaccacagctatttttatgttgacataactccaaatgttatattaaatgttctattatatattagctctaatcccttaagtaaattttaagaaataaatacttgttcaaattttttttctgtatgtggttactatcatctgactatgcatatttgtaacagcatttatcattagtggtgttagctaaataagcatcttagtgtaaatgagatgcttcgtgtgggttttgtgacattttaaatgacataatggaatgtgatttaaaagaaaaccagtacactatcttggtcttaataacatagaatggagatggcaaatttatccactagttttccagatttactatttaatagctgaggtctgaaatcgtagcatcctccctcctagtggacattaaaaaaaaaaaaaaaaaaaaaaacctacttggttgtcaagagcccaagtatggaggtgctgcgccatcttgtggcctgtctgtgcccaccctgcactctgctggagtctccatccttgttgcagtgagacttgaagttcaagattgatacatggcatcctcctgctacttcttgaggttactaagtagtatatgaaactaatcagtcagcaagtccacctggaaggaaaagaaaatctcaactattaatgtgccttcacattgtgattttgtctaaaaaaatgtagtgagtcaaaaaacccacaagccagccaacagtaactccttcacatatataccagagtttatagaaataacatgtcagctttgggctatgtgctcctttgtttaaaatcttctatttggttatggcttgtataggctcaagcctgatttctttaaggtgtggtggctcatcttatcctaatgtgtatgatagatacagtccatcctgctttggaaaagattatgtaactccttgagagcatactctttctctagcccaaaggcagtgagagagttttcttgttcaggattgcttaactttccatttaagctttttctttttaaattaatacaaacttctacactttcaaaatacgaaatatattacaactgcgtataggctcttccatacttaagtccagtgcttgggcaagttaatggagtgaaagactacaagcaaagaggaactgaggtagaaaaagaagaatgtgtgaaagcagcaggaagctcagccaactcgaaagcagggtgaacagcttgagtcctgttgctgctgatcggggttggctcttggacaacttagtaagatcatggaaaggctgcttgggttctccatagaaaagttctgtctccatcaagggaggaaaatgtacctttcaactcaaaattcaatatttgtttttaaatatagctattttccccaaccgctaaagattttcaacagatacgaagccagagcttagttttagaaacctgtggacattcaaacctgattctttattccctgtgactatggttatgtcattttacatgtcaaaaaagtgtatctagaattgtcatttcttatttttgagctttttttagtgagaattatcccctcacttaaatggctttttatttaaacatctgtgcattctgtatgaaattgtagtctttctgggataacatggtgagctatatggtggtaatccacacac

SEQ ID NO: 14819 - DNA, 8567 bp, Homo sapiens
  source 1..8567: mol_type = unassigned DNA
tattacatgtgtctgttgcagaaatatccgcgcaagatgttgacgttgcagacttggctagtgcaagccttgtttattttcctcaccactgaatctacaggtgaacttctagatccatgtggttatatcagtcctgaatctccagttgtacaacttcattctaatttcactgcagtttgtgtgctaaaggaaaaatgtatggattattttcatgtaaatgctaattacattgtctggaaaacaaaccattttactattcctaaggagcaatatactatcataaacagaacagcatccagtgtcacctttacagatatagcttcattaaatattcagctcacttgcaacattcttacattcggacagcttgaacagaatgtttatggaatcacaataatttcaggcttgcctccagaaaaacctaaaaatttgagttgcattgtgaacgaggggaagaaaatgaggtgtgagtgggatggtggaagggaaacacacttggagacaaacttcactttaaaatctgaatgggcaacacacaagtttgctgattgcaaagcaaaacgtgacacccccacctcatgcactgttgattattctactgtgtattttgtcaacattgaagtctgggtagaagcagagaatgcccttgggaaggttacatcagatcatatcaattttgatcctgtatataaagtgaagcccaatccgccacataatttatcagtgatcaactcagaggaactgtctagtatcttaaaattgacatggaccaacccaagtattaagagtgttataatactaaaatataacattcaatataggaccaaagatgcctcaacttggagccagattcctcctgaagacacagcatccacccgatcttcattcactgtccaagaccttaaaccttttacagaatatgtgtttaggattcgctgtatgaaggaagatggtaagggatactggagtgactggagtgaagaagcaagtgggatcacctatgaagatagaccatctaaagcaccaagtttctggtataaaatagatccatcccatactcaaggctacagaactgtacaactcgtgtggaagacattgcctccttttgaagccaatggaaaaatcttggattatgaagtgactctcacaagatggaaatcacatttacaaaattacacagttaatgccacaaaactgacagtaaatctcacaaatgatcgctatctagcaaccctaacagtaagaaatcttgttggcaaatcagatgcagctgttttaactatccctgcctgtgactttcaagggaacttagcagagagcaaatgctatttgataacagttactccagtatatgctgatggaccaggaagccctgaatccataaaggcataccttaaacaagctccaccttccaaaggacctactgttcggacaaaaaaagtagggaaaaacgaagctgtcttagagtgggaccaacttcctgttgatgttcagaatggatttatcagaaattatactatattttatagaaccatcattggaaatgaaactgctgtgaatgtggattcttcccacacagaatatacattgtcctctttgactagtgacacattgtacatggtacgaatggcagcatacacagatgaaggtgggaaggatggtccagaattcacttttactaccccaaagtttgctcaaggagaaattgaagccatagtcgtgcctgtttgcttagcattcctattgacaactcttctgggagtgctgttctgctttaataagcgagacctaattaaaaaacacatctggcctaatgttccagatccttcaaagagtcatattgcccagtggtcacctcacactcctccaaggcacaattttaattcaaaagatcaaatgtattcagatggcaatttcactgatgtaagtgttgtggaaatagaagcaaatgacaaaaagccttttccagaagatctgaaatcattggacctgttcaaaaaggaaaaaattaatactgaaggacacagcagtggtattggggggtcttcatgcatgtcatcttctaggccaagcatttctagcagtgatgaaaatgaatcttcacaaaacacttcgagcactgtccagtattctaccgtggtacacagtggctacagacaccaagttccgtcagtccaagtcttctcaagatccgagtctacccagcccttgttagattcagaggagcggccagaagatctacaattagtagatcatgtagatggcggtgatggtattttgcccaggcaacagtacttcaaacagaactgcagtcagcatgaatccagtccagatatttcacattttgaaaggtcaaagcaagtttcatcagtcaatgaggaagattttgttagacttaaacagcagatttcagatcatatttcacaatcctgtggatctgggcaaatgaaaatgtttcaggaagtttctgcagcagatgcttttggtccaggtactgagggacaagtagaaagatttgaaacagttggcatggaggctgcgactgatgaaggcatgcctaaaagttacttaccacagactgtacggcaaggcggctacatgcctcagtgaaggactagtagttcctgctacaacttcagcagtacctataaagtaaagctaaaatgattttatctgtgaattcagattttaaaaagtcttcactctctgaagatgatcatttgcccttaaggacaaaaatgaactgaagtttcacatgagctatttccattccagaatatctgggattctactttaagcactacataaactgactttatcctcagactagctgaatgattttgtgctgtttcaggatgtttgcactgaagaaaaacagaaagcttatctgaaatttataaaactttttgttttgctacatagaaaacagaaggtatttgaataataagcagtgatatgcttagtgagcacagctatactgattttgattagaatagtcatcagagtggcttagggacagttaatataaaagaggagcaaggtgtagaccatcatctacttctgctaaaataacttaaaaagaggtccataggccataactacatgagcccagcttttgtaatctgacaaaaaaatgaggagcagcttcgtgtatatcagtgtacacggtattccttaggtcccttccattggtagtgatgctgcgagttattactggagaaaaggaattctagagctttaacttggcagattaaaagtactcattttttattcatcaataattagtaatctcactagttttcaaaaatttgcatattattgacaacctctttgaagatgcatttcacaaactcaacagagtgccatgataagagctagggatcccccaaactatctcaagcatctaaaaaattgccatttttaaaggcttaaattgtagtagtaaaggggaaaacaggaagtagtagtaaaggggaaaaaaaaccaataaagcatctaaaaaattggcatgttaaaaggcttaaattgctaatgtgtgtatatatatatatatatatacacacacatatcattgacttttcttaagacttcagagtactgggtagatgaacactttatacagtatatatcttcagcttaaatttgttttgagtattttttttatttttaaataagtaggcaaagatttaaatttttttatttttagtaaatgtttgaggcacactaagacaacttgggcaatatttgccaaaacaaaacagaaccccaaaaaatgtacatcttgttcttagcaaatatcattattgtagagacacttaataaagagatggtattttaatgtctgcagttctgaggtagggtggaacttagttctacattgtgatttaggaatttttaaaaccttttttcttcaagggagaagtgacccaggcctcgagtttagtgctaaagccgctagtgtacttatgctgtcccctaaccaccacgtgcgatatggaagcagatgctaaatataggggttttcttagaaagtaagaggaaattagcaagcgttattagtgattgactactgctatcaagtgaattcaaaggaaacaggtttttatgccatatttaagttacagaaaccaggcatgcttagaatagtttctagaggttattggagaatagaaagctaagaaaacttggtatacatttacaatggaaatataattacactttttactctcagaatattgttcacattagacttcctgtttatcttttatattcttgcatttatataatgcctcatcctttcaaagttctttcacatattatatgatcttctttatgaaaaaaatagatgtttcattctgatatattcagtttcccactttaggcaaaagtagattaatagaatgacgaattcaaagtagatgaggaaaatcaggcacagagaagtaaaggtagggatagacccaaatttacacaacaagataatgacatctccagcttttaagttgatcatcaaaggctgggctggatttgtcttgctgtatgtgtcaggaaatttatacctattacattttccattttctcaaaatttaagtcacatgactaatatttagctgcaactttcctcataacaaatagtgtcatgaagaatgttgtagtgtgaagtttgtacatttcagggtcagatatacaatatgaactcttaatctacaggaatgagaatggaggatcattgaaggccatgatataaacaaatttgcatgttgaagcctgtataaaacatggtacagtgagtgaatatacccccatccccaagaacactttatacatattaaatggatatatgattactgtgcaaaaattcattctggaaatgaacatatatttgagcactaatatgtaatgtacacctgccctaaggagaaaataaattataaaactttttacattcaaaattactttcccaagcatgtcttagaataatctatgtgttgatgcatgtaaattgtactttaggtaggcaaagaaatctggttatttatgtaaaaactagtctaataaagttagttagtggctttatcactttaaatctttagtgtccaaaagtggtgtttaaagtaatagcacatcagaaaaccttgtctggacaaaactagttcactcactgcttctgcacctgcagttgctccctttagggttataaaataatgacccaaatgttacatgtgttgatattataacttgtcagttactgatgtctgtggtatcctaccctcatctctgaaagggataatactgaataattattagaaaactataaaacttcacactttgtaccattaaaacctaaaattttaatcttgtccttttttactatggatcagtcggcactcgggaacagcagcaaggaaaaaaagcaaatttcattcacatgttctgtgttcatacctcttctctacctaattgttcatttaaatttcagccttattccttgataagggattttaccacatgaagtcatccagtgaccctagctcttattgtgaagttagtggagtatacttagaaatgttacaactttaaaatgttacaaaacattcattaaagctcatatttaaagtagagcatctagtttgagaaatagaaatcaattattaaagatgtcttttttctacccatttaactagttaaaaccatgacatgtaaatgtagaagtagaataatcatagaattccctaaaatatttctgtttactaacatatattgaccaagtacatcaagcaggagagatcttccttcattctgttatagtccacatcattctaattttgctcagttgttattaagagcatattcctaaaccatacacttttgtttcaataaagttttattttgttgagatgaataaaataacaaagttataagctgcataagacaaaagttcaattgttcaaaaaaaatttactgggatagctttctattacaggtattgttagattatattgtgctgataagattactttctaaaaaatttgtacttttctgtaaattaaaagaatatggagtcataaaatggcaagtgttttaggattagcctaaaattggacattgtcattgatttcaaagaaggtatgaactagcagtcttacagcctaattcttctttggactggtccttggcagcagttccttttcagactcgataaacagaattcagatgatgtaagtcaaaacaaaactttacaaagccaagcgtattatcttttgcattaacctatttttttccatcatacatgctactagtatgtgcattagcatgatattctcatatacattgcattaaaaattaaaaggtggcagctcagggtgagctcttctgttgctcatttgttcctaaatttttaagggctttttctcagtcaatagtttgtacaaactggttagtttaacttcattacccatttcattaaagttgatgggtcgtgtgatgagatgcatttaaggccgatagtgatagatgttttttttatttcttgaacacaggctttgtctgaatgatgttcttttatctcttgaacacaagctttgaatgataactacaggttttaagtgctgttacattaataccataatgtgatgtgttagaaacaaagggatatttcaaaggtagatatttgaaaattctctagtctcaatatgtatgtgtattgaatatactctaaaaataaatgtgcaatttgctagtaggacaatgcagtgactgactagcattaggtatgtttcttttatatcctagctatgtcccactttcttctaagtgcaatcctttcatgttcacttgctgttttaccccatctactctaacttcatttggaaggcttgtctagagtatagcatgtatttttacctttgcagtgaattgcatgtgctaattgtaaccacagctatttttatgttgacataactccaaatgttatattaaatgttctattatatattagctctaatcccttaagtaaattttaagaaataaatacttgttcaaattttttttctgtatgtggttactatcatctgactatgcatatttgtaacagcatttatcattagtggtgttagctaaataagcatcttagtgtaaatgagatgcttcgtgtgggttttgtgacattttaaatgacataatggaatgtgatttaaaagaaaaccagtacactatcttggtcttaataacatagaatggagatggcaaatttatccactagttttccagatttactatttaatagctgaggtctgaaatcgtagcatcctccctcctagtggacattaaaaaaaaaaaaaaaaaaaaaaacctacttggttgtcaagagcccaagtatggaggtgctgcgccatcttgtggcctgtctgtgcccaccctgcactctgctggagtctccatccttgttgcagtgagacttgaagttcaagattgatacatggcatcctcctgctacttcttgaggttactaagtagtatatgaaactaatcagtcagcaagtccacctggaaggaaaagaaaatctcaactattaatgtgccttcacattgtgattttgtctaaaaaaatgtagtgagtcaaaaaacccacaagccagccaacagtaactccttcacatatataccagagtttatagaaataacatgtcagctttgggctatgtgctcctttgtttaaaatcttctatttggttatggcttgtataggctcaagcctgatttctttaaggtgtggtggctcatcttatcctaatgtgtatgatagatacagtccatcctgctttggaaaagattatgtaactccttgagagcatactctttctctagcccaaaggcagtgagagagttttcttgttcaggattgcttaactttccatttaagctttttctttttaaattaatacaaacttctacactttcaaaatacgaaatatattacaactgcgtataggctcttccatacttaagtccagtgcttgggcaagttaatggagtgaaagactacaagcaaagaggaactgaggtagaaaaagaagaatgtgtgaaagcagcaggaagctcagccaactcgaaagcagggtgaacagcttgagtcctgttgctgctgatcggggttggctcttggacaacttagtaagatcatggaaaggctgcttgggttctccatagaaaagttctgtctccatcaagggaggaaaatgtacctttcaactcaaaattcaatatttgtttttaaatatagctattttccccaaccgctaaagattttcaacagatacgaagccagagcttagttttagaaacctgtggacattcaaacctgattctttattccctgtgactatggttatgtcattttacatgtcaaaaaagtgtatctagaattgtcatttcttatttttgagctttttttagtgagaattatcccctcacttaaatggctttttatttaaacatctgtgcattctgtatgaaattgtagtctttctgggataacatggtgagctatatggtggtaatccacacac

SEQ ID NO: 14820 - DNA, 9008 bp, Homo sapiens
  source 1..9008: mol_type = unassigned DNA
agccggggcgagcagccaaaaggcccgcggagtcgcgctgggccgccccggcgcagctgaaccgggggccgcgcctgccaggccgacgggtctggcccagcctggcgccaaggggttcgtgcgctgtggagacgcggagggtcgaggcggcgcggcctgagtgaaacccaatggaaaaagcatgacatttagaagtagaagacttagcttcaaatccctactccttcacttactaattttgtgatttggaaatatccgcgcaagatgttgacgttgcagacttggctagtgcaagccttgtttattttcctcaccactgaatctacaggtgaacttctagatccatgtggttatatcagtcctgaatctccagttgtacaacttcattctaatttcactgcagtttgtgtgctaaaggaaaaatgtatggattattttcatgtaaatgctaattacattgtctggaaaacaaaccattttactattcctaaggagcaatatactatcataaacagaacagcatccagtgtcacctttacagatatagcttcattaaatattcagctcacttgcaacattcttacattcggacagcttgaacagaatgtttatggaatcacaataatttcaggcttgcctccagaaaaacctaaaaatttgagttgcattgtgaacgaggggaagaaaatgaggtgtgagtgggatggtggaagggaaacacacttggagacaaacttcactttaaaatctgaatgggcaacacacaagtttgctgattgcaaagcaaaacgtgacacccccacctcatgcactgttgattattctactgtgtattttgtcaacattgaagtctgggtagaagcagagaatgcccttgggaaggttacatcagatcatatcaattttgatcctgtatataaagtgaagcccaatccgccacataatttatcagtgatcaactcagaggaactgtctagtatcttaaaattgacatggaccaacccaagtattaagagtgttataatactaaaatataacattcaatataggaccaaagatgcctcaacttggagccagattcctcctgaagacacagcatccacccgatcttcattcactgtccaagaccttaaaccttttacagaatatgtgtttaggattcgctgtatgaaggaagatggtaagggatactggagtgactggagtgaagaagcaagtgggatcacctatgaagatagaccatctaaagcaccaagtttctggtataaaatagatccatcccatactcaaggctacagaactgtacaactcgtgtggaagacattgcctccttttgaagccaatggaaaaatcttggattatgaagtgactctcacaagatggaaatcacatttacaaaattacacagttaatgccacaaaactgacagtaaatctcacaaatgatcgctatctagcaaccctaacagtaagaaatcttgttggcaaatcagatgcagctgttttaactatccctgcctgtgactttcaagctactcaccctgtaatggatcttaaagcattccccaaagataacatgctttgggtggaatggactactccaagggaatctgtaaagaaatatatacttgagtggtgtgtgttatcagataaagcaccctgtatcacagactggcaacaagaagatggtaccgtgcatcgcacctatttaagagggaacttagcagagagcaaatgctatttgataacagttactccagtatatgctgatggaccaggaagccctgaatccataaaggcataccttaaacaagctccaccttccaaaggacctactgttcggacaaaaaaagtagggaaaaacgaagctgtcttagagtgggaccaacttcctgttgatgttcagaatggatttatcagaaattatactatattttatagaaccatcattggaaatgaaactgctgtgaatgtggattcttcccacacagaatatacattgtcctctttgactagtgacacattgtacatggtacgaatggcagcatacacagatgaaggtgggaaggatggtccagaattcacttttactaccccaaagtttgctcaaggagaaattgaagccatagtcgtgcctgtttgcttagcattcctattgacaactcttctgggagtgctgttctgctttaataagcgagacctaattaaaaaacacatctggcctaatgttccagatccttcaaagagtcatattgcccagtggtcacctcacactcctccaaggcacaattttaattcaaaagatcaaatgtattcagatggcaatttcactgatgtaagtgttgtggaaatagaagcaaatgacaaaaagccttttccagaagatctgaaatcattggacctgttcaaaaaggaaaaaattaatactgaaggacacagcagtggtattggggggtcttcatgcatgtcatcttctaggccaagcatttctagcagtgatgaaaatgaatcttcacaaaacacttcgagcactgtccagtattctaccgtggtacacagtggctacagacaccaagttccgtcagtccaagtcttctcaagatccgagtctacccagcccttgttagattcagaggagcggccagaagatctacaattagtagatcatgtagatggcggtgatggtattttgcccaggcaacagtacttcaaacagaactgcagtcagcatgaatccagtccagatatttcacattttgaaaggtcaaagcaagtttcatcagtcaatgaggaagattttgttagacttaaacagcagatttcagatcatatttcacaatcctgtggatctgggcaaatgaaaatgtttcaggaagtttctgcagcagatgcttttggtccaggtactgagggacaagtagaaagatttgaaacagttggcatggaggctgcgactgatgaaggcatgcctaaaagttacttaccacagactgtacggcaaggcggctacatgcctcagtgaaggactagtagttcctgctacaacttcagcagtacctataaagtaaagctaaaatgattttatctgtgaattcagattttaaaaagtcttcactctctgaagatgatcatttgcccttaaggacaaaaatgaactgaagtttcacatgagctatttccattccagaatatctgggattctactttaagcactacataaactgactttatcctcagactagctgaatgattttgtgctgtttcaggatgtttgcactgaagaaaaacagaaagcttatctgaaatttataaaactttttgttttgctacatagaaaacagaaggtatttgaataataagcagtgatatgcttagtgagcacagctatactgattttgattagaatagtcatcagagtggcttagggacagttaatataaaagaggagcaaggtgtagaccatcatctacttctgctaaaataacttaaaaagaggtccataggccataactacatgagcccagcttttgtaatctgacaaaaaaatgaggagcagcttcgtgtatatcagtgtacacggtattccttaggtcccttccattggtagtgatgctgcgagttattactggagaaaaggaattctagagctttaacttggcagattaaaagtactcattttttattcatcaataattagtaatctcactagttttcaaaaatttgcatattattgacaacctctttgaagatgcatttcacaaactcaacagagtgccatgataagagctagggatcccccaaactatctcaagcatctaaaaaattgccatttttaaaggcttaaattgtagtagtaaaggggaaaacaggaagtagtagtaaaggggaaaaaaaaccaataaagcatctaaaaaattggcatgttaaaaggcttaaattgctaatgtgtgtatatatatatatatatatacacacacatatcattgacttttcttaagacttcagagtactgggtagatgaacactttatacagtatatatcttcagcttaaatttgttttgagtattttttttatttttaaataagtaggcaaagatttaaatttttttatttttagtaaatgtttgaggcacactaagacaacttgggcaatatttgccaaaacaaaacagaaccccaaaaaatgtacatcttgttcttagcaaatatcattattgtagagacacttaataaagagatggtattttaatgtctgcagttctgaggtagggtggaacttagttctacattgtgatttaggaatttttaaaaccttttttcttcaagggagaagtgacccaggcctcgagtttagtgctaaagccgctagtgtacttatgctgtcccctaaccaccacgtgcgatatggaagcagatgctaaatataggggttttcttagaaagtaagaggaaattagcaagcgttattagtgattgactactgctatcaagtgaattcaaaggaaacaggtttttatgccatatttaagttacagaaaccaggcatgcttagaatagtttctagaggttattggagaatagaaagctaagaaaacttggtatacatttacaatggaaatataattacactttttactctcagaatattgttcacattagacttcctgtttatcttttatattcttgcatttatataatgcctcatcctttcaaagttctttcacatattatatgatcttctttatgaaaaaaatagatgtttcattctgatatattcagtttcccactttaggcaaaagtagattaatagaatgacgaattcaaagtagatgaggaaaatcaggcacagagaagtaaaggtagggatagacccaaatttacacaacaagataatgacatctccagcttttaagttgatcatcaaaggctgggctggatttgtcttgctgtatgtgtcaggaaatttatacctattacattttccattttctcaaaatttaagtcacatgactaatatttagctgcaactttcctcataacaaatagtgtcatgaagaatgttgtagtgtgaagtttgtacatttcagggtcagatatacaatatgaactcttaatctacaggaatgagaatggaggatcattgaaggccatgatataaacaaatttgcatgttgaagcctgtataaaacatggtacagtgagtgaatatacccccatccccaagaacactttatacatattaaatggatatatgattactgtgcaaaaattcattctggaaatgaacatatatttgagcactaatatgtaatgtacacctgccctaaggagaaaataaattataaaactttttacattcaaaattactttcccaagcatgtcttagaataatctatgtgttgatgcatgtaaattgtactttaggtaggcaaagaaatctggttatttatgtaaaaactagtctaataaagttagttagtggctttatcactttaaatctttagtgtccaaaagtggtgtttaaagtaatagcacatcagaaaaccttgtctggacaaaactagttcactcactgcttctgcacctgcagttgctccctttagggttataaaataatgacccaaatgttacatgtgttgatattataacttgtcagttactgatgtctgtggtatcctaccctcatctctgaaagggataatactgaataattattagaaaactataaaacttcacactttgtaccattaaaacctaaaattttaatcttgtccttttttactatggatcagtcggcactcgggaacagcagcaaggaaaaaaagcaaatttcattcacatgttctgtgttcatacctcttctctacctaattgttcatttaaatttcagccttattccttgataagggattttaccacatgaagtcatccagtgaccctagctcttattgtgaagttagtggagtatacttagaaatgttacaactttaaaatgttacaaaacattcattaaagctcatatttaaagtagagcatctagtttgagaaatagaaatcaattattaaagatgtcttttttctacccatttaactagttaaaaccatgacatgtaaatgtagaagtagaataatcatagaattccctaaaatatttctgtttactaacatatattgaccaagtacatcaagcaggagagatcttccttcattctgttatagtccacatcattctaattttgctcagttgttattaagagcatattcctaaaccatacacttttgtttcaataaagttttattttgttgagatgaataaaataacaaagttataagctgcataagacaaaagttcaattgttcaaaaaaaatttactgggatagctttctattacaggtattgttagattatattgtgctgataagattactttctaaaaaatttgtacttttctgtaaattaaaagaatatggagtcataaaatggcaagtgttttaggattagcctaaaattggacattgtcattgatttcaaagaaggtatgaactagcagtcttacagcctaattcttctttggactggtccttggcagcagttccttttcagactcgataaacagaattcagatgatgtaagtcaaaacaaaactttacaaagccaagcgtattatcttttgcattaacctatttttttccatcatacatgctactagtatgtgcattagcatgatattctcatatacattgcattaaaaattaaaaggtggcagctcagggtgagctcttctgttgctcatttgttcctaaatttttaagggctttttctcagtcaatagtttgtacaaactggttagtttaacttcattacccatttcattaaagttgatgggtcgtgtgatgagatgcatttaaggccgatagtgatagatgttttttttatttcttgaacacaggctttgtctgaatgatgttcttttatctcttgaacacaagctttgaatgataactacaggttttaagtgctgttacattaataccataatgtgatgtgttagaaacaaagggatatttcaaaggtagatatttgaaaattctctagtctcaatatgtatgtgtattgaatatactctaaaaataaatgtgcaatttgctagtaggacaatgcagtgactgactagcattaggtatgtttcttttatatcctagctatgtcccactttcttctaagtgcaatcctttcatgttcacttgctgttttaccccatctactctaacttcatttggaaggcttgtctagagtatagcatgtatttttacctttgcagtgaattgcatgtgctaattgtaaccacagctatttttatgttgacataactccaaatgttatattaaatgttctattatatattagctctaatcccttaagtaaattttaagaaataaatacttgttcaaattttttttctgtatgtggttactatcatctgactatgcatatttgtaacagcatttatcattagtggtgttagctaaataagcatcttagtgtaaatgagatgcttcgtgtgggttttgtgacattttaaatgacataatggaatgtgatttaaaagaaaaccagtacactatcttggtcttaataacatagaatggagatggcaaatttatccactagttttccagatttactatttaatagctgaggtctgaaatcgtagcatcctccctcctagtggacattaaaaaaaaaaaaaaaaaaaaaaacctacttggttgtcaagagcccaagtatggaggtgctgcgccatcttgtggcctgtctgtgcccaccctgcactctgctggagtctccatccttgttgcagtgagacttgaagttcaagattgatacatggcatcctcctgctacttcttgaggttactaagtagtatatgaaactaatcagtcagcaagtccacctggaaggaaaagaaaatctcaactattaatgtgccttcacattgtgattttgtctaaaaaaatgtagtgagtcaaaaaacccacaagccagccaacagtaactccttcacatatataccagagtttatagaaataacatgtcagctttgggctatgtgctcctttgtttaaaatcttctatttggttatggcttgtataggctcaagcctgatttctttaaggtgtggtggctcatcttatcctaatgtgtatgatagatacagtccatcctgctttggaaaagattatgtaactccttgagagcatactctttctctagcccaaaggcagtgagagagttttcttgttcaggattgcttaactttccatttaagctttttctttttaaattaatacaaacttctacactttcaaaatacgaaatatattacaactgcgtataggctcttccatacttaagtccagtgcttgggcaagttaatggagtgaaagactacaagcaaagaggaactgaggtagaaaaagaagaatgtgtgaaagcagcaggaagctcagccaactcgaaagcagggtgaacagcttgagtcctgttgctgctgatcggggttggctcttggacaacttagtaagatcatggaaaggctgcttgggttctccatagaaaagttctgtctccatcaagggaggaaaatgtacctttcaactcaaaattcaatatttgtttttaaatatagctattttccccaaccgctaaagattttcaacagatacgaagccagagcttagttttagaaacctgtggacattcaaacctgattctttattccctgtgactatggttatgtcattttacatgtcaaaaaagtgtatctagaattgtcatttcttatttttgagctttttttagtgagaattatcccctcacttaaatggctttttatttaaacatctgtgcattctgtatgaaattgtagtctttctgggataacatggtgagctatatggtggtaatccacacacacaaaaataaaagccaaaaaaaaaccaaaa

SEQ ID NO: 14821 - DNA, 1878 bp, Homo sapiens
  source 1..1878: mol_type = unassigned DNA
ggaaaaagcatgacatttagaagtagaagacttagcttcaaatccctactccttcacttactaattttgtgatttggaaatatccgcgcaagatgttgacgttgcagacttggctagtgcaagccttgtttattttcctcaccactgaatctacaggtgaacttctagatccatgtggttatatcagtcctgaatctccagttgtacaacttcattctaatttcactgcagtttgtgtgctaaaggaaaaatgtatggattattttcatgtaaatgctaattacattgtctggaaaacaaaccattttactattcctaaggagcaatatactatcataaacagaacagcatccagtgtcacctttacagatatagcttcattaaatattcagctcacttgcaacattcttacattcggacagcttgaacagaatgtttatggaatcacaataatttcaggcttgcctccagaaaaacctaaaaatttgagttgcattgtgaacgaggggaagaaaatgaggtgtgagtgggatggtggaagggaaacacacttggagacaaacttcactttaaaatctgaatgggcaacacacaagtttgctgattgcaaagcaaaacgtgacacccccacctcatgcactgttgattattctactgtgtattttgtcaacattgaagtctgggtagaagcagagaatgcccttgggaaggttacatcagatcatatcaattttgatcctgtatataaagtgaagcccaatccgccacataatttatcagtgatcaactcagaggaactgtctagtatcttaaaattgacatggaccaacccaagtattaagagtgttataatactaaaatataacattcaatataggaccaaagatgcctcaacttggagccagattcctcctgaagacacagcatccacccgatcttcattcactgtccaagaccttaaaccttttacagaatatgtgtttaggattcgctgtatgaaggaagatggtaagggatactggagtgactggagtgaagaagcaagtgggatcacctatgaagataacattgcctccttttgaagccaatggaaaaatcttggattatgaagtgactctcacaagatggaaatcacatttacaaaattacacagttaatgccacaaaactgacagtaaatctcacaaatgatcgctatctagcaaccctaacagtaagaaatcttgttggcaaatcagatgcagctgttttaactatccctgcctgtgactttcaagctactcaccctgtaatggatcttaaagcattccccaaagataacatgctttgggtggaatggactactccaagggaatctgtaaagaaatatatacttgagtggtgtgtgttatcagataaagcaccctgtatcacagactggcaacaagaagatggtaccgtgcatcgcacctatttaagagggaacttagcagagagcaaatgctatttgataacagttactccagtatatgctgatggaccaggaagccctgaatccataaaggcataccttaaacaagctccaccttccaaaggacctactgttcggacaaaaaaagtagggaaaaacgaagctgtcttagagtgggaccaacttcctgttgatgttcagaatggatttatcagaaattatactatattttatagaaccatcattggaaatgaaactgctgtgaatgtggattcttcccacacagaatatacattgtcctctttgactagtgacacattgtacatggtacgaatggcagcatacacagatgaaggtgggaaggatggtccagaattcacttttactaccccaaagtttgctcaaggagaaattgaagccatagtcgtg

SEQ ID NO: 14822 - DNA, 2491 bp, Homo sapiens
  source 1..2491: mol_type = unassigned DNA
atgttgacgttgcagacttggctagtgcaagccttgtttattttcctcaccactgaatctacaggtgaacttctagatccatgtggttatatcagtcctgaatctccagttgtacaacttcattctaatttcactgcagtttgtgtgctaaaggaaaaatgtatggattattttcatgtaaatgctaattacattgtctggaaaacaaaccattttactattcctaaggagcaatatactatcataaacagaacagcatccagtgtcacctttacagatatagcttcattaaatattcagctcacttgcaacattcttacattcggacagcttgaacagaatgtttatggaatcacaataatttcaggcttgcctccagaaaaacctaaaaatttgagttgcattgtgaacgaggggaagaaaatgaggtgtgagtgggatggtggaagggaaacacacttggagacaaacttcactttaaaatctgaatgggcaacacacaagtttgctgattgcaaagcaaaacgtgacacccccacctcatgcactgttgattattctactgtgtattttgtcaacattgaagtctgggtagaagcagagaatgcccttgggaaggttacatcagatcatatcaattttgatcctgtatataaagtgaagcccaatccgccacataatttatcagtgatcaactcagaggaactgtctagtatcttaaaattgacatggaccaacccaagtattaagagtgttataatactaaaatataacattcaatataggaccaaagatgcctcaacttggagccagattcctcctgaagacacagcatccacccgatcttcattcactgtccaagaccttaaaccttttacagaatatgtgtttaggattcgctgtatgaaggaagatggtaagggatactggagtgactggagtgaagaagcaagtgggatcacctatgaagataacattgcctccttttgaagccaatggaaaaatcttggattatgaagtgactctcacaagatggaaatcacatttacaaaattacacagttaatgccacaaaactgacagtaaatctcacaaatgatcgctatctagcaaccctaacagtaagaaatcttgttggcaaatcagatgcagctgttttaactatccctgcctgtgactttcaagggaacttagcagagagcaaatgctatttgataacagttactccagtatatgctgatggaccaggaagccctgaatccataaaggcataccttaaacaagctccaccttccaaaggacctactgttcggacaaaaaaagtagggaaaaacgaagctgtcttagagtgggaccaacttcctgttgatgttcagaatggatttatcagaaattatactatattttatagaaccatcattggaaatgaaactgctgtgaatgtggattcttcccacacagaatatacattgtcctctttgactagtgacacattgtacatggtacgaatggcagcatacacagatgaaggtgggaaggatggtccagaattcacttttactaccccaaagtttgctcaaggagaaattgaagccatagtcgtgcctgtttgcttagcattcctattgacaactcttctgggagtgctgttctgctttaataagcgagacctaattaaaaaacacatctggcctaatgttccagatccttcaaagagtcatattgcccagtggtcacctcacactcctccaaggcacaattttaattcaaaagatcaaatgtattcagatggcaatttcactgatgtaagtgttgtggaaatagaagcaaatgacaaaaagccttttccagaagatctgaaatcattggacctgttcaaaaaggaaaaaattaatactgaaggacacagcagtggtattggggggtcttcatgcatgtcatcttctaggccaagcatttctagcagtgatgaaaatgaatcttcacaaaacacttcgagcactgtccagtattctaccgtggtacacagtggctacagacaccaagttccgtcagtccaagtcttctcaagatccgagtctacccagcccttgttagattcagaggagcggccagaagatctacaattagtagatcatgtagatggcggtgatggtattttgcccaggcaacagtacttcaaacagaactgcagtcagcatgaatccagtccagatatttcacattttgaaaggtcaaagcaagtttcatcagtcaatgaggaagattttgttagacttaaacagcagatttcagatcatatttcacaatcctgtggatctgggcaaatgaaaatgtttcaggaagtttctgcagcagatgcttttggtccaggtactgagggacaagtagaaagatttgaaacagttggcatggaggctgcgactgatgaaggcatgcctaaaagttacttaccacagactgtacggcaaggcggctacatgcctcagtga

SEQ ID NO: 14823 - DNA, 987 bp, Homo sapiens
  source 1..987: mol_type = unassigned DNA
atgttgacgttgcagacttggctagtgcaagccttgtttattttcctcaccactgaatctacaggtgaacttctagatccatgtggttatatcagtcctgaatctccagttgtacaacttcattctaatttcactgcagtttgtgtgctaaaggaaaaatgtatggattattttcatgtaaatgctaattacattgtctggaaaacaaaccattttactattcctaaggagcaatatactatcataaacagaacagcatccagtgtcacctttacagatatagcttcattaaatattcagctcacttgcaacattcttacattcggacagcttgaacagaatgtttatggaatcacaataatttcaggcttgcctccagaaaaacctaaaaatttgagttgcattgtgaacgaggggaagaaaatgaggtgtgagtgggatggtggaagggaaacacacttggagacaaacttcactttaaaatctgaatgggcaacacacaagtttgctgattgcaaagcaaaacgtgacacccccacctcatgcactgttgattattctactgtgtattttgtcaacattgaagtctgggtagaagcagagaatgcccttgggaaggttacatcagatcatatcaattttgatcctgtatataaagtgaagcccaatccgccacataatttatcagtgatcaactcagaggaactgtctagtatcttaaaattgacatggaccaacccaagtattaagagtgttataatactaaaatataacattcaatataggaccaaagatgcctcaacttggagccagattcctcctgaagacacagcatccacccgatcttcattcactgtccaagaccttaaaccttttacagaatatgtgtttaggattcgctgtatgaaggaagatggtaagggatactggagtgactggagtgaagaagcaagtgggatcacctatgaagataccatcttctctttc

SEQ ID NO: 14824 - DNA, 4626 bp, Homo sapiens
  source 1..4626: mol_type = unassigned DNA
gtggttagataagtataaagccctagatctaagcttctctgtcttcctccctccctcccttcctcttactctcattcatttcatacacactggctcacacatctactctctctctctatctctctcagaatgacaattctaggtacaacttttggcatggttttttctttacttcaagtcgtttctggagaaagtggctatgctcaaaatggagacttggaagatgcagaactggatgactactcattctcatgctatagccagttggaagtgaatggatcgcagcactcactgacctgtgcttttgaggacccagatgtcaacatcaccaatctggaatttgaaatatgtggggccctcgtggaggtaaagtgcctgaatttcaggaaactacaagagatatatttcatcgagacaaagaaattcttactgattggaaagagcaatatatgtgtgaaggttggagaaaagagtctaacctgcaaaaaaatagacctaaccactatagttaaacctgaggctccttttgacctgagtgtcgtctatcgggaaggagccaatgactttgtggtgacatttaatacatcacacttgcaaaagaagtatgtaaaagttttaatgcacgatgtagcttaccgccaggaaaaggatgaaaacaaatggacgcatgtgaatttatccagcacaaagctgacactcctgcagagaaagctccaaccggcagcaatgtatgagattaaagttcgatccatccctgatcactattttaaaggcttctggagtgaatggagtccaagttattacttcagaactccagagatcaataatagctcaggggagatggatcctatcttactaaccatcagcattttgagttttttctctgtcgctctgttggtcatcttggcctgtgtgttatggaaaaaaaggattaagcctatcgtatggcccagtctccccgatcataagaagactctggaacatctttgtaagaaaccaagaaaaaatttaaatgtgagtttcaatcctgaaagtttcctggactgccagattcatagggtggatgacattcaagctagagatgaagtggaaggttttctgcaagatacgtttcctcagcaactagaagaatctgagaagcagaggcttggaggggatgtgcagagccccaactgcccatctgaggatgtagtcatcactccagaaagctttggaagagattcatccctcacatgcctggctgggaatgtcagtgcatgtgacgcccctattctctcctcttccaggtccctagactgcagggagagtggcaagaatgggcctcatgtgtaccaggacctcctgcttagccttgggactacaaacagcacgctgccccctccattttctctccaatctggaatcctgacattgaacccagttgctcagggtcagcccattcttacttccctgggatcaaatcaagaagaagcatatgtcaccatgtccagcttctaccaaaaccagtgaagtgtaagaaacccagactgaacttaccgtgagcgacaaagatgatttaaaagggaagtctagagttcctagtctccctcacagcacagagaagacaaaattagcaaaaccccactacacagtctgcaagattctgaaacattgctttgaccactcttcctgagttcagtggcactcaacatgagtcaagagcatcctgcttctaccatgtggatttggtcacaaggtttaaggtgacccaatgattcagctatttaaaaaaaaaagaggaaagaatgaaagagtaaaggaaatgattgaggagtgaggaaggcaggaagagagcatgagaggaaagaaagaaaggaaaataaaaaatgatagttgccattattaggatttaatatatatccagtgctttgcaagtgctctgcgcaccttgtctcactccatcctgacaataatcctgggaggtgtgtgcaattactacgactactctcttttttatagatcattaaattcagaactaaggagttaagtaacttgtccaagttgttcacacagtgaagggaggggccaagatatgatggctgggagtctaattgcagttccctgagccatgtgcctttctcttcactgaggactgccccattcttgagtgccaaacgtcactagtaacagggtgtgcctagataatttatgatccaaactgagtcagtttggaaagtgaaagggaaacttacatataatccctccgggacaatgagcaaaaactaggactgtccccagacaaatgtgaacatacatatcatcacttaaattaaaatggctatgagaaagaaagagggggagaaacagtcttgcgggtgtgaagtcccatgaccagccatgtcaaaagaaggtaaagaagtcaagaaaaagccatgaagcccatttggtttcatttttctgaaaataggctcaagagggaataaattagaaactcacaatttctcttgtttgttaccaagacagtgattctcttgctgctaccacccaactgcatccgtccatgatctcagaggaaactgtcgctgaccctggacatgggtacgtttgacgagtgagaggaggcatgacccctcccatgtgtatagacactaccccaacctaaattcatccctaaattgtcccaagttctccagcaatagaggctgccacaaacttcagggagaaagagttacaagtacatgcaatgagtgaactgactgtggctacaatcttgaagatatacggaagagacgtattattaatgcttgacatatatcatcttgcctttcttggtctagactgacttctaatgactaactcaaagtcaaggcaactgagtaatgtcagctcagcaaagtgcagcaaacccatctcccacaggcctccaaaccctggctgttcacagaaccacaaagggcagatgctgcacagaaaactagagaaggggtcataggttcatggttttgtttgagatttgttgctactgtttttctgttttgaattttcttctttgttctgtttttactttatttagggggactaggtgtttctgatattttagttttcttgtttgttttgttttgtgttgtctgtgaatggggttttaactgtggatgaatggaccttatctgttggcttaaaggactggtaagatcagaccatcttattcttcaggtgaatgttttactttccaaagtgctctcctctgcaccagcagtaataaatacaatgccataatcccttaggtttgcctagtgcttttgcaattttcaaagcacttccataagcattccttccacctccttgataggcatttatggaaagcctgctacatgtcaatcatactgttaggcacaggggacctaaagacacataaaaggatggcattctgcctcataaattgcaaaacctaatgaaagtgactgcttggtaaacaaattattattatattataaaatgctataaaagagccatattgaaagtgccctgttggagacagggcaaatgccacaaaaatgatgtaaatttacatggaggaaaagtagaatctgcctggtttgtaggcagcagaagacatttttcatcagtgggcaggtgttctttaccttttgtagaaatgggagtcaagtctcaaataggaggctccacaaaatctcatgccaggtctctgataccttattcacagaagttctttgaagtatttattgttattttctttgacttatgggaaaactgggacacaggaagacaggtaaattacccaacctcacacgttaagtcagaactgggagccataattttgtatccctggtataaatagacaatctcttgaagaaatgaagagatgaccatagaaaaacatcgagatatctccagctctaaaatcctttgtttcaatgttgtttggcatatgttatctttggaatttagtgtctgagcctctgtctgttactgtagtatttaaaatgcatgtattataatcatataatcataactgctgttaattcttgattatatacctagggacaatgtgtaatgtaagattactaattggttctgcccaatctcctttcagattttattaggaaaaaaaaataaacctcctgatcggagacaatgtattaatcagaagtgtaaactgccagttctatatagcatgaaatgaaaagacagctaatttggtccaacaaacatgactgggtctagggcacccaggctgattcagctgatttcctaccagcctttgcctcttccttcaatgtggtttccatgggaatttgcttcagaaaagccaagtatgggctgttcagaggtgcacacctgcattttcttagctcttctagaggggctaagagacttggtacgggccaggaagaatatgtggcagagctcctggaaatgatgcagattaggtggcatttttgtcagctctgtggtttattgttgggactattctttaaaatatccattgttcactacagtgaagatctctgatttaaccgtgtactatccacatgcattacaaacatttcgcagagctgcttagtatataagcgtacaatgtatgtaataaccatctcatatttaattaaatggtatagaagaaca

SEQ ID NO: 14825 - DNA, 1708 bp, Homo sapiens
  source 1..1708: mol_type = unassigned DNA
gtcttcctccctccctcccttcctcttactctcattcatttcatacacactggctcacacatctactctctctctctatctctctcagaatgacaattctaggtacaacttttggcatggttttttctttacttcaagtcgtttctggagaaagtggctatgctcaaaatggagacttggaagatgcagaactggatgactactcattctcatgctatagccagttggaagtgaatggatcgcagcactcactgacctgtgcttttgaggacccagatgtcaacatcaccaatctggaatttgaaatatgtggggccctcgtggaggtaaagtgcctgaatttcaggaaactacaagagatatatttcatcgagacaaagaaattcttactgattggaaagagcaatatatgtgtgaaggttggagaaaagagtctaacctgcaaaaaaatagacctaaccactatagttaaacctgaggctccttttgacctgagtgtcgtctatcgggaaggagccaatgactttgtggtgacatttaatacatcacacttgcaaaagaagtatgtaaaagttttaatgcacgatgtagcttaccgccaggaaaaggatgaaaacaaatggacgcatgtgaatttatccagcacaaagctgacactcctgcagagaaagctccaaccggcagcaatgtatgagattaaagttcgatccatccctgatcactattttaaaggcttctggagtgaatggagtccaagttattacttcagaactccagagatcaataatagctcaggattaagcctatcgtatggcccagtctccccgatcataagaagactctggaacatctttgtaagaaaccaagaaaaaatttaaatgtgagtttcaatcctgaaagtttcctggactgccagattcatagggtggatgacattcaagctagagatgaagtggaaggttttctgcaagatacgtttcctcagcaactagaagaatctgagaagcagaggcttggaggggatgtgcagagccccaactgcccatctgaggatgtagtcatcactccagaaagctttggaagagattcatccctcacatgcctggctgggaatgtcagtgcatgtgacgcccctattctctcctcttccaggtccctagactgcagggagagtggcaagaatgggcctcatgtgtaccaggacctcctgcttagccttgggactacaaacagcacgctgccccctccattttctctccaatctggaatcctgacattgaacccagttgctcagggtcagcccattcttacttccctgggatcaaatcaagaagaagcatatgtcaccatgtccagcttctaccaaaaccagtgaagtgtaagaaacccagactgaacttaccgtgagcgacaaagatgatttaaaagggaagtctagagttcctagtctccctcacagcacagagaagacaaaattagcaaaaccccactacacagtctgcaagattctgaaacattgctttgaccactcttcctgagttcagtggcactcaacatgagtcaagagcatcctgcttctaccatgtggatttggtcacaaggtttaaggtgacccaatgattcagctatttaaaaaaaaaagaggaaagaatgaaagagtaaaggaaatgattgaggagtgaggaaggcaggaagagagcatgagagg

SEQ ID NO: 14826 - DNA, 1004 bp, Homo sapiens
  source 1..1004: mol_type = unassigned DNA
cttcctccctccctcccttcctcttactctcattcatttcatacacactggctcacacatctactctctctctctatctctctcagaatgacaattctaggtacaacttttggcatggttttttctttacttcaagtcgtttctggagaaagtggctatgctcaaaatggagacttggaagatgcagaactggatgactactcattctcatgctatagccagttggaagtgaatggatcgcagcactcactgacctgtgcttttgaggacccagatgtcaacatcaccaatctggaatttgaaatatgtggggccctcgtggaggtaaagtgcctgaatttcaggaaactacaagagatatatttcatcgagacaaagaaattcttactgattggaaagagcaatatatgtgtgaaggttggagaaaagagtctaacctgcaaaaaaatagacctaaccactatagttaaacctgaggctccttttgacctgagtgtcgtctatcgggaaggagccaatgactttgtggtgacatttaatacatcacacttgcaaaagaagtatgtaaaagttttaatgcacgatgtagcttaccgccaggaaaaggatgaaaacaaatggacgcatgtgaatttatccagcacaaagctgacactcctgcagagaaagctccaaccggcagcaatgtatgagattaaagttcgatccatccctgatcactattttaaaggcttctggagtgaatggagtccaagttattacttcagaactccagagatcaataatagctcaggattaagcctatcgtatggcccagtctccccgatcataagaagactctggaacatctttgtaagaaaccaagaaaagtgagtgtttttggtgcttaaaaagtgttgtgttggcaacatcccagtggccaagaatgatattccaggacaaggaacagttgaacctcaccttttggtatttgattcatcctgtaactagggtccctcctaaga

SEQ ID NO: 14827 - DNA, 562 bp, Homo sapiens
  source 1..562: mol_type = unassigned DNA
aaatgctagagactattcatttaggaccagagtggcattagctttcctacagccatcctcacctgcttgacacccttggatgttgggtttttttgtttgtttgtttgtttgtttgttgttttttttttccacagctcttgtggtccccagcctctctcttgagcagggctggctttttttttttaataagatagctggtgcccaagattgttttccaccttaaggataaaacctgttaagaaaggtcatagtttgccagcccctgccctaaacaaataattcttgaatgcctactgtggtgtgtaagatatgagtaaataccagggatacacagagaacaaaagagaaaaactgctattcttgtgaaacttggaagttggagaatgacaattctaggtacaacttttggcatggttttttctttacttcaagtcgtttctggagaaagtggctatgctcaaaatggagacttggaagatgcagaactggatgactactcattctcatgctatagccagttggaagtgaatggatcgcagcactcactgacctgtgcttttga

SEQ ID NO: 14828 - DNA, 551 bp, Homo sapiens
  source 1..551: mol_type = unassigned DNA
cttttaaagtgggcccttagtcaggagcggtggctcatgcctgtagtcctagcactttgggaggctgaggcaggcagatcacttgaggtcaggagttcgagacaagcctggccaacatggcgaaaccccgtctccactgaaaacacaaaaattaggctggcatagtggcatttgcctgtagtcctagctactcaggaggctgaggcaggagaattgcttgaacctgggaggtggaaattgcagtgagccgagatcatgctattgtactccagcctgggcaacaaagcaagactctgtctcaaaaaaataaaaattaaaaaaataaagtagcctctagcctaagatagcttgagcctaggtgtgaatctactgccttactctgatgtaagcacaaatgacaattctaggtacaacttttggcatggttttttctttacttcaagtcgtttctggagaaagtggctatgctcaaaatggagacttggaagatgcagaactggatgactactcattctcatgctatagccagttggaagtgaatggatcgcagc

SEQ ID NO: 14829 - DNA, 1944 bp, Homo sapiens
  source 1..1944: mol_type = unassigned DNA
agcagctctgtaatgcgcttgtggtttcagatgtgggcggcctgtgtgaacctgtcgtgcaaagctcacgtcaccaactgctgcagttatctcctgaatcaggctgagggtctttgctgtgcacccagagatagttgggtgacaaatcacctccaggttggggatgcctcagacttgtgatgggactgggcagatgcatctgggaaggctggaccttggagagtgaggccctgaggcgagacatgggcacctggctcctggcctgcatctgcatctgcacctgtgtctgcttgggagtctctgtcacaggggaaggacaagggccaaggtctagaaccttcacctgcctcaccaacaacattctcaggatcgattgccactggtctgccccagagctgggacagggctccagcccctggctcctcttcaccagcaaccaggctcctggcggcacacataagtgcatcttgcggggcagtgagtgcaccgtcgtgctgccacctgaggcagtgctcgtgccatctgacaatttcaccatcactttccaccactgcatgtctgggagggagcaggtcagcctggtggacccggagtacctgccccggagacacgttaagctggacccgccctctgacttgcagagcaacatcagttctggccactgcatcctgacctggagcatcagtcctgccttggagccaatgaccacacttctcagctatgagctggccttcaagaagcaggaagaggcctgggagcaggcccagcacagggatcacattgtcggggtgacctggcttatacttgaagcctttgagctggaccctggctttatccatgaggccaggctgcgtgtccagatggccacactggaggatgatgtggtagaggaggagcgttatacaggccagtggagtgagtggagccagcctgtgtgcttccaggctccccagagacaaggccctctgatcccaccctgggggtggccaggcaacacccttgttgctgtgtccatctttctcctgctgactggcccgacctacctcctgttcaagctgtcgcccagggtgaagagaatcttctaccagaacgtgccctctccagcgatgttcttccagcccctctacagtgtacacaatgggaacttccagacttggatgggggcccacggggccggtgtgctgttgagccaggactgtgctggcaccccacagggagccttggagccctgcgtccaggaggccactgcactgctcacttgtggcccagcgcgtccttggaaatctgtggccctggaggaggaacaggagggccctgggaccaggctcccggggaacctgagctcagaggatgtgctgccagcagggtgtacggagtggagggtacagacgcttgcctatctgccacaggaggactgggcccccacgtccctgactaggccggctcccccagactcagagggcagcaggagcagcagcagcagcagcagcagcaacaacaacaactactgtgccttgggctgctatgggggatggcacctctcagccctcccaggaaacacacagagctctgggcccatcccagccctggcctgtggcctttcttgtgaccatcagggcctggagacccagcaaggagttgcctgggtgctggctggtcactgccagaggcctgggctgcatgaggacctccagggcatgttgctcccttctgtcctcagcaaggctcggtcctggacattctaggtccctgactcgccagatgcatcatgtccattttgggaaaatggactgaagtttctggagcccttgtctgagactgaacctcctgagaaggggcccctagcagcggtcagaggtcctgtctggatggaggctggaggctcccccctcaacccctctgctcagtgcctgtggggagcagcctctaccctcagcatcctgg

SEQ ID NO: 14830 - DNA, 2032 bp, Homo sapiens
  source 1..2032: mol_type = unassigned DNA
cagagatagttgggtgacaaatcacctccaggttggggatgcctcagacttgtgatgggactgggcagatgcatctgggaagtaactgctgcaagaacggacagacactgctgcagagaacttgccacggtgtttcatgctgtggctggtggttccaggctgcacgctccattctaggaaaggggccctcagcccagtcccttgcaggctggaccttggagagtgaggccctgaggcgagacatgggcacctggctcctggcctgcatctgcatctgcacctgtgtctgcttgggagtctctgtcacaggggaaggacaagggccaaggtctagaaccttcacctgcctcaccaacaacattctcaggatcgattgccactggtctgccccagagctgggacagggctccagcccctggctcctcttcaccaggctcctggcggcacacataagtgcatcttgcggggcagtgagtgcaccgtcgtgctgccacctgaggcagtgctcgtgccatctgacaatttcaccatcactttccaccactgcatgtctgggagggagcaggtcagcctggtggacccggagtacctgccccggagacacgagcaacatcagttctggccactgcatcctgacctggagcatcagtcctgccttggagccaatgaccacacttctcagctatgagctggccttcaagaagcaggaagaggcctgggagcaggcccagcacagggatcacattgtcggggtgacctggcttatacttgaagcctttgagctggaccctggctttatccatgaggccaggctgcgtgtccagatggccacactggaggatgatgtggtagaggaggagcgttatacaggccagtggagtgagtggagccagcctgtgtgcttccaggctccccagagacaaggccctctgatcccaccctgggggtggccaggcaacacccttgttgctgtgtccatctttctcctgctgactggcccgacctacctcctgttcaagctgtcgcccagacttggatgggggcccacggggccggtgtgctgttgagccaggactgtgctggcaccccacagggagccttggagccctgcgtccaggaggccactgcactgctcacttgtggcccagcgcgtccttggaaatctgtggccctggaggaggaacaggagggccctgggaccaggctcccggggaacctgagctcagaggatgtgctgccagcagggtgtacggagtggagggtacagacgcttgcctatctgccacaggaggactgggcccccacgtccctgactaggccggctcccccagactcagagggcagcaggagcagcagcagcagcagcagcagcaacaacaacaactactgtgccttgggctgctatgggggatggcacctctcagccctcccaggaaacacacagagctctgggcccatcccagccctggcctgtggcctttcttgtgaccatcagggcctggagacccagcaaggagttgcctgggtgctggctggtcactgccagaggcctgggctgcatgaggacctccagggcatgttgctcccttctgtcctcagcaaggctcggtcctggacattctaggtccctgactcgccagatgcatcatgtccattttgggaaaatggactgaagtttctggagcccttgtctgagactgaacctcctgagaaggggcccctagcagcggtcagaggtcctgtctggatggaggctggaggctcccccctcaacccctctgctcagtgcctgtggggagcagcctctaccctcagcatcctggccacaagttcttccttccattgtcccttttctttatccctgacctctctgagaagtggggtgtggtctctcagctgttctgccctcatacccttaaagggccagcctgggcccagtggacacaggtaaggcaccatgaccacctggtgtgacctctctgtgccttactgaggcacctttctagagattaaaaggggcttgatggctgtt

SEQ ID NO: 14831 - DNA, 2278 bp, Homo sapiens
  source 1..2278: mol_type = unassigned DNA
agcagctctgtaatgcgcttgtggtttcagatgtgggcggcctgtgtgaacctgtcgtgcaaagctcacgtcaccaactgctgcagttatctcctgaatcaggctgagggtctttgctgtgcacccagagatagttgggtgacaaatcacctccaggttggggatgcctcagacttgtgatgggactgggcagatgcatctgggaagtaactgctgcaagaacggacagacactgctgcagagaacttgccacggtgtttcatgctgtggctggtggttccaggctgcacgctccattctaggaaaggggccctcagcccagtcccttgcaggctggaccttggagagtgaggccctgaggcgagacatgggcacctggctcctggcctgcatctgcatctgcacctgtgtctgcttgggagtctctgtcacaggggaaggacaagggccaaggtctagaaccttcacctgcctcaccaacaacattctcaggatcgattgccactggtctgccccagagctgggacagggctccagcccctggctcctcttcaccagcaaccaggctcctggcggcacacataagtgcatcttgcggggcagtgagtgcaccgtcgtgctgccacctgaggcagtgctcgtgccatctgacaatttcaccatcactttccaccactgcatgtctgggagggagcaggtcagcctggtggacccggagtacctgccccggagacacgttaagctggacccgccctctgacttgcagagcaacatcagttctggccactgcatcctgacctggagcatcagtcctgccttggagccaatgaccacacttctcagctatgagctggccttcaagaagcaggaagaggcctgggagcaggcccagcacagggatcacattgtcggggtgacctggcttatacttgaagcctttgagctggaccctggctttatccatgaggccaggctgcgtgtccagatggccacactggaggatgatgtggtagaggaggagcgttatacaggccagtggagtgagtggagccagcctgtgtgcttccaggctccccagagacaaggccctctgatcccaccctgggggtggccaggcaacacccttgttgctgtgtccatctttctcctgctgactggcccgacctacctcctgttcaagctgtcgcccagggtgaagagaatcttctaccagaacgtgccctctccagcgatgttcttccagcccctctacagtgtacacaatgggaacttccagacttggatgggggcccacggggccggtgtgctgttgagccaggactgtgctggcaccccacagggagccttggagccctgcgtccaggaggccactgcactgctcacttgtggcccagcgcgtccttggaaatctgtggccctggaggaggaacaggagggccctgggaccaggctcccggggaacctgagctcagaggatgtgctgccagcagggtgtacggagtggagggtacagacgcttgcctatctgccacaggaggactgggcccccacgtccctgactaggccggctcccccagactcagagggcagcaggagcagcagcagcagcagcagcagcaacaacaacaactactgtgccttgggctgctatgggggatggcacctctcagccctcccaggaaacacacagagctctgggcccatcccagccctggcctgtggcctttcttgtgaccatcagggcctggagacccagcaaggagttgcctgggtgctggctggtcactgccagaggcctgggctgcatgaggacctccagggcatgttgctcccttctgtcctcagcaaggctcggtcctggacattctaggtccctgactcgccagatgcatcatgtccattttgggaaaatggactgaagtttctggagcccttgtctgagactgaacctcctgagaaggggcccctagcagcggtcagaggtcctgtctggatggaggctggaggctcccccctcaacccctctgctcagtgcctgtggggagcagcctctaccctcagcatcctggccacaagttcttccttccattgtcccttttctttatccctgacctctctgagaagtggggtgtggtctctcagctgttctgccctcatacccttaaagggccagcctgggcccagtggacacaggtaaggcaccatgaccacctggtgtgacctctctgtgccttactgaggcacctttctagagattaaaaggggcttgatggctgtt

SEQ ID NO: 14832 - DNA, 1426 bp, Homo sapiens
  source 1..1426: mol_type = unassigned DNA
gctgtgcacccagagatagttgggtgacaaatcacctccaggttggggatgcctcagacttgtgatgggactgggcagatgcatctgggaaggtcctggtggtgactccaaccctgccctcacatatcccaagagcaggctgactgccttccccattcccacctttccagtaactgctgcaagaacggacagacactgctgcagagaacttgccacggtgtttcatgctgtggctggtggttccaggctgcacgctccattctaggaaagggctggaccttggagagtgaggccctgaggcgagacatgggcacctggctcctggcctgcatctgcatctgcacctgtgtctgcttgggagtctctgtcacaggggaaggacaagggccaaggtctagaaccttcacctgcctcaccaacaacattctcaggatcgattgccactggtctgccccagagctgggacagggctccagcccctggctcctcttcaccagcaaccaggctcctggcggcacacataagtgcatcttgcggggcagtgagtgcaccgtcgtgctgccacctgaggcagtgctcgtgccatctgacaatttcaccatcactttccaccactgcatgtctgggagggagcaggtcagcctggtggacccggagtacctgccccggagacacgttaagctggacccgccctctgacttgcagagcaacatcagttctggccactgcatcctgacctggagcatcagtcctgccttggagccaatgaccacacttctcagctatgagctggccttcaagaagcaggaagaggcctgggagcaggcccagcacagggatcacattgtcggggtgacctggcttatacttgaagcctttgagctggaccctggctttatccatgaggccaggctgcgtgtccagatggccacactggaggatgatgtggtagaggaggagcgttatacaggccagtggagtgagtggagccagcctgtgtgcttccaggctccccagagacaaggccctctgatcccaccctgggggtggccaggcaacacccttgttgctgtgtccatctttctcctgctgactggcccgacctacctcctgttcaagctgtcgcccagggtgaagagaatcttctaccagaacgtgccctctccagcgatgttcttccagcccctctacagtgtacacaatgggaacttccaggtgtgtgcagagaccacagaaggacatggggggcaggggttgcccagagctctggcctgcccaagatgttggctttcatgagggttggcggccagtatgggaggcttgtcagtgcttggagccttttttgtatattcagtgaatttcaatttatacgcgtatctcaaatggggaaaaattagctttattttccattgctgatttctttttg

SEQ ID NO: 14833 - DNA, 2032 bp, Homo sapiens; identical to SEQ ID NO: 14830
  source 1..2032: mol_type = unassigned DNA

SEQ ID NO: 14834 - DNA, 3483 bp, Homo sapiens
  source 1..3483: mol_type = unassigned DNA
ttccccgccggtccgcccctggctagagaagccgcagcccgcagtgtccgacccagtcgtcccgcgccggagccggccccgtagcgtgccatggcctgctacatctaccagctgccctcctgggtgctggacgacctgtgccgcaacatggacgcgctcagcgagtgggactggatggagttcgcctcctacgtgatcacagacctgacccagctgcggaagatcaagtccatggagcgggtgcagggtgtgagcatcacgcgggagctgctgtggtggtggggcatgcggcaggccaccgtccagcaacttgtggacctcctgtgccgcctggagctctaccgggctgcccagatcatcctgaactggaaaccggctcctgaaatcaggtgtcccattccagccttccctgactctgtgaagccagaaaagcctttggcagcttctgtaagaaaggctgaggatgaacaggaagaggggcagcctgtgaggatggccacctttccaggcccagggtcctctccagccagagcccaccagccggcctttctccagcctcctgaagaagatgcccctcattccttgagaagcgacctccccacttcgtctgattcaaaggacttcagcacctccattcctaagcaggaaaaacttttgagcttggctggagacagccttttctggagtgaggcagacgtggtccaggcaaccgatgacttcaatcaaaaccgcaaaatcagccaggggacctttgctgacgtctacagagggcacaggcacgggaagccattcgtcttcaagaagctcagagagacagcctgttcaagtccaggatcaatcgaaagattcttccaggcagagttgcagatttgtcttagatgctgccaccccaatgtcttacctgtgctgggcttctgtgctgcaagacagtttcacagcttcatctacccctacatggcaaatggttccctacaggacagactgcagggtcagggtggctcggaccccctcccctggccccagcgtgtcagcatctgctcagggctgctctgtgccgtcgagtacctgcatggtctggagatcatccacagcaacgtcaagagctctaatgtcttgctggaccaaaatctcacccccaaacttgctcacccaatggctcatctgtgtcctgtcaacaaaaggtcaaaatacaccatgatgaagactcacctgctccggacgtcagccgcgtatctgccagaggatttcatccgggtggggcagctgacaaagcgagtggacatcttcagctgtggaatagtgttggccgaggtcctcacgggcatccctgcaatggataacaaccgaagcccggtttacctgaaggacttactcctcagtgatattccaagcagcaccgcctcgctctgctccaggaagacgggcgtggagaacgtgatggcaaaggagatctgccagaagtacctggagaagggcgcagggaggcttccggaggactgcgccgaggccctggccacggctgcctgcctgtgcctgcggaggcgtaacaccagcctgcaggaggtgtgtggctctgtggctgctgtggaagagcggctccgaggtcgggagacgttgctcccttggagtgggctttctgagggtacaggctcttcttccaacaccccagaggaaacagacgacgttgacaattccagccttgatgcctcctcctccatgagtgtggcaccctgggcaggggctgccaccccacttctccccacagagaatggggaaggaaggctgcgggtcatcgtgggaagggaggctgactcctcctctgaggcctgtgttggcctggagcctccccaggatgttacagaaacttcgtggcaaattgagatcaatgaggccaaaaggaaactgatggagaatattctgctctacaaagaggaaaaagtggacagcattgagctctttggcccctgatgaccggaacacagctgaggacccttgtcctcagttggaaagatgagcatcagatcaagaaaaaggtctgaggcagaatccaagatctgccaggaaacacacaacaaaacatctgctgtcctgggtgggagggaaacttcatttcactggaatgagttgggagagaaaggccctcagcttttagagacacaaaaatccatgaagtctcttcctttctgggctttgttagtcagagcaggggatcagaggagactgaagcagaaaccctgcacacgggcccaggatgtggctgattttgtggttccggggagtatgtgatgataatcacccccagcagattccattacctcagcagctcttgttcccccgccactggcagttctgcaatgccatagcattttccagagctaagatctctgggttgtatttgctgacagcctgcaagcttgcatgctctgaaagattttttttagtttttaatttttttgtagagatggggtctcgctttgttggcgcaatcctcccacctcagactcccaaagtgctggaattacagttgggagccactgtgcctggcctggaagactttcaacttgtgtctcagtgcagttcttgactcacctctctgggcctcaggttctacaaatgccagacacctagcgaagagctctgcaggctttccactgcctgtattggaaatcttgcaattcacataattattcagtcactgcctggtacctttatcttcccatcccactaatgttagtgttttttaatggagcttttattctgagaatatgtgtttgtctgtttgtttgttttttgagacagagtctcactttgtcacccaggctggagtgcagtggcacgatctcagctcactgcaagctctgcctctcaggttcaagtgattctcctgcctcagcctcctgagtagatgggactgtaggcacctgccactatgcctggctaatttttgtgtttttagtagagacagggtttcaccatattggccaggctggtctcgaactactgacctcgtgatctgcccgccttggcctatcaaagtgttgggattacaggcttgagccaccgcacccggccgagaatatgtgttgttatttatgactggattatgaagaatcaggagaatgcatttcatgtctgattctgctgctaattaagtcaatcatttaatttttgggacctcagtttctttgtaagtaaaataacacctgcttgttcttcatccctgggctgttgggaggaacagatgagacagtggctatagaagcacttggaaaatgcacttgtcctgttttgtaaaataaaaaggtattaaatgtgtatttctgccatgtacctaatgattattcagtgcgtatatatctgaaaagtcatgttgcaaatctttctgtgaaacagatgctattttaaattcactgggagaaatatcctatttaaagtaatctatagtaatttctttttatataataaaaatatatttgtaaagtc

SEQ ID NO: 14835 - DNA, 8663 bp, Homo sapiens
  source 1..8663: mol_type = unassigned DNA
gctttcaaaaataaacttttgtaagaagtaatgacaccgctagccgtccacaccaggagaccgcctagccgtggggcacggtgggctcctgggagctctgagctctgggctttctccagttcgcactctgcttgtctcggcagctccgtccccaccgcagaggtgtgaaggggcgcaaagccagcgaagggagaacccgggtcgggtaacccccaggcctggccaggcggacgcaggggcatctcgggcgaggcgcgccttgcgtcacgtgggcaccgcccctgcagtgaccggagaacggcgtgttcctagggctctgctgccgtcgtggaagcaggatttccgcggttgtgtaacggcctgtcgcaggcgtgcagggacctggactccgcctcgtccccggggctcgggcagccgagccatggcggggaactgtggggcccgcggcgcgctgtcggcgcacacgctgctgttcgacctgccgcccgcgctgctcggagagctctgcgctgttctggacagctgcgacggcgcgctgggctggcgcggcctggcagagagactttcaagcagctggctggatgttcgtcatattgaaaagtatgtagaccaaggtaaaagtggaacaagagaattactttggtcctgggcacagaaaaacaagaccatcggtgaccttttacaggtcctccaggagatgggacatcgtcgagctattcatttaattacaaactatggagcagtgttgagtccttcagagaagagttatcaggaaggtggatttccaaatatattattcaaggaaacagccaatgtcaccgtggataatgttcttattcctgaacataatgaaaaaggaatactgcttaaatcttccatcagctttcaaaatatcatagaaggaactagaaatttccacaaagacttcctaattggagaaggagagatttttgaggtatacagagtggagattcaaaacctaacatatgctgtcaaattatttaaacaggagaaaaaaatgcagtgtaagaagcattggaagaggtttttatctgagcttgaagttttactactgtttcatcacccaaacatactagagttggctgcatattttacagagactgagaagttctgtctgatttatccatacatgagaaatggaacactttttgacagattgcagtgtgtaggtgacacggccccactcccttggcacattcgaatcggtatattaataggaatatccaaagccattcactacctgcacaacgttcaaccatgctcggtcatctgtggcagtatatcaagtgcaaacatccttttggatgatcagtttcaacccaaactaactgattttgccatggcacacttccggtcccacctagaacatcagagttgtaccataaatatgaccagcagcagcagtaaacatctgtggtacatgccagaagagtacatcagacaggggaaactttccattaaaacagatgtctacagctttggaattgtaataatggaagttctaacaggatgtagagtagtgttagatgatccaaaacatatccagctgcgggatctccttagagaattgatggagaagagaggcctggattcatgtctctcatttctagataagaaagtgcctccctgccctcggaatttctctgccaagctcttctgtttggcaggccggtgtgctgcaacgcgggcaaagttaagaccatcaatggatgaagttttaaatactcttgaaagtactcaagccagcttgtattttgctgaagatcctcccacatcactaaagtccttcaggtgtccttctcctctattcctggagaatgtaccaagtattccagtggaagatgatgaaagccagaataacaatttactaccttctgatgaaggcctgaggatagacagaatgactcagaaaactccttttgaatgcagccagtctgaggttatgtttctgagcttggacaaaaagccagagagcaagagaaatgaggaagcttgcaacatgcccagttcttcttgtgaagaaagttggttcccaaagtatatagttccatcccaggacttaaggccctataaggtaaatatagatccttcttcagaagctccagggcattcttgcaggagcaggccagtggagagcagctgttcctccaaattttcctgggatgaatatgaacagtacaaaaaagaataaattctaccagaagataaagaaaaaagcaagtattgcataggcacctgagcataggtatgaccttgggaagacattggctccataagcaatgccaagagaatgatcaatagtgagtttgggtgatgcagataaacaatctggataattccatttcttttttcccaaaccctcaaacagagtgccttaaaaaattgttttatcaggataattgtctcatgaccaaatccacgctcaattagagccattcaaaattccttaagatcatgggttctgacttcagccaaacaaaacaatcaaaacctaccaaaaagggactggattgtaatgtcctctccatcatcctcagtgtgagtcctcagagcctccatctgccaagaacattcagttggattccatcgtttggtttagcttgcttgcacgggttgtaggaaatgtctaatttgtaaatgttaatagatacctttggaaagaatcaccttgttattctgattgacccctcttgttttttggttaatccctgactagcctgcttgtctgaaaatgagccaggttcacccttagctacggcatgctctgggttgaaaggggatttcttcccaagatctatcctaaactcttaggacagtttatcctgtattgactattattacagctttttaaaaacagacttagtgacctattatatcttaaggagactatgtgaaatgtccatcaagtaatttttattcctgagaaaatggctggtcaagggcctaggtcagctttttgtttaatctacacctttcaactctgggccttcattcctgctgtttcttggatctccctcttttgaaatcctaccaatcatcagagctctacaaaacagccacctcctggaagcttccctaatctctacaaccagaagtactccctttatcagtatttccacagcaatttctttgtatttctattttatatttatcactttctgaattatatcaaagctgcttgtcttatctctttttttttttgagacggagtctcgctctgtcatccaggctggagtgcagtggcacaatctcggctcaccgcaaggtctgcctcccgggttcacgccattctcctgcctcagcctcccgagtaaaggtgggactacaggcgcccgccactacgcccggctaattttttgtatttttagtagagacggggtttcaccatgttaggcaggatggtctcgatctcctgacctcatgatccgcctgcctggcctcccaaagtgctgggattacaggcgtgagccaccgcgcccagccttcatctcttttactaggttgtaaactccctatattagttttctattgtttttgtaacacattatcacaaatttagtgacttaaagtaacataaattaattattttgcagttctggaggtcagaattccttagcattctttctggaggctgttggggagaactcactgccttgccttttccagcttctagaggccacctgccttctttggctcatggcctcttcctccgtcttcaaagccagcaacgtgacatttcagatctccctctctctgtctgtctcaccgcatctcttcactaccctcttcctctcattctggcccttctgcatgtcttttataaagacctttgtgatttcactgggcccactcatataagccaggaaaatctctgtgtctcagatccttaatttaattacacctgcaaagtccgttttctcgtgtaaagtaacatattcacaggtttctggaattgggacgtggacatcttcgggggaccattactctgtctgtcatactccctgagtgtgtaagggccatctcttcagagcctaatgtgtcatcctacacagagcaggtgtttccttataaattaagttgaattaaattacccctatgaagccacataatcaataattcagctataataaacattgccgaataaattaacaaagggaggataatgactccttatgatgatggatagaaacactgaagaaaaccattttcagaggatttactgaattttcctctccaaggagcttgtaatagaagggtaaacctctagtttcttgtccagcagaggaataggctcatgtcttttgttttattttatttttttggtgagtcagtatggttgggttaatcatattcacattagattccatgttgaagaacaactaatcaaagaagaaaatcatcaggaatcagggtgagattaacagaccaaggtcagaaacatggagttacaattttccaaaaaagcacgaagtgagattaaaaccacagtaagtcttagtctgactgacaggctttatacaggccctcggtaagcagttgggagaacccatgcccaccactgctctgtacggtatctggctgctcagagctctctgattcacaaaagagatcatcaagaattgactctgtgttaaactgtttttcacttagaatatggacccccaccaatacattcaatgaagggtcattaaggaagctctgattaacaccaggcccatgcagttactccgcacatataatctgtgggtattatgttgatttgaacttgcttagctgacttaaagcagggtttctcaaactgtagtatgcatcagaatgacttggaaagctggttaaaaacgcagattgctgggtccacccagcttctgatgcaataggtctggggttagaaattttgctttctaatgagttcccaggtgatgctgatgccaatgatgtgaagcccgctcttcacatccgtgaaaatcgctgccttaaggtgctcttaaattgttatagattggtagatcctacctttccatcactggtatgttttttgagaaaaggatcctttcttttcattctgttatattcatcctattacataggatgttggttagcacagagtgggagctctagaaagattgttgaccaatcatcttattgactagaccatctttctagagtataactattttggacacctcaaagatgaagtcagataagctggcagtgacctgattaacgttgtggtaagcagatgccactgtggctgggaagtaccaaatcttctgttgagtgattcagtcttcctgactagatttgccttctagtgggtgtattaataagcgttagttgatatgaattaaatgttgcaactttctatgggtaataagaggatacctttatagtttcatgatgtggagaccaagatacataagaaagcaagaatgagtctccgggtgttccctctgatcagcaaacatgaattcataatttcatttactctcatttttgtaatgcactctgagcaatcctccaggcagatcctatttactaagcttcaggcttttgtcccattttataatgcccaaacacatggagaaaacattttgttgtttttaaaaacaggtatgggatttctgatataatcaattttattgacttcttgggagttgtaatgatctgtgactcactgcataatattgtagttttatagggtggcacatcaccctgtgtaaaacaactttaatgacctgaggactgatgagtacaggaagtgaggtttatcatgagtagcatttattaagcatctgctagaatcaaagcactgcattagctactaaggtacaaagtaagacacagtttaataaggaagacagggcatctacccaagtcaacagttcagtgacatctgttatttgaaccacacaccaatgcaaccgaagtaaatgctgaaagggtgagaagaaggaatagattactatgcatttttgagaggatgaagaaggcttcttggagaaggtttctgaaaagagatacggaattaagagaaatagaaaagagcactgacgaagcactcaggatggctattcaaggaattggggatccacagcagctgtgcacaaccatccctaatgccagaaaaatggggtaagggtgaagggaactgggtctagagctttgcatgtttttttctggttaacccttagagtcaccctgaaggtgtggatcccatcttataataaggtgaggacactgagtcaggaaactaacttgctaaaatcaagtcctcccagtcctcccatcaggtccttccagatctggaggagccaggatttgaactcacatttgtctgacttcaaaatccatgctttttcttgtgttccaaattgcacaatggagtcactgccagttcaagctcctatgaaaagggatggatgtgaaaagtcatttgttgattccacagatttttagtaggtaccatgtctcctgcctttatcactatcctactcctctgctacaacttctctgctacaggcacccactgcagttacttgatatgagttaaatgaatccatccatccaaacttccattcattgaataaatacttagcaatggcttcctttgtatcaggcactattctaggagctggggctacagtgcagatggaaaccagcaaagctcactgccctcatggagcttatatgtaagtgaataaatctcagggtggttctcctgtcataggtcctggctcctctgccagctcttccaaatgggttcagagaggttttctccttgtcctgttgtgtaactgataatcccatggtggacctcactttgctattcatatgcactaagtagtttatggtgtgctttgtggctggcaattgtgacagattctattcttctattggtatgtggtttctttggggcatttgtttggatactgatggcatcttccgggggtctgaggcacctacacaaacctcaggtcactatcacgtgatactggagttgcctgttaaattatatttcttcttccacaaaactgcaggttccctgagggaaaggtctatgtcctgctcatttttggatccctaatggctggcacagtacctggtgcataatatggttcaacaaatatttgtaaaatgaatgaatcaaatagtccttcaaagcatcttcagaatcaagattgtcatctagattgcacccgaagtttatctttctagtattcagaatataatcaatcattgcttaaattattccatttcatcattcttgaataaaagctactaattttaaatactaatatctgagatatcttcgaaaagaagattagtcgttgtatgtgttgcttataaattttctctatggtggaaaatattcccaaaccatgtctaagcaatgaaaaaccagtgttctggcaggaaataaactgatgtttgttgtgttttgtatctgtcttcccgttccaaatcatttatatatacttgatggtctgtgggcttgacttgcaagtattttcctgggagacatttttattcaaaagacctgtattgcctgccaaaccttcatttaagagactcattatggatgtcatctgcatcattgcaaacttttctggtcgtctctataaatagcaagataatatttacagagttttacattggctcttgaattttaaaatattcttatagacaaacattaattggaatggggggtaaggaggtaggaatggcttacttgcggaaatgcaggctcattgttgtgtctagtaggtgctaggtgcattcacacatctcttaagctttaaacaacctattgagccggtttccatttccttgatctattagatttaaaaaaatgaagcataaaggagttggctcttgccctaagtcatactactgatggaatgagaatacaaaccaaaaacactttattcaagtccaggaaatatctgccttgaaaaagaataacttaaaaattaaaagtgtcctctatttgaacatgaaaacagctaataaagatgtgttattttattttattattattaattttgtcctcccatattggcaaagataaagcaattgacaaaaatggaattcttgttcaatactggcaggagtgaaaattggtagaacctttctagaaggcaatttggcaacatgtatgaaaacctaaatgttgatacacctttacccagcagtttgtttaggaatttatcctaatgaataaaagttgtccaagtcttcaaacatgagcccaaaggtatatttcatgatgtttatgatattaaaacattggaaacaactgaaacatccttcagtaaaagatggattaaataaattccatgcagttgtcatttaaaaatatttagatatatgtttattgctatggatatatgttcccaaaatattattgaatcaaaaagtagactacaggatatatgttgaatatgagctcatttataacattgaatattttaagataatgtatgtttcatagagagatcttcaccaaatgttaaggatttttttttctgggctgtggtatttgggtgatctttacattcttcagactcatgtgtgtttgaaactttttataatgaacatatatcatttttattagaaaagaataaagtttttgaaaaaaaaaa

SEQ ID NO: 14836 - DNA, 1853 bp, Homo sapiens
  source 1..1853: mol_type = unassigned DNA
gacctggactccgcctcgtccccggggctcgggcagccgagccatggcggggaactgtggggcccgcggcgcgctgtcggcgcacacgctgctgttcgacctgccgcccgcgctgctcggagagctctgcgctgttctggacagctgcgacggcgcgctgggctggcgcggcctgggagcagtgttgagtccttcagagaagagttatcaggaaggtggatttccaaatatattattcaaggaaacagccaatgtcaccgtggataatgttcttattcctgaacataatgaaaaaggaatactgcttaaatcttccatcagctttcaaaatatcatagaaggaactagaaatttccacaaagacttcctaattggagaaggagagatttttgaggtatacagagtggagattcaaaacctaacatatgctgtcaaattatttaaacaggagaaaaaaatgcagtgtaagaagcattggaagaggtttttatctgagcttgaagttttactactgtttcatcacccaaacatactagagttggctgcatattttacagagactgagaagttctgtctgatttatccatacatgagaaatggaacactttttgacagattgcagtgtgtaggtgacacggccccactcccttggcacattcgaatcggtatattaataggaatatccaaagccattcactacctgcacaacgttcaaccatgctcggtcatctgtggcagtatatcaagtgcaaacatccttttggatgatcagtttcaacccaaactaactgattttgccatggcacacttccggtcccacctagaacatcagagttgtaccataaatatgaccagcagcagcagtaaacatctgtggtacatgccagaagagtacatcagacaggggaaactttccattaaaacagatgtctacagctttggaattgtaataatggaagttctaacaggatgtagagtagtgttagatgatccaaaacatatccagctgcgggatctccttagagaattgatggagaagagaggcctggattcatgtctctcatttctagataagaaagtgcctccctgccctcggaatttctctgccaagctcttctgtttggcaggccggtgtgctgcaacgcgggcaaagttaagaccatcaatggatgaagttttaaatactcttgaaagtactcaagccagcttgtattttgctgaagatcctcccacatcactaaagtccttcaggtgtccttctcctctattcctggagaatgtaccaagtattccagtggaagatgatgaaagccagaataacaatttactaccttctgatgaaggcctgaggatagacagaatgactcagaaaactccttttgaatgcagccagtctgaggttatgtttctgagcttggacaaaaagccagagagcaagagaaatgaggaagcttgcaacatgcccagttcttcttgtgaagaaagttggttcccaaagtatatagttccatcccaggacttaaggccctataaggtaaatatagatccttcttcagaagctccagggcattcttgcaggagcaggccagtggagagcagctgttcctccaaattttcctgggatgaatatgaacagtacaaaaaagaataaattctaccagaagataaagaaaaaagcaagtattgcataggcacctgagcataggtatgaccttgggaagacattggctccataagcaatgccaagagaatgatcaatagtgagtttgggtgatgcagataaacaatctggataattccatttcttttttcccaaaccctcaaacagagtgccttaaaaaattgttttatca

SEQ ID NO: 14837 - DNA, 1381 bp, Homo sapiens
  source 1..1381: mol_type = unassigned DNA
atgaacaaacccataacaccatcaacatatgtgcgctgcctcaatgttggactaattaggaagctgtcagattttattgatcctcaagaaggatggaagaagttagctgtagctattaaaaaaccatctggtgatgatagatacaatcagtttcacataaggagatttgaagcattacttcaaactggaaaaagtcccacttctgaattactgtttgactggggcaccacaaattgcacagttggtgatcttgtggatcttttgatccaaaatgaattttttgctcctgcgagtcttttgctcccagatgctgttcccaaaactgctaatacactaccttctaaagaagctataacagttcagcaaaaacagatgcctttctgtgacaaagacaggacattgatgacacctgtgcagaatcttgaacaaagctatatgccacctgactcctcaagtccagaaaataaaagtttagaagttagtgatacacgttttcacagtttttcattttatgaattgaagaatgtcacaaataactttgatgaacgacccatttctgttggtggtaataaaatgggagagggaggatttggagttgtatataaaggctacgtaaataacaactgtggcagtgaagaagcttgcagcaatggttgacattactactgaagaactgaaacagcagtttgatcaagaaataaaagtaatggcaaagtgtcaacatgaaaacttagtagaactacttggtttctcaagtgatggagatgacctctgcttagtatatgtttacatgcctaatggttcattgctagacagactctcttgcttggatggtactccaccactttcttggcacatgagatgcaagattgctcagggtgcagctaatggcatcaattttctacatgaaaatcatcatattcatagagatattaaaagtgcaaatatcttactggatgaagcttttactgctaaaatatctgactttggccttgcacgggcttctgagaagtttgcccagacagtcatgactagcagaattgtgggaacaacagcttatatggcaccagaagctttgcgtggagaaataacacccaaatctgatatttacagctttggtgtggttttactagaaataataactggacttccagctgtggatgaacaccgtgaacctcagttattgctagatattaaagaagaaattgaagatgaagaaaagacaattgaagattatattgataaaaagatgaatgatgctgattccacttcagttgaagctatgtactctgttgctagtcaatgtctgcatgaaaagaaaaataagagaccagacattaagaaggttcaacagctgctgcaagagatgacagcttcttaa

SEQ ID NO: 14838 - DNA, 4147 bp, Homo sapiens
  source 1..4147: mol_type = unassigned DNA
cccgccccttcgcggcgcttcctagttcggctggttcttctgtcgccggcttcagcagcccgcgcccgggcaggaatagaagatgaacaaacccataacaccatcaacatatgtgcgctgcctcaatgttggactaattaggaagctgtcagattttattgatcctcaagaaggatggaagaagttagctgtagctattaaaaaaccatctggtgatgatagatacaatcagtttcacataagatgctgttcccaaaactgctaatacactaccttctaaagaagctataacagttcagcaaaaacagatgcctttctgtgacaaagacaggacattgatgacacctgtgcagaatcttgaacaaagctatatgccacctgactcctcaagtccagaaaataaaagtttagaagttagtgatacacgttttcacagtttttcattttatgaattgaagaatgtcacaaataactttgatgaacgacccatttctgttggtggtaataaaatgggagagggaggatttggagttgtatataaaggctacgtaaataacacaactgtggcagtgaagaagcttgcagcaatggttgacattactactgaagaactgaaacagcagtttgatcaagaaataaaagtaatggcaaagtgtcaacatgaaaacttagtagaactacttggtttctcaagtgatggagatgacctctgcttagtatatgtttacatgcctaatggttcattgctagacagactctcttgcttggatggtactccaccactttcttggcacatgagatgcaagattgctcagggtgcagctaatggcatcaattttctacatgaaaatcatcatattcatagagatattaaaagtgcaaatatcttactggatgaagcttttactgctaaaatatctgactttggccttgcacgggcttctgagaagtttgcccagacagtcatgactagcagaattgtgggaacaacagcttatatggcaccagaagctttgcgtggagaaataacacccaaatctgatatttacagctttggtgtggttttactagaaataataactggacttccagctgtggatgaacaccgtgaacctcagttattgctagatattaaagaagaaattgaagatgaagaaaagacaattgaagattatattgataaaaagatgaatgatgctgattccacttcagttgaagctatgtactctgttgctagtcaatgtctgcatgaaaagaaaaataagagaccagacattaagaaggttcaacagctgctgcaagagatgacagcttcttaaaactttattggaaaagactcttgactttttatatacacctatctcaaccatttttttaactgatttttttcctaaatattcttctttacctttaacaaggcataggctgttgcaggacagtggttattaaagcatgggttgaacttccaaaatataaaaatagagccaccatatcaacacttagccctacccattagtatcacccccagttcttacagtaatccctgagaaatctccttcaagcatcaccaaacacagtttgaaaattacagggttagcaaaaagagcctgggctgtatgtagggtggaaacactctgatctgaagcccagctgactccactactaatttgctgtaaagctttggacatacacttagctgctgtgagccactaataacattgggctaatatctgctgtgcttctctgacaggtagtcatgaaaatcaaatgatgcaaaatatatacaagcactttgtaaattgtaaaatgatacaaaatttaaagtttatagagccagttacaaaatcctattagtcatatatttatagattgtgttcacagcaatcatttaaccacaaataaaatatcccttgatgatactgccataatgatatgtccattattagattatgttacatgacaaagttgaaggaatttggcagatgcagttaaggttcctaaacaactcactttgagactgttgaaagggcctgacctaatcaagtgaacccttgcaagaagaattctccttgtaagccttgaagaagtatgtgagagggccacattggctaaaacctaaaggtggcctctaggagatgagacctaccttccagttgtcagcaagcaggaaaaaaaaattgggacctcagttgcaaccacaaggaactgaattctgccaaaaatctgagtcagcttagaagagtactccaagcttcagatgataaccacagcctgggctgacacctggatttcagctttgcatgatcctcagtatgagaatctatctgttctgtgctggacttctaatatatagaactgtgagataatgggtcacattggctggatgtggtggctcatacctgtaaatcccagcactttgggaggccgaggcaggcagatcacctgaggtcaagagttcaagaccggcctggccaacatggtgaaaccccgtctctactaaaaatacaaaaattagacgagcgtggtggtggacacctgtagtcccagctacttgggaggctgaggcaggagactagctggaaccagggaggtagaggttgcagtgagctgagatcgtgccactgcactccagcctgggtgacagagtgagactccatcataaataaataaataaataaatgggtcacattaagcctttaagtttgtggtaatttattattcagtaatagaaaacaaatacagatactctcccatgatgtttttcccatgatgatttcccatgatatttacaggttttgcccacatttgaggggtatgtggaaattatacagagcatgtacagcgggaggcttatagtgtacgtactgaaatgtggggttggagccccaacacagagaccccagcaggacactgcctagtagagctatgggaagggtgctgccaccctccagacttgagaattgtagagccaccagcagcttgcactctgagcttggaaaagccacaggcactcaacttcaaccatgagggaagccacgcaccctgcaaagccacaggagtggagctgcccacggcctcgagggcccaccccttgcaccagtgtgccaggatgtgggacatggaatcaaggaatatgttagggcttttttttttttttttttgagacggagtcttgctctgttgcccaggctggagtgcagtggcacgatctcggctcactgcaagctctgcctcccaggttcacgccattcccctgcctcagcctccccagtagctgggactacaggtgcccgccaccatgcccagctaattttttttgtatttttagtagagatggggtttcactgtgttagccaggatggtcttgatctcctgacctcgtgatcacccgcctcggcctcccaaagtgccagtatttaaagtttaatgtcttcccagctgggtttcagacttgccaggatcctgttgcccctttctttagccaatttctcccttttgggacaagaatgttttacttattgcctgtaccaccaactgtatcttggaaataaataacttatattttatttcagaggctcataggcggcaggaacttaccttgagtctcaaatgagacttaggacttttgagtgatgctagaatgagttaagactttgggaagggatgattatattttgcaatgtgagaaagacattagatttggggggctgggggtagaatgacattgtttagatgtttgtctccttcaaatttcatgtttaaatgtaatccccagtgttgggggtggaggtggggcctgatgggaagtgtttgggtcatggtggatgatccctcatgaatggcttagagccactggtgatgagtgagttctcactcagttcgtgtgagatctggtggcttaaaagagtctgctccccctttgccttccattgtgattgtaaccttcctggggccttcatcaaaggccaggcaaatattggtgccgtgctagtatggcctgcagaaccgtaagccaaaacaaaccttttttctttataaattacccagcctcagttattcctttatagtgatgcaaaacgggctaactatataaatttgtaatttttaagttatagattgtttttattaaacacttatgaatactgtt

SEQ ID NO: 14839 - DNA, 1409 bp, Homo sapiens
  source 1..1409: mol_type = unassigned DNA
cccgccccttcgcggcgcttcctagttcggctggttcttctgtcgccggcttcagcagcccgcgcccgggcagatgctgttcccaaaactgctaatacactaccttctaaagaagctataacagttcagcaaaaacagatgcctttctgtgacaaagacaggacattgatgacacctgtgcagaatcttgaacaaagctatatgccacctgactcctcaagtccagaaaataaaagtttagaagttagtgatacacgttttcacagtttttcattttatgaattgaagaatgtcacaaataactttgatgaacgacccatttctgttggtggtaataaaatgggagagggaggatttggagttgtatataaaggctacgtaaataacacaactgtggcagtgaagaagcttgcagcaatggttgacattactactgaagaactgaaacagcagtttgatcaagaaataaaagtaatggcaaagtgtcaacatgaaaacttagtagaactacttggtttctcaagtgatggagatgacctctgcttagtatatgtttacatgcctaatggttcattgctagacagactctcttgcttggatggtactccaccactttcttggcacatgagatgcaagattgctcagggtgcagctaatggcatcaattttctacatgaaaatcatcatattcatagagatattaaaagtgcaaatatcttactggatgaagcttttactgctaaaatatctgactttggccttgcacgggcttctgagaagtttgcccagacagtcatgactagcagaattgtgggaacaacagcttatatggcaccagaagctttgcgtggagaaataacacccaaatctgatatttacagctttggtgtggttttactagaaataataactggacttccagctgtggatgaacaccgtgaacctcagttattgctagatattaaagaagaaattgaagatgaagaaaagacaattgaagattatattgataaaaagatgaatgatgctgattccacttcagttgaagctatgtactctgttgctagtcaatgtctgcatgaaaagaaaaataagagaccagacattaagaaggttcaacagctgctgcaagagatgacagcttcttaaaactttattggaaaagactcttgactttttatatacacctatctcaaccatttttttaactgatttttttcctaaatattcttctttacctttaacaaggcataggctgttgcaggacagtggttattaaagcatgggttgaacttccaaaatataaaaatagagccaccatatcaacacttagccctacccattagtatcacccccagttcttacagtaatccctgagaaatctccttcaagcatcaccaaacacagtt

SEQ ID NO: 14840 - DNA, 2835 bp, Homo sapiens
  source 1..2835: mol_type = unassigned DNA
gcggcgcttcctagttcggctggttcttctgtcgccggcttcagcagcccgcgcccgggcaggaatagaagatgaacaaacccataacaccatcaacatatgtgcgctgcctcaatgttggactaattaggaagctgtcagattttattgatcctcaagaaggatggaagaagttagctgtagctattaaaaaaccatctggtgatgatagatacaatcagtttcacataaggagatttgaagcattacttcaaactggaaaaagtcccacttctgaattactgtttgactggggcaccacaaattgcacagttggtgatcttgtggatcttttgatccaaaatgaattttttgctcctgcgagtcttttgctcccagatgctgttcccaaaactgctaatacactaccttctaaagaagctataacagttcagcaaaaacagatgcctttctgtgacaaagacaggacattgatgacacctgtgcagaatcttgaacaaagctatatgccacctgactcctcaagtccagaaaataaaagtttagaagttagtgatacacgttttcacagtttttcattttatgaattgaagaatgtcacaaataactttgatgaacgacccatttctgttggtggtaataaaatgggagagggaggatttggagttgtatataaaggctacgtaaataacacaactgtggcagtgaagaagcttgcagcaatggttgacattactactgaagaactgaaacagcagtttgatcaagaaataaaagtaatggcaaagtgtcaacatgaaaacttagtagaactacttggtttctcaagtgatggagatgacctctgcttagtatatgtttacatgcctaatggttcattgctagacagactctcttgcttggatggtactccaccactttcttggcacatgagatgcaagattgctcagggtgcagctaatggcatcaattttctacatgaaaatcatcatattcatagagatattaaaagtgcaaatatcttactggatgaagcttttactgctaaaatatctgactttggccttgcacgggcttctgagaagtttgcccagacagtcatgactagcagaattgtgggaacaacagcttatatggcaccagaagctttgcgtggagaaataacacccaaatctgatatttacagctttggtgtggttttactagaaataataactggacttccagctgtggatgaacaccgtgaacctcagttattgctagatattaaagaagaaattgaagatgaagaaaagacaattgaagattatattgataaaaagatgaatgatgctgattccacttcagttgaagctatgtactctgttgctagtcaatgtctgcatgaaaagaaaaataagagaccagacattaagaaggttcaacagctgctgcaagagatgacagcttcttaaaactttattggaaaagactcttgactttttatatacacctatctcaaccatttttttaactgatttttttcctaaatattcttctttacctttaacaaggcataggctgttgcaggacagtggttattaaagcatgggttgaacttccaaaatataaaaatagagccaccatatcaacacttagccctacccattagtatcacccccagttcttacagtaatccctgagaaatctccttcaagcatcaccaaacacagtttgaaaattacagggttagcaaaaagagcctgggctgtatgtagggtggaaacactctgatctgaagcccagctgactccactactaatttgctgtaaagctttggacatacacttagctgctgtgagccactaataacattgggctaatatctgctgtgcttctctgacaggtagtcatgaaaatcaaatgatgcaaaatatatacaagcactttgtaaattgtaaaatgatacaaaatttaaagtttatagagccagttacaaaatcctattagtcatatatttatagattgtgttcacagcaatcatttaaccacaaataaaatatcccttgatgatactgccataatgatatgtccattattagattatgttacatgacaaagttgaaggaatttggcagatgcagttaaggttcctaaacaactcactttgagactgttgaaagggcctgacctaatcaagtgaacccttgcaagaagaattctccttgtaagccttgaagaagtatgtgagagggccacattggctaaaacctaaaggtggcctctaggagatgagacctaccttccagttgtcagcaagcaggaaaaaaaaattgggacctcagttgcaaccacaaggaactgaattctgccaaaaatctgagtcagcttagaagagtactccaagcttcagatgataaccacagcctgggctgacacctggatttcagctttgcatgatcctcagtatgagaatctatctgttctgtgctggacttctaatatatagaactgtgagataatgggtcacattggctggatgtggtggctcatacctgtaaatcccagcactttgggaggccgaggcaggcagatcacctgaggtcaagagttcaagaccggcctggccaacatggtgaaaccccgtctctactaaaaatacaaaaattagacgagcgtggtggtggacacctgtagtcccagctacttgggaggctgaggcaggagactagctggaaccagggaggtagaggttgcagtgagctgagatcgtgccactgcactccagcctgggtgacagagtgagactccatcataaataaataaataaataaatgggtcacattaagcctttaa

SEQ ID NO: 14841 - DNA, 547 bp, Homo sapiens
  source 1..547: mol_type = unassigned DNA
ccttcgcggcgcttcctagttcggctggttcttctgtcgccggcttcagcagcccgcgcccgggcaggggcctggagcagtatctagcacaaagtagacactcagtaaatatttgctggattttcttcatatacatcaaccaaaacaacatgctgcagtgggttgagtgcagaagcagatacaagaattcagctctcttctattaagttaaatattgaagagattagcaaaactttaaaacaatgttgttcttctgtttttgaggaaaaggaatagaagatgaacaaacccataacaccatcaacatatgtgcgctgcctcaatgttggactaattaggaagctgtcagattttattgatcctcaagaaggatggaagaagttagctgtagctattaaaaaaccatctggtgatgatagatacaatcagtttcacataaggagatttgaagcattacttcaaactggaaaaagtcccacttctgaattactgtttgactggggcaccacaaattgcacagttggtgatcttgtggatcttttgatcc

SEQ ID NO: 14842 - DNA, 1684 bp, Homo sapiens
  source 1..1684: mol_type = unassigned DNA
cttcctagttcggctggttcttctgtcgccggcttcagcagcccgcgcccgggcaggggcctggagcagtatctagcacaaagtagacactcagtaaatatttggaatagaagatgaacaaacccataacaccatcaacatatgtgcgctgcctcaatgttggactaattaggaagctgtcagattttattgatcctcaagaaggatggaagaagttagctgtagctattaaaaaaccatctggtgatgatagatacaatcagtttcacataaggagatttgaagcattacttcaaactggaaaaagtcccacttctgaattactgtttgactggggcaccacaaattgcacagttggtgatcttgtggatcttttgatccaaaatgaattttttgctcctgcgagtcttttgctcccagatgctgttcccaaaactgctaatacactaccttctaaagaagctataacagttcagcaaaaacagatgcctttctgtgacaaagacaggacattgatgacacctgtgcagaatcttgaacaaagctatatgccacctgactcctcaagtccagaaaataaaagtttagaagttagtgatacacgttttcacagtttttcattttatgaattgaagaatgtcacaaataactttgatgaacgacccatttctgttggtggtaataaaatgggagagggaggatttggagttgtatataaaggctacgtaaataacacaactgtggcagtgaagaagcttgcagcaatggttgacattactactgaagaactgaaacagcagtttgatcaagaaataaaagtaatggcaaagtgtcaacatgaaaacttagtagaactacttggtttctcaagtgatggagatgacctctgcttagtatatgtttacatgcctaatggttcattgctagacagactctcttgcttggatggtactccaccactttcttggcacatgagatgcaagattgctcagggtgcagctaatggcatcaattttctacatgaaaatcatcatattcatagagatattaaaagtgcaaatatcttactggatgaagcttttactgctaaaatatctgactttggccttgcacgggcttctgagaagtttgcccagacagtcatgactagcagaattgtgggaacaacagcttatatggcaccagaagctttgcgtggagaaataacacccaaatctgatatttacagctttggtgtggttttactagaaataataactggacttccagctgtggatgaacaccgtgaacctcagttattgctagatattaaagaagaaattgaagatgaagaaaagacaattgaagattatattgataaaaagatgaatgatgctgattccacttcagttgaagctatgtactctgttgctagtcaatgtctgcatgaaaagaaaaataagagaccagacattaagaaggttcaacagctgctgcaagagatgacagcttcttaaaactttattggaaaagactcttgactttttatatacacctatctcaaccatttttttaactgatttttttcctaaatattcttctttacctttaacaaggcataggctgttgcaggacagtggttattaaagcatgggttgaacttccaaaatataaaaatagagccaccatatcaacacttagccct

SEQ ID NO: 14843 - DNA, 3558 bp, Homo sapiens
  source 1..3558: mol_type = unassigned DNA
agattattccagaaacagacactgctacatgttcttcataaattaacaccctcataaaggtaaaccaagaaggttatcctcaatcatctggtatcaatatataattatttttcacatttctgttactttttaatgagatttgaggttgttctgtgattgttatcagaattaccaatgcacaaaagccagaatgtatttggaaactagaagagctatttttgttttttggatttttctccaagttcaaggaaccaaagatatctccattaacatataccattctgaaactaaagacatagacaatcccccaagaaatgaaacaactgaaagtactgaaaaaatgtacaaaatgtcaactatgagacgaatattcgatttggcaaagcatcgaacaaaaagatccgcatttttcccaacgggggttaaagtctgtccacaggaatccatgaaacagattttagacagtcttcaagcttattatagattgagagtgtgtcaggaagcagtatgggaagcatatcggatctttctggatcgcatccctgacacaggggaatatcaggactgggtcagcatctgccagcaggagaccttctgcctctttgacattggaaaaaacttcagcaattcccaggagcacctggatcttctccagcagagaataaaacagagaagtttccctgacagaaaagatgaaatatctgcagagaagacattgggagagcctggtgaaaccattgtcatttcaacagatgttgccaacgtctcacttgggcctttccctctcactcctgatgacaccctcctcaatgaaattctcgataatacactcaacgacaccaagatgcctacaacagaaagagaaacagaattcgctgtgttggaggagcagagggtggagctcagcgtctctctggtaaaccagaagttcaaggcagagctcgctgactcccagtccccatattaccaggagctagcaggaaagtcccaacttcagatgcaaaagatatttaagaaacttccaggattcaaaaaaatccatgtgttaggatttagaccaaagaaagaaaaagatggctcaagctccacagagatgcaacttacggccatctttaagagacacagtgcagaagcaaaaagccctgcaagtgacctcctgtcttttgattccaacaaaattgaaagtgaggaagtctatcatggaaccatggaggaggacaagcaaccagaaatctatctcacagctacagacctcaaaaggctgatcagcaaagcactagaggaagaacaatctttggatgtggggacaattcagttcactgatgaaattgctggatcactgccagcctttggtcctgacacccaatcagagctgcccacatcttttgctgttataacagaggatgctactttgagtccagaacttcctcctgttgaaccccagcttgagacagtggacggagcagagcatggtctacctgacacttcttggtctccacctgctatggcctctacctccctgtcagaagctccacctttctttatggcatcaagcatcttctctctgactgatcaaggcaccacagatacaatggccactgaccagacaatgctagtaccagggctcaccatccccaccagtgattattctgcaatcagccaactggctctgggaatttcacatccacctgcatcttcagatgacagccgatcaagtgcaggtggcgaagatatggtcagacacctagatgaaatggatctgtctgacactcctgccccatctgaggtaccagagctcagcgaatatgtttctgtcccagatcatttcttggaggataccactcctgtctcagctttacagtatatcaccactagttctatgaccattgcccccaagggccgagagctggtagtgttcttcagtctgcgtgttgctaacatggccttctccaacgacctgttcaacaagagctctctggagtaccgagctctggagcaacaattcacacagctgctggttccatatctacgatccaatcttacaggatttaagcaacttgaaatacttaacttcagaaacgggagtgtgattgtgaatagcaaaatgaagtttgctaagtcagtgccgtataacctcaccaaggctgtgcacggggtcttggaggattttcgttctgctgcagcccaacaactccatctggaaatagacagctactctctcaacattgaaccagctgatcaagcagatccctgcaagttcctggcctgcggcgaatttgcccaatgtgtaaagaacgaacggactgaggaagcggagtgtcgctgcaaaccaggatatgacagccaggggagcctggacggtctggaaccaggcctctgtggccctggcacaaaggaatgcgaggtcctccagggaaagggagctccatgcaggttgccagatcactctgaaaatcaagcatacaaaactagtgttaaaaagttccaaaatcaacaaaataacaaggtaatcagtaaaagaaattctgaattactgaccgtagaatatgaagaatttaaccatcaagattgggaaggaaattaaaaactgaaaatgtacaattatcatttaggctatctcaagagagatgatttgccttctcaaggaaaatggagacaggcatattcatgggtcatcaaaatccagacatacagtcaacactgagaatcagcacacaccatatttcaaatatagaagagtcatgtacttggcaaccagtaaattctgaagaaaaagacacttacttattattaaaaccccaaatgcaatcagcgaaacatatttttactattcttggatgatagtcaaaatgatcataagccaggtttgcttccaccttccctgaaaattttactcacagatcatttgcaacaagcatagcttacttattgtttagggactgaacaatttattgggaagcaaactctttatatgctagaaagtacatttaaaagatgactacttacgcagggagatgcaggtctctctaaacgcatgaatgtatgtagtgtgtaggcactgtagtgagtgtatatatgctccacactacgtctgataaacacaaacctcagtattcagttattaggcacactagttttatacgcaactactgcttacatagtagactgttttgttgccaataatctttgaattgttctttaaaagaaactgaggttcagatacacataccatggaaaaatcttacttttcttgttactacacaaagctattttaaagaagatgctatgttgggagaagggcgaagttgtactatatgacataatcaattcctgtcttccaccacagatgaacaatgtcttcctataataacttcagaatatttcctcacaccaactttagtgtgtgtatacctagactggcatcaatgtaatccaattcagtccattttttatgtgctgcttaatgaaaatgaatctgtctctatctctttcaaatgttctaatatcagatatatttgctacaaaccttaatttcaataaagtaaaagtgatatactc

SEQ ID NO: 14844 - DNA, 835 bp, Homo sapiens
  source 1..835: mol_type = unassigned DNA
gagagacccaacgggacctcagcccagccagcccaggtgaagcctgaattttataggcaagctgagctgaaaccttgcccttggacaggatccaatcaaaggagatgtatcactttctgtccaacacctgatcaagcagatccctgcaagttcctggcctgcggcgaatttgcccaatgtgtaaagaacgaacggactgaggaagcggagtgtcgctgcaaaccaggatatgacagccaggggagcctggacggtctggaaccaggcctctgtggccctggcacaaaggaatgcgaggtcctccagggaaagggagctccatgcaggttgccagatcactctgaaaatcaagcatacaaaactagtgttaaaaagttccaaaatcaacaaaataacaaggtaatcagtaaaagaaattctgaattactgaccgtagaatatgaagaatttaaccatcaagattgggaaggaaattaaaaactgaaaatgtacaattatcatttaggctatctcaagagagatgatttgccttctcaaggaaaatggagacaggcatattcatgggtcatcaaaatccagacatacagtcaacactgagaatcagcacacaccatatttcaaatatagaagagtcatgtacttggcaaccagtaaattctgaagaaaaagacacttacttattattaaaaccccaaatgcaatcagcgaaacatatttttactattcttggatgatagtcaaaatgatcataagccaggtttgcttccaccttccctgaaaattttactcacagatcatttgcaacaagcatagcttacttattgtttagggactg

SEQ ID NO: 14845 - DNA, 5795 bp, Homo sapiens
  source 1..5795: mol_type = unassigned DNA
agattattccagaaacagacactgctacatgttcttcataaattaacaccctcataaaggtaaaccaagaaggttatcctcaatcatctggtatcaatatataattatttttcacatttctgttactttttaatgagatttgaggttgttctgtgattgttatcagaattaccaatgcacaaaagccagaatgtatttggaaactagaagagctatttttgttttttggatttttctccaagttcaaggaaccaaagtgtgtcaggaagcagtatgggaagcatatcggatctttctggatcgcatccctgacacaggggaatatcaggactgggtcagcatctgccagcaggagaccttctgcctctttgacattggaaaaaacttcagcaattcccaggagcacctggatcttctccagcagagaataaaacagagaagtttccctgacagaaaagatgaaatatctgcagagaagacattgggagagcctggtgaaaccattgtcatttcaacagaaaagaataaaggtaaaaccaaaccattcaatatcttacagtttggaaacaaccatcatgaacatttactgcctattttctgccttctttcttctattatatacacatattactgagaccatatttacttagagtttgtatcattttttccacttaacctgatgtaaaggatattttatagttcactaaaatttcttcaaagttatcattttaatgacttgcaacattctgttgcatccatatggatgtcatcaacttaaccattgcatcattgtatctgacattacaaatagtgttttaattaagatatttaaacataaatctttgtcaaatcactaatttctcaaaatagattactaagtcaaacactatggattttaaggcttttaataaattttgccaaattttttttccagaaattttgttacaatttaaatatcccactggcagaaaagacaagaacctgtctcattgcagcacttatcaatattgaatattactatttattctagagtttgccaaaaggcagaggaaaatcatttctcctgtgtttattagatgtttgaaatttctctttcatgtatatttctattgcagtcttcccattttcacataaaagaatacttttaaatatacacaataaaactattctctgggcaatgtgttccccagttcatttgatttttggtaatgtgaataatgttttaagaaattaatttttcatgacttaaaatgtagaaattgagaaaatagatatttgtaaataaatgatattactttcccatttcttcctttactgacattcagagaaagccggctgtgcctatatttcaattttctcctaagttcagctaatttatcatttctggactgacttgtagctaataataggacaagcctagttgaattttaattataaaatgacagtaaaatgcatttttaacaataaaaagaagagctacatagttaattcccccatataaacagctcaaatttgacctgtgacacctaatatcaagtcttattcaaaaaggtattatttagaggaggagcatataaacatgtaaaaagacgttttgtactgacttcattttaatatgggaaaacaaaattaataagagaattgaaatttgtatttctactttaaacttgaaggtaatgtactttagctgatagaaacttttgtaataacaagattagatttagtaagttagagtaagttaatatgacccctttcttataaattatttttcatttttttaaataaaaactttgagggatcagtggacaattcatatattataatataatatgatatatcatcaccatatatttaagttctagcaacaaatgttttagaattatttccccagtacttctggacacctccagttgaagtatacacacagaacagttaagattagattttgattgggaaatgttactaggtgcctaggtgtgaaggaagagtgagaaatctccaaaagaggctgaatgtgctcgaagacaaacccaggctacctaataattgtttttaggtgtaagtatgtgaataatttatcttttcaaggcaataaaatggaaggatagccaaataaaaatttgttcttctagggtaccagctaagtacttttttattgtaacaaaaattgtagcataaaccgattattcatagaattacaaagtttgaaggtgccttacattggtaatagtctgatgaagtccagagcacagaacacctccatcccaattgctcacagcaggattcttcaatgagggcagaaggggaagatgccagggaccacatcctttgaggttctgatatgccacagggtatgtactttattagccaaaaaactgccttgcctagatgattctgatacccactctcacgcccccactaggaagcacaattccacacccagggcaattacttcacagagcctcacagtgacaagtaaccacttgtgaccgcagattcccaggtaccacatactcttcagggagtaaggaaagattgaatcatttttcagtatatcttgttttctaaaacacaagaataaactaaggcattctatgtttttgcctaattaaggttgaaatggaaagttgtttctggctaaatataaaccaattaactataacactattttctctgagcatttttttaaataataatttattacaaaatagaaatgcatttgtattataataacgcttttttctttgcttgaatagaacccagacttgcactctatgaagatctttaaaaatatcaaaacatttgccacatatttgaaatggtttatggtgatctgttctaaaagaagtgaaattcatagcatcttaaatgttctttcatctcttggattttctgattaaaatcttattcctcaatgattgcttaagcaatctacattttaaagacttgggcagtattctaagaaaaccctcagaagagcaaattcaagatgttgccaacgtctcacttgggcctttccctctcactcctgatgacaccctcctcaatgaaattctcgataatacactcaacgacaccaagatgcctacaacagaaagagaaacagaattcgctgtgttggaggagcagagggtggagctcagcgtctctctggtaaaccagaagttcaaggcagagctcgctgactcccagtccccatattaccaggagctagcaggaaagtcccaacttcagatgcaaaagatatttaagaaacttccaggattcaaaaaaatccatgtgttaggatttagaccaaagaaagaaaaagatggctcaagctccacagagatgcaacttacggccatctttaagagacacagtgcagaagcaaaaagccctgcaagtgacctcctgtcttttgattccaacaaaattgaaagtgaggaagtctatcatggaaccatggaggaggacaagcaaccagaaatctatctcacagctacagacctcaaaaggctgatcagcaaagcactagaggaagaacaatctttggatgtggggacaattcagttcactgatgaaattgctggatcactgccagcctttggtcctgacacccaatcagagctgcccacatcttttgctgttataacagaggatgctactttgagtccagaacttcctcctgttgaaccccagcttgagacagtggacggagcagagcatggtctacctgacacttcttggtctccacctgctatggcctctacctccctgtcagaagctccacctttctttatggcatcaagcatcttctctctgactgatcaaggcaccacagatacaatggccactgaccagacaatgctagtaccagggctcaccatccccaccagtgattattctgcaatcagccaactggctctgggaatttcacatccacctgcatcttcagatgacagccgatcaagtgcaggtggcgaagatatggtcagacacctagatgaaatggatctgtctgacactcctgccccatctgaggtaccagagctcagcgaatatgtttctgtcccagatcatttcttggaggataccactcctgtctcagctttacagtatatcaccactagttctatgaccattgcccccaagggccgagagctggtagtgttcttcagtctgcgtgttgctaacatggccttctccaacgacctgttcaacaagagctctctggagtaccgagctctggagcaacaattcacacagctgctggttccatatctacgatccaatcttacaggatttaagcaacttgaaatacttaacttcagaaacgggagtgtgattgtgaatagcaaaatgaagtttgctaagtcagtgccgtataacctcaccaaggctgtgcacggggtcttggaggattttcgttctgctgcagcccaacaactccatctggaaatagacagctactctctcaacattgaaccagctgatcaagcagatccctgcaagttcctggcctgcggcgaatttgcccaatgtgtaaagaacgaacggactgaggaagcggagtgtcgctgcaaaccaggatatgacagccaggggagcctggacggtctggaaccaggcctctgtggccctggcacaaaggaatgcgaggtcctccagggaaagggagctccatgcaggttgccagatcactctgaaaatcaagcatacaaaactagtgttaaaaagttccaaaatcaacaaaataacaaggtaatcagtaaaagaaattctgaattactgaccgtagaatatgaagaatttaaccatcaagattgggaaggaaattaaaaactgaaaatgtacaattatcatttaggctatctcaagagagatgatttgccttctcaaggaaaatggagacaggcatattcatgggtcatcaaaatccagacatacagtcaacactgagaatcagcacacaccatatttcaaatatagaagagtcatgtacttggcaaccagtaaattctgaagaaaaagacacttacttattattaaaaccccaaatgcaatcagcgaaacatatttttactattcttggatgatagtcaaaatgatcataagccaggtttgcttccaccttccctgaaaattttactcacagatcatttgcaacaagcatagcttacttattgtttagggactgaacaatttattgggaagcaaactctttatatgctagaaagtacatttaaaagatgactacttacgcagggagatgcaggtctctctaaacgcatgaatgtatgtagtgtgtaggcactgtagtgagtgtatatatgctccacactacgtctgataaacacaaacctcagtattcagttattaggcacactagttttatacgcaactactgcttacatagtagactgttttgttgccaataatctttgaattgttctttaaaagaaactgaggttcagatacacataccatggaaaaatcttacttttcttgttactacacaaagctattttaaagaagatgctatgttgggagaagggcgaagttgtactatatgacataatcaattcctgtcttccaccacagatgaacaatgtcttcctataataacttcagaatatttcctcacaccaactttagtgtgtgtatacctagactggcatcaatgtaatccaattcagtccattttttatgtgctgcttaatgaaaatgaatctgtctctatctctttcaaatgttctaatatcagatatatttgctacaaaccttaatttcaataaagtaaaagtgatatactc

SEQ ID NO: 14846 - DNA, 4157 bp, Homo sapiens
  source 1..4157: mol_type = unassigned DNA
gctactttgaaaggacaaccatttttctttccgctaatttataatggttttgaagtggttgttcattctcaaacatagacttttaaatgttaggtctttcctataactctttgttattggaagtttcaaggatttggacactcaattaaggattctgtcctctcctcattcctttggttttggcccaaatgattatgtttcctctttttgggaagatttctctgggtattttgatatttgtcctgatagaaggagactttccatcattaacagcacaaacctacttatctatagaggagatccaagaacccaagagtgcagtttcttttctcctgcctgaagaatcaacagacctttctctagctaccaaaaagaaacagcctctggaccgcagagaaactgaaagacagtggttaatcagaaggcggagatctattctgtttcctaatggagtgaaaatctgcccagatgaaagtgttgcagaggctgtggcaaatcatgtgaagtattttaaagtccgagtgtgtcaggaagctgtctgggaagccttcaggactttttgggatcgacttcctgggcgtgaggaatatcattactggatgaatttgtgtgaggatggagtcacaagtatatttgaaatgggcacaaattttagtgaatctgtggaacatagaagcttaatcatgaagaaactgacttatgcaaaggaaactgtaagcagctctgaactgtcttctccagttcctgttggtgatacttcaacattgggagacactactctcagtgttccacatccagaggtggacgcctatgaaggtgcctcagagagcagcttggaaaggccagaggagagtattagcaatgaaattgagaatgtgatagaagaagccacaaaaccagcaggtgaacagattgcagaattcagtatccaccttttggggaagcagtacagggaagaactacaggattcctccagctttcaccaccagcaccttgaagaagaatttatttcagaggttgaaaatgcatttactgggttaccaggctacaaggaaattcgtgtacttgaatttaggtcccccaaggaaaatgacagtggcgtagatgtttactatgcagttaccttcaatggtgaggccatcagcaataccacctgggacctcattagccttcactccaacaaggtggaaaaccatggccttgtggaactggatgataaacccactgttgtttatacaatcagtaacttcagagattatattgctgagacattgcagcagaattttttgctggggaactcttccttgaatccagatcctgattccctgcagcttatcaatgtgagaggagttttgcgtcaccaaactgaagatctagtttggaacacccaaagttcaagtcttcaggcaacgccgtcatctattctggataatacctttcaagctgcatggccctcagcagatgaatccatcaccagcagtattccaccacttgatttcagctctggtcctccctcagccactggcagggaactctggtcagaaagtcctttgggtgatttagtgtctacacacaaattagcctttccctcgaagatgggcctcagctcttccccagaggttttagaggttagcagcttgactcttcattctgtcaccccggcagtgcttcagactggcttgcctgtggcttctgaggaaaggacttctggatctcacttggtagaagatggattagccaatgttgaagagtcagaagattttctttctattgattcattgccttcaagttcattcactcaacctgtgccaaaagaaacaataccatccatggaagactctgatgtgtccttaacatcttcaccatatctgacctcttctataccttttggcttggactccttgacctccaaagtcaaagaccaattaaaagtgagccctttcctgccagatgcatccatggaaaaagagttaatatttgacggtggtttaggttcagggtctgggcaaaaggtagatctgattacttggccatggagtgagacttcatcagagaagagcgctgaaccactgtccaagccgtggcttgaagatgatgattcacttttgccagctgagattgaagacaagaaactagttttagttgacaaaatggattccacagaccaaattagtaagcactcaaaatatgaacatgatgacagatccacacactttccagaggaagagcctcttagtgggcctgctgtgcccatcttcgcagatactgcagctgaatctgcgtctctaaccctccccaagcacatatcagaagtacctggtgttgatgattactcagttaccaaagcacctcttatactgacatctgtagcaatctctgcctctactgataaatcagatcaggcagatgccatcctaagggaggatatggaacaaattactgagtcatccaactatgaatggtttgacagtgaggtttcaatggtaaagccagatatgcaaactttgtggactatattgccagaatcagagagagtttggacaagaacttcttccctagagaaattgtccagagacatattggcaagtacaccacagagtgctgacaggctctggttatctgtgacacagtctaccaaattgcctccaaccacaatctccaccctgctagaggatgaagtaattatgggtgtacaggatatttcgttagaactggaccggataggcacagattactatcagcctgagcaagtccaagagcaaaatggcaaggttggtagttatgtggaaatgtcaacaagtgttcactccacagagatggttagtgtggcttggcccacagaaggaggagatgacttgagttatacccagacttcaggagctttggtggttttcttcagcctccgagtgactaacatgatgttttcagaagatctgtttaataaaaactccttggagtataaagccctggagcaaagattcttagaattgctggttccctatctccagtcaaatctcacggggttccagaacttagaaatcctcaacttcagaaatggcagcattgtggtgaacagtcgaatgaagtttgccaattctgtccctcctaacgtcaacaatgcggtgtacatgattctggaagacttttgtaccactgcctacaataccatgaacttggctattgataaatactctcttgatgtggaatcaggtgatgaagccaacccttgcaagtttcaggcctgtaatgaattttcagagtgtctggtcaacccctggagtggagaagcaaagtgcagatgcttccctggatacctgagtgtggaagaacggccctgtcagagtctctgtgacctacagcctgacttctgcttgaatgatggaaagtgtgacattatgcctgggcacggggccatttgtaggtgccgggtgggtgagaactggtggtaccgaggcaagcactgtgaggaatttgtgtctgagcccgtgatcataggcatcactattgcctccgtggttggacttcttgtcatcttttctgctatcatctacttcttcatcaggactctccaagcacaccatgacaggagtgaaagagagagtcccttcagtggctccagcaggcagcctgacagcctctcatctattgagaatgctgtgaagtacaaccccgtgtatgaaagtcacagggctggatgtgagaagtatgagggaccctatcctcagcatcccttctacagctctgctagcggagacgtgattggtgggctgagcagagaagaaatcagacagatgtatgagagcagtgagctttccagagaggaaattcaagagagaatgagagttttggaactgtatgccaatgatcctgagtttgcagcttttgtgagagagcaacaagtggaagaggtttaaccaaaactcctgttctgaaactgattagaagcctggagaagatggagattacttgttacttatgtcatataattaacctggattttaaacactgttggaagaagagttttctatgaaaaaattaaatatagggcacactgtttttttttcagcttaagttttcagaatgtagtaagagatgttaccatttttatttctataaagactgaatgctgtgtttaaataaattgaaaactacgtaaa

SEQ ID NO: 14847 - DNA, 200 bp, Homo sapiens
  source 1..200: mol_type = unassigned DNA
tggatacctgagtgtggaagaacggccctgtcagagtctctgtgacctacagcctgacttctgcttgaatgatggaaagtgtgacattatgcctgggcacggggccatttgtagtggctccagcaggcagcctgacagcctctcatctattgagaatgctgtgaagtacaaccccgtgtatgaaagtcacagggctggat

SEQ ID NO: 14848 - DNA, 3280 bp, Homo sapiens
  source 1..3280: mol_type = unassigned DNA
catggctcagtttccaacaccttttggtggcagcctggatatctgggccataactgtagaggaaagagcgaagcatgatcagcagttccatagtttaaagccaatatctggattcattactggtgatcaagctagaaactttttttttcaatctgggttacctcaacctgttttagcacagatatgggcactagctgacatgaataatgatggaagaatggatcaagtggagttttccatagctatgaaacttatcaaactgaagctacaaggatatcagctaccctctgcacttccccctgtcatgaaacagcaaccagttgctatttctagcgcaccagcatttggtatgggaggtatcgccagcatgccaccgcttacagctgttgctccagtgccaatgggatccattccagttgttggaatgtctccaaccctagtatcttctgttcccacagcagctgtgccccccctggctaacggggctccccctgttatacaacctctgcctgcatttgctcatcctgcagccacattgccaaagagttcttcctttagtagatctggtccagggtcacaactaaacactaaattacaaaaggcacagtcatttgatgtggccagtgtcccaccagtggcagagtgggctgttcctcagtcatcaagactgaaatacaggcaattattcaatagtcatgacaaaactatgagtggacacttaacaggtccccaagcaagaactattcttatgcagtcaagtttaccacaggctcagctggcttcaatatggaatctttctgacattgatcaagatggaaaacttacagcagaggaatttatcctggcaatgcacctcattgatgtagctatgtctggccaaccactgccacctgtcctgcctccagaatacattccaccttcttttagaagagttcgatctggcagtggtatatctgtcataagctcaacatctgtagatcagaggctaccagaggaaccagttttagaagatgaacaacaacaattagaaaagaaattacctgtaacgtttgaagataagaagcgggagaactttgaacgtggcaacctggaactggagaaacgaaggcaagctctcctggaacagcagcgcaaggagcaggagcgcctggcccagctggagcgggcggagcaggagaggaaggagcgtgagcgccaggagcaagagcgcaaaagacaactggaactggagaagcaactggaaaagcagcgggagctagaacggcagagagaggaggagaggaggaaagaaattgagaggcgagaggctgcaaaacgggaacttgaaaggcaacgacaacttgagtgggaacggaatcgaaggcaagaactactaaatcaaagaaacaaagaacaagaggacatagttgtactgaaagcaaagaaaaagactttggaatttgaattagaagctctaaatgataaaaagcatcaactagaagggaaacttcaagatatcagatgtcgattgaccacccaaaggcaagaaattgagagcacaaacaaatctagagagttgagaattgccgaaatcacccatctacagcaacaattacaggaatctcagcaaatgcttggaagacttattccagaaaaacagatactcaatgaccaattaaaacaagttcagcagaacagtttgcacagagattcacttgttacacttaaaagagccttagaagcaaaagaactagctcggcagcacctacgagaccaactggatgaagtggagaaagaaactagatcaaaactacaggagattgatattttcaataatcagctgaaggaactaagagaaatacacaataagcaacaactccagaagcaaaagtccatggaggctgaacgactgaaacagaaagaacaagaacgaaagatcatagaattagaaaaacaaaaagaagaagcccaaagacgagctcaggaaagggacaagcagtggctggagcatgtgcagcaggaggacgagcatcagagaccaagaaaactccacgaagaggaaaaactgaaaagggaggagagtgtcaaaaagaaggatggcgaggaaaaaggcaaacaggaagcacaagacaagctgggtcggcttttccatcaacaccaagaaccagctaagccagctgtccaggcaccctggtccactgcagaaaaaggtccacttaccatttctgcacaggaaaatgtaaaagtggtgtattaccgggcactgtacccctttgaatccagaagccatgatgaaatcactatccagccaggagacatagtcatggtggatgaaagccaaactggagaacccggctggcttggaggagaattaaaaggaaagacagggtggttccctgcaaactatgcagagaaaatcccagaaaatgaggttcccgctccagtgaaaccagtgactgattcaacatctgcccctgcccccaaactggccttgcgtgagacccccgcccctttggcagtaacctcttcagagccctccacgacccctaataactgggccgacttcagctccacgtggcccaccagcacgaatgagaaaccagaaacggataactgggatgcatgggcagcccagccctctctcaccgttccaagtgccggccagttaaggcagaggtccgcctttactccagccacggccactggctcctccccgtctcctgtgctaggccagcatggattctggttcttcagagagtcctgctagtctaaagcgagtagcctctccagcagccaagccggtcgtttcgggagaagaaattgcccaggttattgcctcatacaccgccaccggccccgagcagctcactctcgcccctggtcagctgattttgatccgaaaaaagaacccaggtggatggtgggaaggagagctgcaagcacgtgggaaaaagcgccagataggctggttcccagctaattatgtaaagcttctaagccctgggacgagcaaaatcactccaacagagccacctaagtcaacagcattagcggcagtgtgccaggtgattgggatgtacgactacaccgcgcagaatgacgatgagctggccttcaacaagggccagatcatcaacgtcctcaacaaggaggaccctgactggtggaaaggagaagtcaatggacaagtggggctcttcccatccaattatgtgaagctgaccacagacatggacccaagccagcaatgaatcatatgttgtccatccccccctcaggcttgaaagtcctcaaagagacc

SEQ ID NO: 14849 - DNA, 949 bp, Homo sapiens
  source 1..949: mol_type = unassigned DNA
acccctgatggagtctgagctgctgacagaaaaagaggttgctatgatttttgtgaactggaaggagctgattatgtgtaatatcaaactactaaaagcgctgagagtccgcaagaagatgtccggggagaagatgcctgtgaagatgattggagacatcctgagcgcacagctgccgcacatgcagccctacatccgcttctgcagccgccagctcaacggggctgccctgatccagcagaagacggatgaggccccagacttcaaggagttcgtcaaaagattggcaatggatcctcggtgtaaagggatgccactctctagttttatactgaagcctatgcaacgggtaacaagatacccactgatcattaaaaatcaacttgtgttcaattcagtgaccaattgcttggggccgcgcaaatttctgcacagtgggaagctctacaaggccaagagcaacaaggagctgtatggcttccttttcaacgacttcctcctgctgactcagatcacgaagcctttggggtcttctggcaccgacaaagtcttcagccccaaatcaaacctgcagtataaaatgtataaaacacctattttcctaaatgaggttctagtaaaattacccaccgacccttctggagacgagcccatcttccacatctcccacattgaccgcgtctatactctccgagcagaaagcataaatgaaaggactgcctgggtgcagaaaatcaaagctgcttctgaactctacatagagactgagaaaaagaagcgcgagaaagcgtacctggtccgttcccaaagggcaacaggcattggaaggttgatggtgaacgtggttgaaggcatcgagttgaaaccctgtcggtcacatggaaagagcaacccgtactgtgaggtgaccatgggttcccagtgccacatcaccaagacgatccaggac

SEQ ID NO: 14850 - DNA, 6439 bp, Homo sapiens
  source 1..6439: mol_type = unassigned DNA
gagcgagggagggagcgaaggaggtagagaagagtggaggcgccaggggagggagcgtagcttggttgctccgtagtacggcggctcgcgaggaagaatcccgagcgggctccgggacggacagagaggcgggcggggatggtgtgcggggctgcggctcctgcgtccctcccagcggcgcgtgagcggcactgatttgtccctggggcggcagcgcggacccgcccggagatgaggcgtcgattagcaaggtaaaagtaacagaaccatggctcagtttccaacaccttttggtggcagcctggatatctgggccataactgtagaggaaagagcgaagcatgatcagcagttccatagtttaaagccaatatctggattcattactggtgatcaagctagaaactttttttttcaatctgggttacctcaacctgttttagcacagatatgggcactagctgacatgaataatgatggaagaatggatcaagtggagttttccatagctatgaaacttatcaaactgaagctacaaggatatcagctaccctctgcacttccccctgtcatgaaacagcaaccagttgctatttctagcgcaccagcatttggtatgggaggtatcgccagcatgccaccgcttacagctgttgctccagtgccaatgggatccattccagttgttggaatgtctccaaccctagtatcttctgttcccacagcagctgtgccccccctggctaacggggctccccctgttatacaacctctgcctgcatttgctcatcctgcagccacattgccaaagagttcttcctttagtagatctggtccagggtcacaactaaacactaaattacaaaaggcacagtcatttgatgtggccagtgtcccaccagtggcagagtgggctgttcctcagtcatcaagactgaaatacaggcaattattcaatagtcatgacaaaactatgagtggacacttaacaggtccccaagcaagaactattcttatgcagtcaagtttaccacaggctcagctggcttcaatatggaatctttctgacattgatcaagatggaaaacttacagcagaggaatttatcctggcaatgcacctcattgatgtagctatgtctggccaaccactgccacctgtcctgcctccagaatacattccaccttcttttagaagagttcgatctggcagtggtatatctgtcataagctcaacatctgtagatcagaggctaccagaggaaccagttttagaagatgaacaacaacaattagaaaagaaattacctgtaacgtttgaagataagaagcgggagaactttgaacgtggcaacctggaactggagaaacgaaggcaagctctcctggaacagcagcgcaaggagcaggagcgcctggcccagctggagcgggcggagcaggagaggaaggagcgtgagcgccaggagcaagagcgcaaaagacaactggaactggagaagcaactggaaaagcagcgggagctagaacggcagagagaggaggagaggaggaaagaaattgagaggcgagaggctgcaaaacgggaacttgaaaggcaacgacaacttgagtgggaacggaatcgaaggcaagaactactaaatcaaagaaacaaagaacaagaggacatagttgtactgaaagcaaagaaaaagactttggaatttgaattagaagctctaaatgataaaaagcatcaactagaagggaaacttcaagatatcagatgtcgattgaccacccaaaggcaagaaattgagagcacaaacaaatctagagagttgagaattgccgaaatcacccatctacagcaacaattacaggaatctcagcaaatgcttggaagacttattccagaaaaacagatactcaatgaccaattaaaacaagttcagcagaacagtttgcacagagattcacttgttacacttaaaagagccttagaagcaaaagaactagctcggcagcacctacgagaccaactggatgaagtggagaaagaaactagatcaaaactacaggagattgatattttcaataatcagctgaaggaactaagagaaatacacaataagcaacaactccagaagcaaaagtccatggaggctgaacgactgaaacagaaagaacaagaacgaaagatcatagaattagaaaaacaaaaagaagaagcccaaagacgagctcaggaaagggacaagcagtggctggagcatgtgcagcaggaggacgagcatcagagaccaagaaaactccacgaagaggaaaaactgaaaagggaggagagtgtcaaaaagaaggatggcgaggaaaaaggcaaacaggaagcacaagacaagctgggtcggcttttccatcaacaccaagaaccagctaagccagctgtccaggcaccctggtccactgcagaaaaaggtccacttaccatttctgcacaggaaaatgtaaaagtggtgtattaccgggcactgtacccctttgaatccagaagccatgatgaaatcactatccagccaggagacatagtcatggtaattgggtgctgggtggatgaaagccaaactggagaacccggctggcttggaggagaattaaaaggaaagacagggtggttccctgcaaactatgcagagaaaatcccagaaaatgaggttcccgctccagtgaaaccagtgactgattcaacatctgcccctgcccccaaactggccttgcgtgagacccccgcccctttggcagtaacctcttcagagccctccacgacccctaataactgggccgacttcagctccacgtggcccaccagcacgaatgagaaaccagaaacggataactgggatgcatgggcagcccagccctctctcaccgttccaagtgccggccagttaaggcagaggtccgcctttactccagccacggccactggctcctccccgtctcctgtgctaggccagggtgaaaaggtggaggggctacaagctcaagccctatatccttggagagccaaaaaagacaaccacttaaattttaacaaaaatgatgtcatcaccgtcctggaacagcaagacatgtggtggtttggagaagttcaaggtcagaagggttggttccccaagtcttacgtgaaactcatttcagggcccataaggaagtctacaagcatggattctggttcttcagagagtcctgctagtctaaagcgagtagcctctccagcagccaagccggtcgtttcgggagaagaatttattgccatgtacacttacgagagttctgagcaaggagatttaacctttcagcaaggggatgtgattttggttaccaagaaagatggtgactggtggacaggaacagtgggcgacaaggccggagtcttcccttctaactatgtgaggcttaaagattcagagggctctggaactgctgggaaaacagggagtttaggaaaaaaacctgaaattgcccaggttattgcctcatacaccgccaccggccccgagcagctcactctcgcccctggtcagctgattttgatccgaaaaaagaacccaggtggatggtgggaaggagagctgcaagcacgtgggaaaaagcgccagataggctggttcccagctaattatgtaaagcttctaagccctgggacgagcaaaatcactccaacagagccacctaagtcaacagcattagcggcagtgtgccaggtgattgggatgtacgactacaccgcgcagaatgacgatgagctggccttcaacaagggccagatcatcaacgtcctcaacaaggaggaccctgactggtggaaaggagaagtcaatggacaagtggggctcttcccatccaattatgtgaagctgaccacagacatggacccaagccagcaatggtgttcagacttacatctcttggatatgttgaccccaactgaaagaaagcgacaaggatacatccacgagctcattgtcaccgaggagaactatgtgaatgacctgcagctggtcacagagatttttcaaaaacccctgatggagtctgagctgctgacagaaaaagaggttgctatgatttttgtgaactggaaggagctgattatgtgtaatatcaaactactaaaagcgctgagagtccgcaagaagatgtccggggagaagatgcctgtgaagatgattggagacatcctgagcgcacagctgccgcacatgcagccctacatccgcttctgcagccgccagctcaacggggctgccctgatccagcagaagacggatgaggccccagacttcaaggagttcgtcaaaagattggcaatggatcctcggtgtaaagggatgccactctctagttttatactgaagcctatgcaacgggtaacaagatacccactgatcattaaaaatatcctggaaaacacccctgaaaaccacccggaccacagccacttgaagcacgccctggagaaggcggaagagctctgttcccaggtgaacgaaggggtgcgggagaaggagaactctgaccggctggagtggatccaggcccacgtgcagtgtgaaggcctgtctgagcaacttgtgttcaattcagtgaccaattgcttggggccgcgcaaatttctgcacagtgggaagctctacaaggccaagagcaacaaggagctgtatggcttccttttcaacgacttcctcctgctgactcagatcacgaagcctttggggtcttctggcaccgacaaagtcttcagccccaaatcaaacctgcagtataaaatgtataaaacacctattttcctaaatgaggttctagtaaaattacccaccgacccttctggagacgagcccatcttccacatctcccacattgaccgcgtctatactctccgagcagaaagcataaatgaaaggactgcctgggtgcagaaaatcaaagctgcttctgaactctacatagagactgagaaaaagaagcgcgagaaagcgtacctggtccgttcccaaagggcaacaggcattggaaggttgatggtgaacgtggttgaaggcatcgagttgaaaccctgtcggtcacatggaaagagcaacccgtactgtgaggtgaccatgggttcccagtgccacatcaccaagacgatccaggacactctgaaccccaagtggaattccaactgccagttcttcatccgagacctggagcaggaagtcctctgcatcactgtgttcgagagggaccagttctcaccagatgattttttgggtcggacggagatccgtgtggcggacatcaagaaagaccagggctccaaaggtccagttacgaagtgtcttctgctgcacgaagtccccacgggagagattgtggtccgcttggacctgcagttgtttgatgagccgtaggcagcgggctcagggtgtgctcagcagggtcccagcccacggccacacatgctgtctggaaattgtattccttttctaagaaaccaccatttggtattcagtcacagggatatgggatggcaaagacaggcccctcaaagctcctaggaatcattctcgacaatcctccctgccccgaaacaatttcctgtttcatgaaacaaagctgtgttttcctttgtcctcactacaggtctcattatggcttctagggtcgctgaaatcccatagccctcaacagggtgcagctgggagtctagccccttcccgggcttgagggatgggtctggttactataaaatagatttataaatgcaatgtctatatttttggagaactcatgtaaccctcctgtttcttacatccaccagtccccaagtagacttcttggcctacaatgcccagtccttggtgtgagtttagaaacaattatgacggtcctgtcattgcttcagaatcccatctctcctgcagggaaatgctgcctagagctgatcactcggtgagacggtctgatcaggccctggcttagctctttgaagagctggtctatggaagtttccagcatgtgcaccgttatagccgttccttccccctctaggccttgtattaatatatgtcaatgaaaacacactggtgtattgttgcgtggattcagttctgattcccagcatgcttagaatatggtcacagaaagtcattatctagaaagtcacccctctgctggatcagatcactacaggtcactggaaaggcaactttacaatgttgggtcactgggtctcggttggcagccatgttggaaaaatctcttttggctcggaggcctgtgatatttcatagcagcagtcgttgctggtgacctgttctgtgcttgaatgtgctgaatcctgattgttgtaggacatttcaacagctctttttggtacgttccccaaaaagccatgtcctagatccccaaggcgt

SEQ ID NO: 14851 - DNA, 6226 bp, Homo sapiens
  source 1..6226: mol_type = unassigned DNA
gagcgagggagggagcgaaggaggtagagaagagtggaggcgccaggggagggagcgtagcttggttgctccgtagtacggcggctcgcgaggaagaatcccgagcgggctccgggacggacagagaggcgggcggggatggtgtgcggggctgcggctcctgcgtccctcccagcggcgcgtgagcggcactgatttgtccctggggcggcagcgcggacccgcccggagatgaggcgtcgattagcaaggtaaaagtaacagaaccatggctcagtttccaacaccttttggtggcagcctggatatctgggccataactgtagaggaaagagcgaagcatgatcagcagttccatagtttaaagccaatatctggattcattactggtgatcaagctagaaactttttttttcaatctgggttacctcaacctgttttagcacagatatgggcactagctgacatgaataatgatggaagaatggatcaagtggagttttccatagctatgaaacttatcaaactgaagctacaaggatatcagctaccctctgcacttccccctgtcatgaaacagcaaccagttgctatttctagcgcaccagcatttggtatgggaggtatcgccagcatgccaccgcttacagctgttgctccagtgccaatgggatccattccagttgttggaatgtctccaaccctagtatcttctgttcccacagcagctgtgccccccctggctaacggggctccccctgttatacaacctctgcctgcatttgctcatcctgcagccacattgccaaagagttcttcctttagtagatctggtccagggtcacaactaaacactaaattacaaaaggcacagtcatttgatgtggccagtgtcccaccagtggcagagtgggctgttcctcagtcatcaagactgaaatacaggcaattattcaatagtcatgacaaaactatgagtggacacttaacaggtccccaagcaagaactattcttatgcagtcaagtttaccacaggctcagctggcttcaatatggaatctttctgacattgatcaagatggaaaacttacagcagaggaatttatcctggcaatgcacctcattgatgtagctatgtctggccaaccactgccacctgtcctgcctccagaatacattccaccttcttttagaagagttcgatctggcagtggtatatctgtcataagctcaacatctgtagatcagaggctaccagaggaaccagttttagaagatgaacaacaacaattagaaaagaaattacctgtaacgtttgaagataagaagcgggagaactttgaacgtggcaacctggaactggagaaacgaaggcaagctctcctggaacagcagcgcaaggagcaggagcgcctggcccagctggagcgggcggagcaggagaggaaggagcgtgagcgccaggagcaagagcgcaaaagacaactggaactggagaagcaactggaaaagcagcgggagctagaacggcagagagaggaggagaggaggaaagaaattgagaggcgagaggctgcaaaacgggaacttgaaaggcaacgacaacttgagtgggaacggaatcgaaggcaagaactactaaatcaaagaaacaaagaacaagaggacatagttgtactgaaagcaaagaaaaagactttggaatttgaattagaagctctaaatgataaaaagcatcaactagaagggaaacttcaagatatcagatgtcgattgaccacccaaaggcaagaaattgagagcacaaacaaatctagagagttgagaattgccgaaatcacccatctacagcaacaattacaggaatctcagcaaatgcttggaagacttattccagaaaaacagatactcaatgaccaattaaaacaagttcagcagaacagtttgcacagagattcacttgttacacttaaaagagccttagaagcaaaagaactagctcggcagcacctacgagaccaactggatgaagtggagaaagaaactagatcaaaactacaggagattgatattttcaataatcagctgaaggaactaagagaaatacacaataagcaacaactccagaagcaaaagtccatggaggctgaacgactgaaacagaaagaacaagaacgaaagatcatagaattagaaaaacaaaaagaagaagcccaaagacgagctcaggaaagggacaagcagtggctggagcatgtgcagcaggaggacgagcatcagagaccaagaaaactccacgaagaggaaaaactgaaaagggaggagagtgtcaaaaagaaggatggcgaggaaaaaggcaaacaggaagcacaagacaagctgggtcggcttttccatcaacaccaagaaccagctaagccagctgtccaggcaccctggtccactgcagaaaaaggtccacttaccatttctgcacaggaaaatgtaaaagtggtgtattaccgggcactgtacccctttgaatccagaagccatgatgaaatcactatccagccaggagacatagtcatggtaattgggtgctgggtggatgaaagccaaactggagaacccggctggcttggaggagaattaaaaggaaagacagggtggttccctgcaaactatgcagagaaaatcccagaaaatgaggttcccgctccagtgaaaccagtgactgattcaacatctgcccctgcccccaaactggccttgcgtgagacccccgcccctttggcagtaacctcttcagagccctccacgacccctaataactgggccgacttcagctccacgtggcccaccagcacgaatgagaaaccagaaacggataactgggatgcatgggcagcccagccctctctcaccgttccaagtgccggccagttaaggcagaggtccgcctttactccagccacggccactggctcctccccgtctcctgtgctaggccagggtgaaaaggtggaggggctacaagctcaagccctatatccttggagagccaaaaaagacaaccacttaaattttaacaaaaatgatgtcatcaccgtcctggaacagcaagacatgtggtggtttggagaagttcaaggtcagaagggttggttccccaagtcttacgtgaaactcatttcagggcccataaggaagtctacaagcatggattctggttcttcagagagtcctgctagtctaaagcgagtagcctctccagcagccaagccggtcgtttcgggagaagaaattgcccaggttattgcctcatacaccgccaccggccccgagcagctcactctcgcccctggtcagctgattttgatccgaaaaaagaacccaggtggatggtgggaaggagagctgcaagcacgtgggaaaaagcgccagataggctggttcccagctaattatgtaaagcttctaagccctgggacgagcaaaatcactccaacagagccacctaagtcaacagcattagcggcagtgtgccaggtgattgggatgtacgactacaccgcgcagaatgacgatgagctggccttcaacaagggccagatcatcaacgtcctcaacaaggaggaccctgactggtggaaaggagaagtcaatggacaagtggggctcttcccatccaattatgtgaagctgaccacagacatggacccaagccagcaatggtgttcagacttacatctcttggatatgttgaccccaactgaaagaaagcgacaaggatacatccacgagctcattgtcaccgaggagaactatgtgaatgacctgcagctggtcacagagatttttcaaaaacccctgatggagtctgagctgctgacagaaaaagaggttgctatgatttttgtgaactggaaggagctgattatgtgtaatatcaaactactaaaagcgctgagagtccgcaagaagatgtccggggagaagatgcctgtgaagatgattggagacatcctgagcgcacagctgccgcacatgcagccctacatccgcttctgcagccgccagctcaacggggctgccctgatccagcagaagacggatgaggccccagacttcaaggagttcgtcaaaagattggcaatggatcctcggtgtaaagggatgccactctctagttttatactgaagcctatgcaacgggtaacaagatacccactgatcattaaaaatatcctggaaaacacccctgaaaaccacccggaccacagccacttgaagcacgccctggagaaggcggaagagctctgttcccaggtgaacgaaggggtgcgggagaaggagaactctgaccggctggagtggatccaggcccacgtgcagtgtgaaggcctgtctgagcaacttgtgttcaattcagtgaccaattgcttggggccgcgcaaatttctgcacagtgggaagctctacaaggccaagagcaacaaggagctgtatggcttccttttcaacgacttcctcctgctgactcagatcacgaagcctttggggtcttctggcaccgacaaagtcttcagccccaaatcaaacctgcagtataaaatgtataaaacacctattttcctaaatgaggttctagtaaaattacccaccgacccttctggagacgagcccatcttccacatctcccacattgaccgcgtctatactctccgagcagaaagcataaatgaaaggactgcctgggtgcagaaaatcaaagctgcttctgaactctacatagagactgagaaaaagaagcgcgagaaagcgtacctggtccgttcccaaagggcaacaggcattggaaggttgatggtgaacgtggttgaaggcatcgagttgaaaccctgtcggtcacatggaaagagcaacccgtactgtgaggtgaccatgggttcccagtgccacatcaccaagacgatccaggacactctgaaccccaagtggaattccaactgccagttcttcatccgagacctggagcaggaagtcctctgcatcactgtgttcgagagggaccagttctcaccagatgattttttgggtcggacggagatccgtgtggcggacatcaagaaagaccagggctccaaaggtccagttacgaagtgtcttctgctgcacgaagtccccacgggagagattgtggtccgcttggacctgcagttgtttgatgagccgtaggcagcgggctcagggtgtgctcagcagggtcccagcccacggccacacatgctgtctggaaattgtattccttttctaagaaaccaccatttggtattcagtcacagggatatgggatggcaaagacaggcccctcaaagctcctaggaatcattctcgacaatcctccctgccccgaaacaatttcctgtttcatgaaacaaagctgtgttttcctttgtcctcactacaggtctcattatggcttctagggtcgctgaaatcccatagccctcaacagggtgcagctgggagtctagccccttcccgggcttgagggatgggtctggttactataaaatagatttataaatgcaatgtctatatttttggagaactcatgtaaccctcctgtttcttacatccaccagtccccaagtagacttcttggcctacaatgcccagtccttggtgtgagtttagaaacaattatgacggtcctgtcattgcttcagaatcccatctctcctgcagggaaatgctgcctagagctgatcactcggtgagacggtctgatcaggccctggcttagctctttgaagagctggtctatggaagtttccagcatgtgcaccgttatagccgttccttccccctctaggccttgtattaatatatgtcaatgaaaacacactggtgtattgttgcgtggattcagttctgattcccagcatgcttagaatatggtcacagaaagtcattatctagaaagtcacccctctgctggatcagatcactacaggtcactggaaaggcaactttacaatgttgggtcactgggtctcggttggcagccatgttggaaaaatctcttttggctcggaggcctgtgatatttcatagcagcagtcgttgctggtgacctgttctgtgcttgaatgtgctgaatcctgattgttgtaggacatttcaacagctctttttggtacgttccccaaaaagccatgtcctagatccccaaggcgt

SEQ ID NO: 14852 - DNA, 3505 bp, Homo sapiens
  source 1..3505: mol_type = unassigned DNA
gagcgagggagggagcgaaggaggtagagaagagtggaggcgccaggggagggagcgtagcttggttgctccgtagtacggcggctcgcgaggaagaatcccgagcgggctccgggacggacagagaggcgggcggggatggtgtgcggggctgcggctcctgcgtccctcccagcggcgcgtgagcggcactgatttgtccctggggcggcagcgcggacccgcccggagatgaggcgtcgattagcaaggtaaaagtaacagaaccatggctcagtttccaacaccttttggtggcagcctggatatctgggccataactgtagaggaaagagcgaagcatgatcagcagttccatagtttaaagccaatatctggattcattactggtgatcaagctagaaactttttttttcaatctgggttacctcaacctgttttagcacagatatgggcactagctgacatgaataatgatggaagaatggatcaagtggagttttccatagctatgaaacttatcaaactgaagctacaaggatatcagctaccctctgcacttccccctgtcatgaaacagcaaccagttgctatttctagcgcaccagcatttggtatgggaggtatcgccagcatgccaccgcttacagctgttgctccagtgccaatgggatccattccagttgttggaatgtctccaaccctagtatcttctgttcccacagcagctgtgccccccctggctaacggggctccccctgttatacaacctctgcctgcatttgctcatcctgcagccacattgccaaagagttcttcctttagtagatctggtccagggtcacaactaaacactaaattacaaaaggcacagtcatttgatgtggccagtgtcccaccagtggcagagtgggctgttcctcagtcatcaagactgaaatacaggcaattattcaatagtcatgacaaaactatgagtggacacttaacaggtccccaagcaagaactattcttatgcagtcaagtttaccacaggctcagctggcttcaatatggaatctttctgacattgatcaagatggaaaacttacagcagaggaatttatcctggcaatgcacctcattgatgtagctatgtctggccaaccactgccacctgtcctgcctccagaatacattccaccttcttttagaagagttcgatctggcagtggtatatctgtcataagctcaacatctgtagatcagaggctaccagaggaaccagttttagaagatgaacaacaacaattagaaaagaaattacctgtaacgtttgaagataagaagcgggagaactttgaacgtggcaacctggaactggagaaacgaaggcaagctctcctggaacagcagcgcaaggagcaggagcgcctggcccagctggagcgggcggagcaggagaggaaggagcgtgagcgccaggagcaagagcgcaaaagacaactggaactggagaagcaactggaaaagcagcgggagctagaacggcagagagaggaggagaggaggaaagaaattgagaggcgagaggctgcaaaacgggaacttgaaaggcaacgacaacttgagtgggaacggaatcgaaggcaagaactactaaatcaaagaaacaaagaacaagaggacatagttgtactgaaagcaaagaaaaagactttggaatttgaattagaagctctaaatgataaaaagcatcaactagaagggaaacttcaagatatcagatgtcgattgaccacccaaaggcaagaaattgagagcacaaacaaatctagagagttgagaattgccgaaatcacccatctacagcaacaattacaggaatctcagcaaatgcttggaagacttattccagaaaaacagatactcaatgaccaattaaaacaagttcagcagaacagtttgcacagagattcacttgttacacttaaaagagccttagaagcaaaagaactagctcggcagcacctacgagaccaactggatgaagtggagaaagaaactagatcaaaactacaggagattgatattttcaataatcagctgaaggaactaagagaaatacacaataagcaacaactccagaagcaaaagtccatggaggctgaacgactgaaacagaaagaacaagaacgaaagatcatagaattagaaaaacaaaaagaagaagcccaaagacgagctcaggaaagggacaagcagtggctggagcatgtgcagcaggaggacgagcatcagagaccaagaaaactccacgaagaggaaaaactgaaaagggaggagagtgtcaaaaagaaggatggcgaggaaaaaggcaaacaggaagcacaagacaagctgggtcggcttttccatcaacaccaagaaccagctaagccagctgtccaggcaccctggtccactgcagaaaaaggtccacttaccatttctgcacaggaaaatgtaaaagtggtgtattaccgggcactgtacccctttgaatccagaagccatgatgaaatcactatccagccaggagacatagtcatggtggatgaaagccaaactggagaacccggctggcttggaggagaattaaaaggaaagacagggtggttccctgcaaactatgcagagaaaatcccagaaaatgaggttcccgctccagtgaaaccagtgactgattcaacatctgcccctgcccccaaactggccttgcgtgagacccccgcccctttggcagtaacctcttcagagccctccacgacccctaataactgggccgacttcagctccacgtggcccaccagcacgaatgagaaaccagaaacggataactgggatgcatgggcagcccagccctctctcaccgttccaagtgccggccagttaaggcagaggtccgcctttactccagccacggccactggctcctccccgtctcctgtgctaggccagggtgaaaaggtggaggggctacaagctcaagccctatatccttggagagccaaaaaagacaaccacttaaattttaacaaaaatgatgtcatcaccgtcctggaacagcaagacatgtggtggtttggagaagttcaaggtcagaagggttggttccccaagtcttacgtgaaactcatttcagggcccataaggaagtctacaagcatggattctggttcttcagagagtcctgctagtctaaagcgagtagcctctccagcagccaagccggtcgtttcgggagaagaatttattgccatgtacacttacgagagttctgagcaaggagatttaacctttcagcaaggggatgtgattttggttaccaagaaagatggtgactggtggacaggaacagtgggcgacaaggccggagtcttcccttctaactatgtgaggcttaaagattcagagggctctggaactgctgggaaaacagggagtttaggaaaaaaacctggtccctcctgtaacgtgaaataa

SEQ ID NO: 14853 - DNA, 5437 bp, Homo sapiens
  source 1..5437: mol_type = unassigned DNA
gagcgagggagggagcgaaggaggtagagaagagtggaggcgccaggggagggagcgtagcttggttgctccgtagtacggcggctcgcgaggaagaatcccgagcgggctccgggacggacagagaggcgggcggggatggtgtgcggggctgcggctcctgcgtccctcccagcggcgcgtgagcggcactgatttgtccctggggcggcagcgcggacccgcccggagatgaggcgtcgattagcaaggtaaaagtaacagaaccatggctcagtttccaacaccttttggtggcagcctggatatctgggccataactgtagaggaaagagcgaagcatgatcagcagttccatagtttaaagccaatatctggattcattactggtgatcaagctagaaactttttttttcaatctgggttacctcaacctgttttagcacagatatgggcactagctgacatgaataatgatggaagaatggatcaagtggagttttccatagctatgaaacttatcaaactgaagctacaaggatatcagctaccctctgcacttccccctgtcatgaaacagcaaccagttgctatttctagcgcaccagcatttggtatgggaggtatcgccagcatgccaccgcttacagctgttgctccagtgccaatgggatccattccagttgttggaatgtctccaaccctagtatcttctgttcccacagcagctgtgccccccctggctaacggggctccccctgttatacaacctctgcctgcatttgctcatcctgcagccacattgccaaagagttcttcctttagtagatctggtccagggtcacaactaaacactaaattacaaaaggcacagtcatttgatgtggccagtgtcccaccagtggcagagtgggctgttcctcagtcatcaagactgaaatacaggcaattattcaatagtcatgacaaaactatgagtggacacttaacaggtccccaagcaagaactattcttatgcagtcaagtttaccacaggctcagctggcttcaatatggaatctttctgacattgatcaagatggaaaacttacagcagaggaatttatcctggcaatgcacctcattgatgtagctatgtctggccaaccactgccacctgtcctgcctccagaatacattccaccttcttttagaagagttcgatctggcagtggtatatctgtcataagctcaacatctgtagatcagaggctaccagaggaaccagttttagaagatgaacaacaacaattagaaaagaaattacctgtaacgtttgaagataagaagcgggagaactttgaacgtggcaacctggaactggagaaacgaaggcaagctctcctggaacagcagcgcaaggagcaggagcgcctggcccagctggagcgggcggagcaggagaggaaggagcgtgagcgccaggagcaagagcgcaaaagacaactggaactggagaagcaactggaaaagcagcgggagctagaacggcagagagaggaggagaggaggaaagaaattgagaggcgagaggctgcaaaacgggaacttgaaaggcaacgacaacttgagtgggaacggaatcgaaggcaagaactactaaatcaaagaaacaaagaacaagaggacatagttgtactgaaagcaaagaaaaagactttggaatttgaattagaagctctaaatgataaaaagcatcaactagaagggaaacttcaagatatcagatgtcgattgaccacccaaaggcaagaaattgagagcacaaacaaatctagagagttgagaattgccgaaatcacccatctacagcaacaattacaggaatctcagcaaatgcttggaagacttattccagaaaaacagatactcaatgaccaattaaaacaagttcagcagaacagtttgcacagagattcacttgttacacttaaaagagccttagaagcaaaagaactagctcggcagcacctacgagaccaactggatgaagtggagaaagaaactagatcaaaactacaggagattgatattttcaataatcagctgaaggaactaagagaaatacacaataagcaacaactccagaagcaaaagtccatggaggctgaacgactgaaacagaaagaacaagaacgaaagatcatagaattagaaaaacaaaaagaagaagcccaaagacgagctcaggaaagggacaagcagtggctggagcatgtgcagcaggaggacgagcatcagagaccaagaaaactccacgaagaggaaaaactgaaaagggaggagagtgtcaaaaagaaggatggcgaggaaaaaggcaaacaggaagcacaagacaagctgggtcggcttttccatcaacaccaagaaccagctaagccagctgtccaggcaccctggtccactgcagaaaaaggtccacttaccatttctgcacaggaaaatgtaaaagtggtgtattaccgggcactgtacccctttgaatccagaagccatgatgaaatcactatccagccaggagacatagtcatggttaaaggggaatgggtggatgaaagccaaactggagaacccggctggcttggaggagaattaaaaggaaagacagggtggttccctgcaaactatgcagagaaaatcccagaaaatgaggttcccgctccagtgaaaccagtgactgattcaacatctgcccctgcccccaaactggccttgcgtgagacccccgcccctttggcagtaacctcttcagagccctccacgacccctaataactgggccgacttcagctccacgtggcccaccagcacgaatgagaaaccagaaacggataactgggatgcatgggcagcccagccctctctcaccgttccaagtgccggccagttaaggcagaggtccgcctttactccagccacggccactggctcctccccgtctcctgtgctaggccagggtgaaaaggtggaggggctacaagctcaagccctatatccttggagagccaaaaaagacaaccacttaaattttaacaaaaatgatgtcatcaccgtcctggaacagcaagacatgtggtggtttggagaagttcaaggtcagaagggttggttccccaagtcttacgtgaaactcatttcagggcccataaggaagtctacaagcatggattctggttcttcagagagtcctgctagtctaaagcgagtagcctctccagcagccaagccggtcgtttcgggagaagaatttattgccatgtacacttacgagagttctgagcaaggagatttaacctttcagcaaggggatgtgattttggttaccaagaaagatggtgactggtggacaggaacagtgggcgacaaggccggagtcttcccttctaactatgtgaggcttaaagattcagagggctctggaactgctgggaaaacagggagtttaggaaaaaaacctgaaattgcccaggttattgcctcatacaccgccaccggccccgagcagctcactctcgcccctggtcagctgattttgatccgaaaaaagaacccaggtggatggtgggaaggagagctgcaagcacgtgggaaaaagcgccagataggctggttcccagctaattatgtaaagcttctaagccctgggacgagcaaaatcactccaacagagccacctaagtcaacagcattagcggcagtgtgccaggtgattgggatgtacgactacaccgcgcagaatgacgatgagctggccttcaacaagggccagatcatcaacgtcctcaacaaggaggaccctgactggtggaaaggagaagtcaatggacaagtggggctcttcccatccaattatgtgaagctgaccacagacatggacccaagccagcaatgaatcatatgttgtccatccccccctcaggcttgaaagtcctcaaagagacccactatcccatatcactgcccagagggatgatgggagatgcagccttgatcatgtgacttccagcatgatcacctactgccttctgagtagaagaactcactgcagagcagtttacctcattttaccttagttgcatgtgatcgcaatgtttgagttattacttgcagagataggagcaaaaattacaaaaacacacagggtagtgggtccttttgtggctttcctagttactcaaattgactttcccccacctttgcacaggtgctttcaatagttttaaaattatttttaaatatatattttagctttttaataaacaaaataaataaatgacttctttgctattttggttttgcaaaaagacccactatcaaggaatgctgcatgtgctattaaaaattgttccaaatgtccataaatctgagacttgatgtattttttcattttgtccagtgttaccaactaaattgtgcagtttggggcttttcccccttaccatagaagtgcagaggagttcagtatctctgttttaaagacgtatagaatgagcccaattaaagcgaaggtgtttgtgcttgtttgtgtgtatcagctgtaccttgttgagcatgtaatacatcctgtacataagaaattagttctttccatggcaaagctattaccttgtacgatgctctaatcatattgcatttaattttattttgcacagtgaccttgtagccacatgagaaagcactctgtgtttttgttcggtctcagatttatctggttgagttggtgttttgtttggggtttttaattttgcgtgtttgcatagcataaaatcagtagacaacaccactgaggtcgttacgatcaacgatatccacagtctctttttagtctctgttacatgaagttttattccagttacttttcatggaatgacctattttgaacaagtaattttcttgacaagaaagaatgtatagaagtctccctgcaattaatttccaatgtttacattttttaactagactgtggaatttctacagattaatatgaaatggagctcatggtccgtttgtgtgttagatatgctgtagctgaagccctgtttgtcttttaaacactagttggaagctctcaataaaaatgcctgctgctcacagcacagaaaatggggcagggggagcctcaagcacaatctagctgtcctcctaaagactctgtaatgctcactcccctcgcgttctcccggcgctgtcgggaggctgtgctggtggtcgtgtagaggtccttctcctttcacatggtgcagagagcgaggacctctcctcctcgttcagttgcacttcagtattttcacggatatgaatgtaaaatatataaatatataaacctgcggctttaacaactgtaatacaaccttttgaattagttccgtgtatagataattaaattcttcatacaaaa

SEQ ID NO: 14854 - DNA, 17015 bp, Homo sapiens
  source 1..17015: mol_type = unassigned DNA
ggagataggcgggagcgagggagcgagggagggagcgaaggaggtagagaagagtggaggcgccaggggagggagcgtagcttggttgctccgtagtacggcggctcgcgaggaagaatcccgagcgggctccgggacggacagagaggcgggcggggatggtgtgcggggctgcggctcctgcgtccctcccagcggcgcgtgagcggcactgatttgtccctggggcggcagcgcggacccgcccggagatgaggcgtcgattagcaaggtaaaagtaacagaaccatggctcagtttccaacaccttttggtggcagcctggatatctgggccataactgtagaggaaagagcgaagcatgatcagcagttccatagtttaaagccaatatctggattcattactggtgatcaagctagaaactttttttttcaatctgggttacctcaacctgttttagcacagatatgggcactagctgacatgaataatgatggaagaatggatcaagtggagttttccatagctatgaaacttatcaaactgaagctacaaggatatcagctaccctctgcacttccccctgtcatgaaacagcaaccagttgctatttctagcgcaccagcatttggtatgggaggtatcgccagcatgccaccgcttacagctgttgctccagtgccaatgggatccattccagttgttggaatgtctccaaccctagtatcttctgttcccacagcagctgtgccccccctggctaacggggctccccctgttatacaacctctgcctgcatttgctcatcctgcagccacattgccaaagagttcttcctttagtagatctggtccagggtcacaactaaacactaaattacaaaaggcacagtcatttgatgtggccagtgtcccaccagtggcagagtgggctgttcctcagtcatcaagactgaaatacaggcaattattcaatagtcatgacaaaactatgagtggacacttaacaggtccccaagcaagaactattcttatgcagtcaagtttaccacaggctcagctggcttcaatatggaatctttctgacattgatcaagatggaaaacttacagcagaggaatttatcctggcaatgcacctcattgatgtagctatgtctggccaaccactgccacctgtcctgcctccagaatacattccaccttcttttagaagagttcgatctggcagtggtatatctgtcataagctcaacatctgtagatcagaggctaccagaggaaccagttttagaagatgaacaacaacaattagaaaagaaattacctgtaacgtttgaagataagaagcgggagaactttgaacgtggcaacctggaactggagaaacgaaggcaagctctcctggaacagcagcgcaaggagcaggagcgcctggcccagctggagcgggcggagcaggagaggaaggagcgtgagcgccaggagcaagagcgcaaaagacaactggaactggagaagcaactggaaaagcagcgggagctagaacggcagagagaggaggagaggaggaaagaaattgagaggcgagaggctgcaaaacgggaacttgaaaggcaacgacaacttgagtgggaacggaatcgaaggcaagaactactaaatcaaagaaacaaagaacaagaggacatagttgtactgaaagcaaagaaaaagactttggaatttgaattagaagctctaaatgataaaaagcatcaactagaagggaaacttcaagatatcagatgtcgattgaccacccaaaggcaagaaattgagagcacaaacaaatctagagagttgagaattgccgaaatcacccatctacagcaacaattacaggaatctcagcaaatgcttggaagacttattccagaaaaacagatactcaatgaccaattaaaacaagttcagcagaacagtttgcacagagattcacttgttacacttaaaagagccttagaagcaaaagaactagctcggcagcacctacgagaccaactggatgaagtggagaaagaaactagatcaaaactacaggagattgatattttcaataatcagctgaaggaactaagagaaatacacaataagcaacaactccagaagcaaaagtccatggaggctgaacgactgaaacagaaagaacaagaacgaaagatcatagaattagaaaaacaaaaagaagaagcccaaagacgagctcaggaaagggacaagcagtggctggagcatgtgcagcaggaggacgagcatcagagaccaagaaaactccacgaagaggaaaaactgaaaagggaggagagtgtcaaaaagaaggatggcgaggaaaaaggcaaacaggaagcacaagacaagctgggtcggcttttccatcaacaccaagaaccagctaagccagctgtccaggcaccctggtccactgcagaaaaaggtccacttaccatttctgcacaggaaaatgtaaaagtggtgtattaccgggcactgtacccctttgaatccagaagccatgatgaaatcactatccagccaggagacatagtcatggttaaaggggaatgggtggatgaaagccaaactggagaacccggctggcttggaggagaattaaaaggaaagacagggtggttccctgcaaactatgcagagaaaatcccagaaaatgaggttcccgctccagtgaaaccagtgactgattcaacatctgcccctgcccccaaactggccttgcgtgagacccccgcccctttggcagtaacctcttcagagccctccacgacccctaataactgggccgacttcagctccacgtggcccaccagcacgaatgagaaaccagaaacggataactgggatgcatgggcagcccagccctctctcaccgttccaagtgccggccagttaaggcagaggtccgcctttactccagccacggccactggctcctccccgtctcctgtgctaggccagggtgaaaaggtggaggggctacaagctcaagccctatatccttggagagccaaaaaagacaaccacttaaattttaacaaaaatgatgtcatcaccgtcctggaacagcaagacatgtggtggtttggagaagttcaaggtcagaagggttggttccccaagtcttacgtgaaactcatttcagggcccataaggaagtctacaagcatggattctggttcttcagagagtcctgctagtctaaagcgagtagcctctccagcagccaagccggtcgtttcgggagaagaatttattgccatgtacacttacgagagttctgagcaaggagatttaacctttcagcaaggggatgtgattttggttaccaagaaagatggtgactggtggacaggaacagtgggcgacaaggccggagtcttcccttctaactatgtgaggcttaaagattcagagggctctggaactgctgggaaaacagggagtttaggaaaaaaacctgaaattgcccaggttattgcctcatacaccgccaccggccccgagcagctcactctcgcccctggtcagctgattttgatccgaaaaaagaacccaggtggatggtgggaaggagagctgcaagcacgtgggaaaaagcgccagataggctggttcccagctaattatgtaaagcttctaagccctgggacgagcaaaatcactccaacagagccacctaagtcaacagcattagcggcagtgtgccaggtgattgggatgtacgactacaccgcgcagaatgacgatgagctggccttcaacaagggccagatcatcaacgtcctcaacaaggaggaccctgactggtggaaaggagaagtcaatggacaagtggggctcttcccatccaattatgtgaagctgaccacagacatggacccaagccagcaatggtgttcagacttacatctcttggatatgttgaccccaactgaaagaaagcgacaaggatacatccacgagctcattgtcaccgaggagaactatgtgaatgacctgcagctggtcacagagatttttcaaaaacccctgatggagtctgagctgctgacagaaaaagaggttgctatgatttttgtgaactggaaggagctgattatgtgtaatatcaaactactaaaagcgctgagagtccgcaagaagatgtccggggagaagatgcctgtgaagatgattggagacatcctgagcgcacagctgccgcacatgcagccctacatccgcttctgcagccgccagctcaacggggctgccctgatccagcagaagacggatgaggccccagacttcaaggagttcgtcaaaagattggcaatggatcctcggtgtaaagggatgccactctctagttttatactgaagcctatgcaacgggtaacaagatacccactgatcattaaaaatatcctggaaaacacccctgaaaaccacccggaccacagccacttgaagcacgccctggagaaggcggaagagctctgttcccaggtgaacgaaggggtgcgggagaaggagaactctgaccggctggagtggatccaggcccacgtgcagtgtgaaggcctgtctgagcaacttgtgttcaattcagtgaccaattgcttggggccgcgcaaatttctgcacagtgggaagctctacaaggccaagagcaacaaggagctgtatggcttccttttcaacgacttcctcctgctgactcagatcacgaagcctttggggtcttctggcaccgacaaagtcttcagccccaaatcaaacctgcagtataaaatgtataaaacacctattttcctaaatgaggttctagtaaaattacccaccgacccttctggagacgagcccatcttccacatctcccacattgaccgcgtctatactctccgagcagaaagcataaatgaaaggactgcctgggtgcagaaaatcaaagctgcttctgaactctacatagagactgagaaaaagaagcgcgagaaagcgtacctggtccgttcccaaagggcaacaggcattggaaggttgatggtgaacgtggttgaaggcatcgagttgaaaccctgtcggtcacatggaaagagcaacccgtactgtgaggtgaccatgggttcccagtgccacatcaccaagacgatccaggacactctgaaccccaagtggaattccaactgccagttcttcatccgagacctggagcaggaagtcctctgcatcactgtgttcgagagggaccagttctcaccagatgattttttgggtcggacggagatccgtgtggcggacatcaagaaagaccagggctccaaaggtccagttacgaagtgtcttctgctgcacgaagtccccacgggagagattgtggtccgcttggacctgcagttgtttgatgagccgtaggcagcgggctcagggtgtgctcagcagggtcccagcccacggccacacatgctgtctggaaattgtattccttttctaagaaaccaccatttggtattcagtcacagggatatgggatggcaaagacaggcccctcaaagctcctaggaatcattctcgacaatcctccctgccccgaaacaatttcctgtttcatgaaacaaagctgtgttttcctttgtcctcactacaggtctcattatggcttctagggtcgctgaaatcccatagccctcaacagggtgcagctgggagtctagccccttcccgggcttgagggatgggtctggttactataaaatagatttataaatgcaatgtctatatttttggagaactcatgtaaccctcctgtttcttacatccaccagtccccaagtagacttcttggcctacaatgcccagtccttggtgtgagtttagaaacaattatgacggtcctgtcattgcttcagaatcccatctctcctgcagggaaatgctgcctagagctgatcactcggtgagacggtctgatcaggccctggcttagctctttgaagagctggtctatggaagtttccagcatgtgcaccgttatagccgttccttccccctctaggccttgtattaatatatgtcaatgaaaacacactggtgtattgttgcgtggattcagttctgattcccagcatgcttagaatatggtcacagaaagtcattatctagaaagtcacccctctgctggatcagatcactacaggtcactggaaaggcaactttacaatgttgggtcactgggtctcggttggcagccatgttggaaaaatctcttttggctcggaggcctgtgatatttcatagcagcagtcgttgctggtgacctgttctgtgcttgaatgtgctgaatcctgattgttgtaggacatttcaacagctctttttggtacgttccccaaaaagccatgtcctagatccccaaggcgtgaaaaggaaaaatatcaagctggaggttgggaaagaaaatgaaggcagtccattatgtggtgggtgaaagaccctaggaggatgcaagccccgcacatcccggggcaaagacctaagacacttttccaccctccaccaccccaacctcacataatatgcttgttgcaagagtcaggactttatgactatgtgccaagctgtttggtttgagttctttaatttttttttcccttaaatgccaggagatcatctggttagttagatagtaacttgatttgctaatgaaaagtgggggccgtgttttgtttgcatgttaatattctcataatcctagtttgttgtggtcatgaaatgtcctttgcatgttctgttggtactggagtctagctttcctgtactagatggtgttctctttgattgtaggtccttagactttaattagggttatcaaagtgctttctaaatgatagcatcagcgttgtggcagagtacctcctttgctgggaactgaatgtgtagtgttatcatttcccatgagagcccggtcatacttcaagcaatttttttaaaagtgtgtgttggaaaggacaacaaagtttacatttcatacttttaagaaatactttattatttatttattgaagatagtgtagaattttgtatcaagaacaacagacataagtattttttgaaacaagcaaatataccctgtagttagaaactttcaactgaacatgttagagaccaagtttaacttcaggcatgcatttgtttaccatttcccagcagaaaacatggttaaaatactttaagtttatattttttgatgttgttaagaaacttttaaattaaatctataaatagacatgcaactcatgctttcctatttctataaccaacaccgtttgtttagtgtatttatgaaagatatgctaccatggtagaaagaaaagtattcaatgtgtaaatggggtagtgtgggtcaccattccgatctctttttgttttctgtcctgtcttttcttcattgactttatttgcgtgttaatgttggacatcattgttcatgtaggtagcgtatggtatgcacaatgacaaacaatcgttttaggtcccaggtcacccactcatagtgtcctattattggaattaatgtagcatgagaaagcaatatgtgactctttttcctcaagtgactctgttgagcatccttgagatgctcctgccatgtagcaagttctggattagtgtccttgtatttactggtgtaatttgtaatgtaaccaattgtccgtatggaggagtcgggctggccctcggacccagctgtgattcatgagttgtgtcacagggattgagaaacatgggtgatgcatggagtctcaaaccattgggcctctctgttccttcacctctaccttcttgaccacctgggctatatttcatagaaattaaatgctccttgccaacaaggagtctgtctcctagctctttgttttctaaatataggagttctctaggccactgcatcccggcatcctgatcccagccttttagacacccctgcaagcgttcctctgctctgagccacactgctagcttctcctgcacactctgatctcctttagcccaagaaggggctgtgctggtcatagggttatgctgtaaccctcagtcttccctgagaactgaactatcctgggacctcttgggctgagccttcttcacagagcagttctctagaaggcagagtccacatcctggtccctctggggcagggcctgtctggctgctggcatcaccctggcaggtggatggacagcatcatctcctggaaccaggtttgctgtgaccatgagagcctgaagatgtggctcattcggatccaggcctggactaatctggaaagagggactttctaggtgcaggtcaccagggatgcttgagaaactagagccagacttccttgtttgtttggataatatgtccctgtcctctgatagcagaggaaagagctctgctcccaaagaacattcatgtaagaggaggcatttttttcttctttgctttttttaaacaacctaaagtatgacctaagtgtatgaaactaactgatttctttgggtagagtagccctgaatttaactggggaaaaaatcccatcagactatgagtaaattgaccacccacattaagtcttatctcggtgacctggtaccaaagcccaggtgtcctccaggggagtattctggggtggcagggggattaggtgctagcgccagcagggaaggacacttgcaggtctgccttccaaggctaagcaggccggctgtctctccaggaactggctaggacaagtgtaaagccactgaccacacagaaccaggatgttctagaatctgatggggctgaagatgaagggagaaatggacaaggcacttctggctttattgaaaaggtgaagctcttggagtatattttagagtaggccagtaccttgtataagcagaaaaagacttctctatctccactccaagtcgtttttttctagttgattgggcctttttgattgataagaagaaaatgtgttttgtacgtgtaacaactttaagaatttccattggaaacaaagtatgatttgatttgatttgatttctaagttctcccttccttttcaaggttagcgatgtgctttatagcagacactagcacttttacatgaatacctggtgtgctttggatgtaacagggtcattttgggctcgaggtgagtgtgcaattagcagcaggtctgcttggtccagatatgcttgtttacaagtttagagcatcctatgccagaaagtgagatgaaaacaaaggcacctggattgctttgttttgcttttagataaaagagctttagctcacaccaggcagaagcataaccagtagccccagaaaccggtagcatgatgaagccctcagacagtatagtctgagccaccataagaggcattagggaaaactaacacctccttctttttgcaccgtggggtgctgaaattcctgctagagacttccccttacttccatgaatggcccaggggctgcttagtatatcattagaatgttcattctcctccttttccctggagtggaccagtgagaccaaatgcttgtgtttctctatgttttcagttcatttgttcaaatgacccagaagatgaatccatttctgggaaggctgagctcagatgaggattgctaggccagcctaggttctggggcggatctcagggacagaaacaggcttgtattaagtatgagtggcaggtacttctctagaacagccctaacctgcactagtgaggggggctcaggaattcccatgacattgatctagcagcctcctgcacgtagacactcagttcattttagggacgttcaatgcttgatcaaatggggggcattttctttctttctttttttccccagctacagtgtaattgcctacctgcctgggccccttctagaggaaggtgggctttccttgtccgtcaggctgcactcatgaggtgatatcgtaaagcagcagaaagactgagggtgcaaagaaaccacagctgccattcacggggcagctccctctagctcttctgcccagtgaccttacaggctttagaggagcctgatgagagctatcctgggggccaagggatgcattccctgcagcttcctcctgggggacccacaggtcagcccattccaggagaagcagtcttaggcccgtttgcatcccctgccactgccatgtgcctgccagcccggtttctgatgaagacgtggctcagtccctgctctccttgtcgcagtggcttgtacttcatgtgcagtagcccagggcccgccttctagagtgaatgtttccctcgagcccttggatatttttattctattttgaatggttccgatcaattaatgttgctttgtgtggggttcttcagagaaataatgcaaaccggccaggtgcggtggctcacacctgtaatcccaacactttgaggggctgaggcaggtggatcacctgaggtcaggagttcgagaacagcctggccaacgtggcgaaaccttgtctctactaaaaatacaaaaattagccaggggtggtggcaggcacctgtaatcccagctactcaggaggctgaggcaggagaatcactcgaacctgggaggcggaggttgcagtgagccgagatcacgccactgcactccagcctgggtaacagagcgagagtccttctcaaaacaaacaaaaaaagagctaatgcagacctcttctggttagacctgacacggaggaagtaattggctggtcaacttaatggcgccccacagcttcctctggatcctgcttctttgtacttggaacacagtttatttgagctagaggaaaggaaagttctagaattcctgtttcctcagcctgcactgtatcagatccaggatatgtctgcatttcatcaggatcaagtaagatacataaccttatatctgtaggagccagaaaaaaaaaaatctattcctgataggcatggaaacttagtccacatgaaagacagaagacatctaacagctgtctgtcttgggagcattaaaacccagacaccaagacacactagacagtccatctctgggttgtgatctctcagaaacatcttagtagttaatgcactgttcatttagggagtccccatcctggtccaggccaccctcctagaagctgggcggcagctggacgggcctgccttggtggcattcaagcaagcctaattggattaggttggtgcaaaagtgattgcggtttttgccattgcttttgatggcaaactaactttaagtcattaaaataagacccaacgcttataaaagagttcatatccacctcccaataacttctttagttccatgcagcctcaatcagttcctccattcaaaggaaccctctttaccctggccctgggggagccatattacacccacatcataatttttctgacactatgtgtgcttgtcaaatttcagggtcagtttccccttattggatgtcaggggtgttttgtgagttgtgttttaataggattctgttcgattttctataccagcctatattgttactatcatctgcctagtatgaatattttagtattcaaagcccaccagataaagctgtgttcagaagtggactttttggtcagccttgaaaaaaaaaaaatcagcatttctctgatatttcctgaggattaaccagaaactaaggtttctttttaggcagtggtaagaatgcgtattttcttcttccagaagttctggttttatacttttatcttttgaaagaataacattcctgtgcgactctgcttctcttcgcttttgcatttctcttttttaactcaaatctcttatttcctgccgttcctgtatctaaacagaatgggggcctcaggcagacaggaaccaaagaaagggtgtagtggctttgcagcgttgggtgagcagcagccgctgccattctgtgcactgtcaccggcgggggtggagggtctccctgtaggaggaggaaactcgctgttttcactggcagatttcaaggtgccggctccacctaccgcagctgctaggcattgctcttgtgtagatcgcagaaggagttattggtgatgtggggtgtaggggaagacaggaaaacggactcagagctaggaatgtgggcctggcagagaccgaaggctgggtgggaaggaagctcgcggcgagcctagggttcaagcctagcgcgccaggggtctccagtgagaccttgctcttccctgccgctgaggctggggctgcacggaggtcctcaggcttcccaccctttctgcatcagctttagtgtctgtcggctgggtggactgcagggcaggtgacctggaggaggccctgctccccagcaagcgttctaggagttacggtgtgctctattgggattggattacagtctctacttgtagactttgacttctggaattttaggtggaagggaatttttgttggtgggacgcagcagctcagtgcgtggtgtgtgcatgcgtgtttgtgcgtgcgtgtgcatgtatgtgtttgtgcgtgcacgtgtgcgtgtgtgtgcatgggtttgcgtgcatgcatgtgtgtgcgtgcgcgtgtttgtgtgtgcatgtgtgtgtgtctacgtgtgtgtgcacgcatgtgtgtgcgtgtatgtgtgcgtgtgtgcatgtttgtgagtgcatgtgtttgtgcgtgtgtgcgtatttgtgtgtgtgcgtgtgtgtgcgtgtgtatgtgcgtgtatgcatgtgcatgtttgtgtgtgcgtgcatatgtgtatgtgtgtgcgcgtgcgtgtgcgtgcatgtgtgcgcatgcgtgtgtacctacccacacctagggggatgcatggctctgtgccttggagagggaaacaggaaatacgttgctccacagtcctgtcatcctggtcaggactagtcgcgtggtttgcggacagagtgcaaaatgaaaatgcgaggccccttgttcaggtgatgaagcatttctagacagtgagaggagagcattaagccaagctcaggtcccttctgagtgcatagccccttgtggctgccaggcagcacacccaggaggccggccctgaccacactgttctctgctggttcccgaagctgatgggctctgtcttaggtcttcttactttgaaaggtctcccggcaggctgtggcaagctgcgcggatacacttttctaaacgtctgcatttatttcctaaaagcacaaatggcctggactagctagtgggtgtggaaccgagcccctagttcacagctgtaccccaaggctggagagggggttgccggtggtggcaggagctctgggctcccagttcaggatgggccacagggcgtcaagcagctgtgagcctttaccattgagctcactgcttggaaataaaacccttcctctgggccttgggcatccactgggagcttttctcccctttcctgggaggacagcaagccttttccaaccttctgccttcaaagagaagcagggtcatagaagtgctcagtgtcccttccccagtggctggacacttgctcctccagccttcaccccctggagagaaggggagtctgcggagccagtgcctccctgcccagctgggccacacgatctggtctgcgggtgtctgggaggaacctgcttcggagaggctgcgacctcccagctagactctccccttaggatcccatgtatggggatggtaggagagaaaagatccctctgtgtaagtagcctcaagttctagaagaccatggccccgggaggcagctgaccatgaagctgggcttcctgttgttgctttctttcacgagcttttacttttcctgggctggacgctccaaaatgtttgcagttccatttgctttttgcaagtaggtccccatctccatatacattgagcaataatcctcactatgtttcctgattctgtctgggattatatttgctaagtaaaaatgttgacagaaattgcaaactcatctcacctggatttgattgagtcaccttgaatgacataacaaattatggctttgttttcatgcgtcatgcaatcttccggactacgggaagttctgcaagtgttctccaggggcatttcattaatagcgtgtcagcattagttttaatgaatgaacatttgaggtacattctataaatcaatatccttaaaatgtcatctgctaaacattcactgtgacagaaagtagatattttagcaagatctatgttaatgctacttaattttagacatgcatttaaagcctacatggccaatagcccaagtatctttgaactgtgaaatcaacctcagatctcatctgctgtagccccgcaagccggagtctgtgccctccatgacccttcttatcccttggtggccctgcatagataggggagttggcccctgcccaccccgtgttgtattgccttagctccatcagctttgtaccctcacacgtataggtggtgaacttatgtgtaaatacatgtgtacagatgagaaactgcaacaaaaatgtcctgtggatgataatcagctcagtttccggttttctacattctgtgctgtttccagctaagaaaaaggcgaactcccactatataaagggaaaaggttgtattcatttcatgttcctcatgaaatctctgctgtatgtttatggaatggccatgactaaatgtatatatggtatgtaagaggccatgctgttaaatgttgcataaactaacacagattctgtagtcaaaaatatttaacttgttattgtaaaatgtgatttgtcattgagagattatttttctgtatgtatatgagagtattttaggaatctaatttaagtgcataaaactatagaaaaaaatttaaaacctattccaagagtagaaaatgcttaatgagattacttgggttcaactcaactaaatttcttatattaaaaaaaaattccaagttgtatatgttagaaatcaaatgagtcattttttttcctgcaggaaatatgataaatttcagtgtaatggatggtggcgtgatcaaatgaaaagtatcctgtagctatgacctcgcatgggaccttggtgttgcattaaaaatggatttttgcagatcacatatctgagagggtacttgtgtcaggaaggatgagaggatagggagcctgtttttcatcagatccatgtgccacgcaggcttccttgggttctagtggatttgttagggatctggggctgacgcagctatcccactagagaggccactctctgacttccaggtcgccctttctacttctgtatctggattgattcagtttatccctaattagcgtttgcgttttccatgaaatttcctgatgcatcctcactgtcttcaactgttgcatagccaggtgggtggatggatggtttagggtttctgagttaagccgttttggggcaggcttctggatgcccatgtttccatggagaccccagggggaagatgccttcctcccgtctgcattcccagaaaaggatcagaagtccaggctgcttctggggcacagactttctgtacttggccaccagaagtgccccttaggccacctaaggaggattctgtgaaactcaatgtctaaacccctgagaaaggcattcagaaatgatttcaggagggggcaaccccaggagtccagcctcccctggcagcctggaaatactgcagtaacaaaaagagctggtttctggtgatctgaatgcattgtgtttgggggtgacaccgctggtggaaggttgagggcctgtggtctgaaaagacatctgaagaatgtgttaggttttcaacatttctttgaacaggctgcgtgcatcttaatgctgtcaaccagcaactggagccccttttttgagaggcccgaaccagtaaagctgctgacttcaggagtatgggaagctgtgatttctggaagcttcctggaatctatttaggtgcatgaataatctgcaaatcacttagaggcactgtccatgtggtccataactggctttattcccaaagatggagctgttcagagatttctttgttcaggcgcagccttggaaggccacctaaggcctgccagcagaggagatgagctctggtctaccaaccccaaacaggccctgactctccttccttagaacgatgccctctggctggggtggcaagagggctgtgagtggaaacaagtcagccagtcaactgtcccttgggccttggttgtttcaaaaaagtctggggacaagaaaagctagaacatggggccctcccttcccaggagtgctagcgaaccctcccagatagcctttgcctgtttggaaaagaatgtaatccatcagaacgtgagctccttgtgcttccagtgacaagcgggccacagtgctggtggcatgttgcttccctcacagccctgcccaggggtaggaccaggcccgccccttgatggatgtgctgttgattgtaatatacttctgttgccaaataatggtactgtttaattttccataaaagagagactatattgtctgatatgtaatgttaatggaattctaagaattactagacactattataaattgtagacttacgtatttgtctaaaggtttgatgaagcagggccaaaacattgtttcttcttttttgtttgaaagaagctgaggtttgtttttgctgtttgagtgttcctttggcaacttattatgtgtgaaatgttaaattttaccgattaagatgatggtaactgagacctttctttaaaccagtagcaacatcagtacaaattgctcttcctgtgtatcttgaacctaaaaagaacaatctcttcaaaaacaaaaacaaaaacaaaaaacaactctttggtcattttgacctgtgtggtttaaattcaaatagttcatgaataaaaggagaaaagccaa

SEQ ID NO: 14855 - DNA, 4993 bp, Homo sapiens
  source 1..4993: mol_type = unassigned DNA
catggctcagtttccaacaccttttggtggcagcctggatatctgggccataactgtagaggaaagagcgaagcatgatcagcagttccatagtttaaagccaatatctggattcattactggtgatcaagctagaaactttttttttcaatctgggttacctcaacctgttttagcacagatatgggcactagctgacatgaataatgatggaagaatggatcaagtggagttttccatagctatgaaacttatcaaactgaagctacaaggatatcagctaccctctgcacttccccctgtcatgaaacagcaaccagttgctatttctagcgcaccagcatttggtatgggaggtatcgccagcatgccaccgcttacagctgttgctccagtgccaatgggatccattccagttgttggaatgtctccaaccctagtatcttctgttcccacagcagctgtgccccccctggctaacggggctccccctgttatacaacctctgcctgcatttgctcatcctgcagccacattgccaaagagttcttcctttagtagatctggtccagggtcacaactaaacactaaattacaaaaggcacagtcatttgatgtggccagtgtcccaccagtggcagagtgggctgttcctcagtcatcaagactgaaatacaggcaattattcaatagtcatgacaaaactatgagtggacacttaacaggtccccaagcaagaactattcttatgcagtcaagtttaccacaggctcagctggcttcaatatggaatctttctgacattgatcaagatggaaaacttacagcagaggaatttatcctggcaatgcacctcattgatgtagctatgtctggccaaccactgccacctgtcctgcctccagaatacattccaccttcttttagaagagttcgatctggcagtggtatatctgtcataagctcaacatctgtagatcagaggctaccagaggaaccagttttagaagatgaacaacaacaattagaaaagaaattacctgtaacgtttgaagataagaagcgggagaactttgaacgtggcaacctggaactggagaaacgaaggcaagctctcctggaacagcagcgcaaggagcaggagcgcctggcccagctggagcgggcggagcaggagaggaaggagcgtgagcgccaggagcaagagcgcaaaagacaactggaactggagaagcaactggaaaagcagcgggagctagaacggcagagagaggaggagaggaggaaagaaattgagaggcgagaggctgcaaaacgggaacttgaaaggcaacgacaacttgagtgggaacggaatcgaaggcaagaactactaaatcaaagaaacaaagaacaagaggacatagttgtactgaaagcaaagaaaaagactttggaatttgaattagaagctctaaatgataaaaagcatcaactagaagggaaacttcaagatatcagatgtcgattgaccacccaaaggcaagaaattgagagcacaaacaaatctagagagttgagaattgccgaaatcacccatctacagcaacaattacaggaatctcagcaaatgcttggaagacttattccagaaaaacagatactcaatgaccaattaaaacaagttcagcagaacagtttgcacagagattcacttgttacacttaaaagagccttagaagcaaaagaactagctcggcagcacctacgagaccaactggatgaagtggagaaagaaactagatcaaaactacaggagattgatattttcaataatcagctgaaggaactaagagaaatacacaataagcaacaactccagaagcaaaagtccatggaggctgaacgactgaaacagaaagaacaagaacgaaagatcatagaattagaaaaacaaaaagaagaagcccaaagacgagctcaggaaagggacaagcagtggctggagcatgtgcagcaggaggacgagcatcagagaccaagaaaactccacgaagaggaaaaactgaaaagggaggagagtgtcaaaaagaaggatggcgaggaaaaaggcaaacaggaagcacaagacaagctgggtcggcttttccatcaacaccaagaaccagctaagccagctgtccaggcaccctggtccactgcagaaaaaggtccacttaccatttctgcacaggaaaatgtaaaagtggtgtattaccgggcactgtacccctttgaatccagaagccatgatgaaatcactatccagccaggagacatagtcatggtggatgaaagccaaactggagaacccggctggcttggaggagaattaaaaggaaagacagggtggttccctgcaaactatgcagagaaaatcccagaaaatgaggttcccgctccagtgaaaccagtgactgattcaacatctgcccctgcccccaaactggccttgcgtgagacccccgcccctttggcagtaacctcttcagagccctccacgacccctaataactgggccgacttcagctccacgtggcccaccagcacgaatgagaaaccagaaacggataactgggatgcatgggcagcccagccctctctcaccgttccaagtgccggccagttaaggcagaggtccgcctttactccagccacggccactggctcctccccgtctcctgtgctaggccagggtgaaaaggtggaggggctacaagctcaagccctatatccttggagagccaaaaaagacaaccacttaaattttaacaaaaatgatgtcatcaccgtcctggaacagcaagacatgtggtggtttggagaagttcaaggtcagaagggttggttccccaagtcttacgtgaaactcatttcagggcccataaggaagtctacaagcatggattctggttcttcagagagtcctgctagtctaaagcgagtagcctctccagcagccaagccggtcgtttcgggagaagggctctggaactgctgggaaaacagggagtttaggaaaaaaacctgaaattgcccaggttattgcctcatacaccgccaccggccccgagcagctcactctcgcccctggtcagctgattttgatccgaaaaaagaacccaggtggatggtgggaaggagagctgcaagcacgtgggaaaaagcgccagataggctggttcccagctaattatgtaaagcttctaagccctgggacgagcaaaatcactccaacagagccacctaagtcaacagcattagcggcagtgtgccaggtgattgggatgtacgactacaccgcgcagaatgacgatgagctggccttcaacaagggccagatcatcaacgtcctcaacaaggaggaccctgactggtggaaaggagaagtcaatggacaagtggggctcttcccatccaattatgtgaagctgaccacagacatggacccaagccagcaatggtgttcagacttacatctcttggatatgttgaccccaactgaaagaaagcgacaaggatacatccacgagctcattgtcaccgaggagaactatgtgaatgacctgcagctggtcacagagatttttcaaaaacccctgatggagtctgagctgctgacagaaaaagaggttgctatgatttttgtgaactggaaggagctgattatgtgtaatatcaaactactaaaagcgctgagagtccgcaagaagatgtccggggagaagatgcctgtgaagatgattggagacatcctgagcgcacagctgccgcacatgcagccctacatccgcttctgcagccgccagctcaacggggctgccctgatccagcagaagacggatgaggccccagacttcaaggagttcgtcaaaagattggcaatggatcctcggtgtaaagggatgccactctctagttttatactgaagcctatgcaacgggtaacaagatacccactgatcattaaaaatatcctggaaaacacccctgaaaaccacccggaccacagccacttgaagcacgccctggagaaggcggaagagctctgttcccaggtgaacgaaggggtgcgggagaaggagaactctgaccggctggagtggatccaggcccacgtgcagtgtgaaggcctgtctgagcaacttgtgttcaattcagtgaccaattgcttggggccgcgcaaatttctgcacagtgggaagctctacaaggccaagagcaacaaggagctgtatggcttccttttcaacgacttcctcctgctgactcagatcacgaagcctttggggtcttctggcaccgacaaagtcttcagccccaaatcaaacctgcagtataaaatgtataaaacacctattttcctaaatgaggttctagtaaaattacccaccgacccttctggagacgagcccatcttccacatctcccacattgaccgcgtctatactctccgagcagaaagcataaatgaaaggactgcctgggtgcagaaaatcaaagctgcttctgaactctacatagagactgagaaaaagaagcgcgagaaagcgtacctggtccgttcccaaagggcaacaggcattggaaggttgatggtgaacgtggttgaaggcatcgagttgaaaccctgtcggtcacatggaaagagcaacccgtactgtgaggtgaccatgggttcccagtgccacatcaccaagacgatccaggacactctgaaccccaagtggaattccaactgccagttcttcatccgagacctggagcaggaagtcctctgcatcactgtgttcgagagggaccagttctcaccagatgattttttgggtcggacggagatccgtgtggcggacatcaagaaagaccagggctccaaaggtccagttacgaagtgtcttctgctgcacgaagtccccacgggagagattgtggtccgcttggacctgcagttgtttgatgagccgtaggcagcggg

SEQ ID NO: 14856 - DNA, 3115 bp, Homo sapiens
  source 1..3115: mol_type = unassigned DNA
aggtaaaagtaacagaaccatggctcagtttccaacaccttttggtggcagcctggatatctgggccataactgtagaggaaagagcgaagcatgatcagcagttccatagtttaaagccaatatctggattcattactggtgatcaagctagaaactttttttttcaatctgggttacctcaacctgttttagcacagatatgggcactagctgacatgaataatgatggaagaatggatcaagtggagttttccatagctatgaaacttatcaaactgaagctacaaggatatcagctaccctctgcacttccccctgtcatgaaacagcaaccagttgctatttctagcgcaccagcatttggtatgggaggtatcgccagcatgccaccgcttacagctgttgctccagtgccaatgggatccattccagttgttggaatgtctccaaccctagtatcttctgttcccacagcagctgtgccccccctggctaacggggctccccctgttatacaacctctgcctgcatttgctcatcctgcagccacattgccaaagagttcttcctttagtagatctggtccagggtcacaactaaacactaaattacaaaaggcacagtcatttgatgtggccagtgtcccaccagtggcagagtgggctgttcctcagtcatcaagactgaaatacaggcaattattcaatagtcatgacaaaactatgagtggacacttaacaggtccccaagcaagaactattcttatgcagtcaagtttaccacaggctcagctggcttcaatatggaatctttctgacattgatcaagatggaaaacttacagcagaggaatttatcctggcaatgcacctcattgatgtagctatgtctggccaaccactgccacctgtcctgcctccagaatacattccaccttcttttagaagagttcgatctggcagtggtatatctgtcataagctcaacatctgtagatcagaggctaccagaggaaccagttttagaagatgaacaacaacaattagaaaagaaattacctgtaacgtttgaagataagaagcgggagaactttgaacgtggcaacctggaactggagaaacgaaggcaagctctcctggaacagcagcgcaaggagcaggagcgcctggcccagctggagcgggcggagcaggagaggaaggagcgtgagcgccaggagcaagagcgcaaaagacaactggaactggagaagcaactggaaaagcagcgggagctagaacggcagagagaggaggagaggaggaaagaaattgagaggcgagaggctgcaaaacgggaacttgaaaggcaacgacaacttgagtgggaacggaatcgaaggcaagaactactaaatcaaagaaacaaagaacaagaggacatagttgtactgaaagcaaagaaaaagactttggaatttgaattagaagctctaaatgataaaaagcatcaactagaagggaaacttcaagatatcagatgtcgattgaccacccaaaggcaagaaattgagagcacaaacaaatctagagagttgagaattgccgaaatcacccatctacagcaacaattacaggaatctcagcaaatgcttggaagacttattccagaaaaacagatactcaatgaccaattaaaacaagttcagcagaacagtttgcacagagattcacttgttacacttaaaagagccttagaagcaaaagaactagctcggcagcacctacgagaccaactggatgaagtggagaaagaaactagatcaaaactacaggagattgatattttcaataatcagctgaaggaactaagagaaatacacaataagcaacaactccagaagcaaaagtccatggaggctgaacgactgaaacagaaagaacaagaacgaaagatcatagaattagaaaaacaaaaagaagaagcccaaagacgagctcaggaaagggacaagcagtggctggagcatgtgcagcaggaggacgagcatcagagaccaagaaaactccacgaagaggaaaaactgaaaagggaggagagtgtcaaaaagaaggatggcgaggaaaaaggcaaacaggaagcacaagacaagctgggtcggcttttccatcaacaccaagaaccagctaagccagctgtccaggcaccctggtccactgcagaaaaaggtccacttaccatttctgcacaggaaaatgtaaaagtggtgtattaccgggcactgtacccctttgaatccagaagccatgatgaaatcactatccagccaggagacatagtcatggtggatgaaagccaaactggagaacccggctggcttggaggagaattaaaaggaaagacagggtggttccctgcaaactatgcagagaaaatcccagaaaatgaggttcccgctccagtgaaaccagtgactgattcaacatctgcccctgcccccaaactggccttgcgtgagacccccgcccctttggcagtaacctcttcagagccctccacgacccctaataactgggccgacttcagctccacgtggcccaccagcacgaatgagaaaccagaaacggataactgggatgcatgggcagcccagccctctctcaccgttccaagtgccggccagttaaggcagaggtccgcctttactccagccacggccactggctcctccccgtctcctgtgctaggccagcctgacttcctcctccacccctccatgagactaggccacatgcagccccggattgtgcttctcttcccggaccccctgcagtgttccacctcgaggcttttgcccatgctgcgccctcggcctggagtgcccttcctccgaagccctagctgtcaaagtccttctcatccttcaaggcccatctcagatgctgccccctctgtgaaatttacgctgatgcccccaggcagaattcatccctgttttctctttattcctgcagtgaatagtaggaactcctttttagtatatttcattctgccaggtggtacacttggttgtttttatctctgtcttccccattacttgtgaattacctgctagtaatactgcccatctttatag

SEQ ID NO: 14857 - DNA, 5191 bp, Homo sapiens
  source 1..5191: mol_type = unassigned DNA
gaggtagagaagagtggaggcgccaggggagggagcgtagcttggttgctccgtagtacggcggctcgcgaggaagaatcccgagcgggctccgggacggacagagaggcgggcggggatggtgtgcggggctgcggctcctgcgtccctcccagcggcgcgtgagcggcactgatttgtccctggggcggcagcgcggacccgcccggagatgaggcgtcgattagcaaggtaaaagtaacagaaccatggctcagtttccaacaccttttggtggcagcctggatatctgggccataactgtagaggaaagagcgaagcatgatcagcagttccatagtttaaagccaatatctggattcattactggtgatcaagctagaaactttttttttcaatctgggttacctcaacctgttttagcacagatatgggcactagctgacatgaataatgatggaagaatggatcaagtggagttttccatagctatgaaacttatcaaactgaagctacaaggatatcagctaccctctgcacttccccctgtcatgaaacagcaaccagttgctatttctagcgcaccagcatttggtatgggaggtatcgccagcatgccaccgcttacagctgttgctccagtgccaatgggatccattccagttgttggaatgtctccaaccctagtatcttctgttcccacagcagctgtgccccccctggctaacggggctccccctgttatacaacctctgcctgcatttgctcatcctgcagccacattgccaaagagttcttcctttagtagatctggtccagggtcacaactaaacactaaattacaaaaggcacagtcatttgatgtggccagtgtcccaccagtggcagagtgggctgttcctcagtcatcaagactgaaatacaggcaattattcaatagtcatgacaaaactatgagtggacacttaacaggtccccaagcaagaactattcttatgcagtcaagtttaccacaggctcagctggcttcaatatggaatctttctgacattgatcaagatggaaaacttacagcagaggaatttatcctggcaatgcacctcattgatgtagctatgtctggccaaccactgccacctgtcctgcctccagaatacattccaccttcttttagaagagttcgatctggcagtggtatatctgtcataagctcaacatctgtagatcagaggctaccagaggaaccagttttagaagatgaacaacaacaattagaaaagaaattacctgtaacgtttgaagataagaagcgggagaactttgaacgtggcaacctggaactggagaaacgaaggcaagctctcctggaacagcagcgcaaggagcaggagcgcctggcccagctggagcgggcggagcaggagaggaaggagcgtgagcgccaggagcaagagcgcaaaagacaactggaactggagaagcaactggaaaagcagcgggagctagaacggcagagagaggaggagaggaggaaagaaattgagaggcgagaggctgcaaaacgggaacttgaaaggcaacgacaacttgagtgggaacggaatcgaaggcaagaactactaaatcaaagaaacaaagaacaagaggacatagttgtactgaaagcaaagaaaaagactttggaatttgaattagaagctctaaatgataaaaagcatcaactagaagggaaacttcaagatatcagatgtcgattgaccacccaaaggcaagaaattgagagcacaaacaaatctagagagttgagaattgccgaaatcacccatctacagcaacaattacaggaatctcagcaaatgcttggaagacttattccagaaaaacagatactcaatgaccaattaaaacaagttcagcagaacagtttgcacagagattcacttgttacacttaaaagagccttagaagcaaaagaactagctcggcagcacctacgagaccaactggatgaagtggagaaagaaactagatcaaaactacaggagattgatattttcaataatcagctgaaggaactaagagaaatacacaataagcaacaactccagaagcaaaagtccatggaggctgaacgactgaaacagaaagaacaagaacgaaagatcatagaattagaaaaacaaaaagaagaagcccaaagacgagctcaggaaagggacaagcagtggctggagcatgtgcagcaggaggacgagcatcagagaccaagaaaactccacgaagaggaaaaactgaaaagggaggagagtgtcaaaaagaaggatggcgaggaaaaaggcaaacaggaagcacaagacaagctgggtcggcttttccatcaacaccaagaaccagctaagccagctgtccaggcaccctggtccactgcagaaaaaggtccacttaccatttctgcacaggaaaatgtaaaagtggtgtattaccgggcactgtacccctttgaatccagaagccatgatgaaatcactatccagccaggagacatagtcatggtggatgaaagccaaactggagaacccggctggcttggaggagaattaaaaggaaagacagggtggttccctgcaaactatgcagagaaaatcccagaaaatgaggttcccgctccagtgaaaccagtgactgattcaacatctgcccctgcccccaaactggccttgcgtgagacccccgcccctttggcagtaacctcttcagagccctccacgacccctaataactgggccgacttcagctccacgtggcccaccagcacgaatgagaaaccagaaacggataactgggatgcatgggcagcccagccctctctcaccgttccaagtgccggccagttaaggcagaggtccgcctttactccagccacggccactggctcctccccgtctcctgtgctaggccagggtgaaaaggtggaggggctacaagctcaagccctatatccttggagagccaaaaaagacaaccacttaaattttaacaaaaatgatgtcatcaccgtcctggaacagcaagacatgtggtggtttggagaagttcaaggtcagaagggttggttccccaagtcttacgtgaaactcatttcagggcccataaggaagtctacaagcatggattctggttcttcagagagtcctgctagtctaaagcgagtagcctctccagcagccaagccggtcgtttcgggagaagaaattgcccaggttattgcctcatacaccgccaccggccccgagcagctcactctcgcccctggtcagctgattttgatccgaaaaaagaacccaggtggatggtgggaaggagagctgcaagcacgtgggaaaaagcgccagataggctggttcccagctaattatgtaaagcttctaagccctgggacgagcaaaatcactccaacagagccacctaagtcaacagcattagcggcagtgtgccaggtgattgggatgtacgactacaccgcgcagaatgacgatgagctggccttcaacaagggccagatcatcaacgtcctcaacaaggaggaccctgactggtggaaaggagaagtcaatggacaagtggggctcttcccatccaattatgtgaagctgaccacagacatggacccaagccagcaatgaatcatatgttgtccatccccccctcaggcttgaaagtcctcaaagagacccactatcccatatcactgcccagagggatgatgggagatgcagccttgatcatgtgacttccagcatgatcacctactgccttctgagtagaagaactcactgcagagcagtttacctcattttaccttagttgcatgtgatcgcaatgtttgagttattacttgcagagataggagcaaaaattacaaaaacacacagggtagtgggtccttttgtggctttcctagttactcaaattgactttcccccacctttgcacaggtgctttcaatagttttaaaattatttttaaatatatattttagctttttaataaacaaaataaataaatgacttctttgctattttggttttgcaaaaagacccactatcaaggaatgctgcatgtgctattaaaaattgttccaaatgtccataaatctgagacttgatgtattttttcattttgtccagtgttaccaactaaattgtgcagtttggggcttttcccccttaccatagaagtgcagaggagttcagtatctctgttttaaagacgtatagaatgagcccaattaaagcgaaggtgtttgtgcttgtttgtgtgtatcagctgtaccttgttgagcatgtaatacatcctgtacataagaaattagttctttccatggcaaagctattaccttgtacgatgctctaatcatattgcatttaattttattttgcacagtgaccttgtagccacatgagaaagcactctgtgtttttgttcggtctcagatttatctggttgagttggtgttttgtttggggtttttaattttgcgtgtttgcatagcataaaatcagtagacaacaccactgaggtcgttacgatcaacgatatccacagtctctttttagtctctgttacatgaagttttattccagttacttttcatggaatgacctattttgaacaagtaattttcttgacaagaaagaatgtatagaagtctccctgcaattaatttccaatgtttacattttttaactagactgtggaatttctacagattaatatgaaatggagctcatggtccgtttgtgtgttagatatgctgtagctgaagccctgtttgtcttttaaacactagttggaagctctcaataaaaatgcctgctgctcacagcacagaaaatggggcagggggagcctcaagcacaatctagctgtcctcctaaagactctgtaatgctcactcccctcgcgttctcccggcgctgtcgggaggctgtgctggtggtcgtgtagaggtccttctcctttcacatggtgcagagagcgaggacctctcctcctcgttcagttgcacttcagtattttcacggatatgaatgtaaaatatataaatatataaacctgcggctttaacaactgtaatacaaccttttgaattagttccgtgtatagataattaaattcttcatacaaaagt

SEQ ID NO: 14858 - DNA, 5408 bp, Homo sapiens
  source 1..5408: mol_type = unassigned DNA
aggaggtagagaagagtggaggcgccaggggagggagcgtagcttggttgctccgtagtacggcggctcgcgaggaagaatcccgagcgggctccgggacggacagagaggcgggcggggatggtgtgcggggctgcggctcctgcgtccctcccagcggcgcgtgagcggcactgatttgtccctggggcggcagcgcggacccgcccggagatgaggcgtcgattagcaaggtaaaagtaacagaaccatggctcagtttccaacaccttttggtggcagcctggatatctgggccataactgtagaggaaagagcgaagcatgatcagcagttccatagtttaaagccaatatctggattcattactggtgatcaagctagaaactttttttttcaatctgggttacctcaacctgttttagcacagatatgggcactagctgacatgaataatgatggaagaatggatcaagtggagttttccatagctatgaaacttatcaaactgaagctacaaggatatcagctaccctctgcacttccccctgtcatgaaacagcaaccagttgctatttctagcgcaccagcatttggtatgggaggtatcgccagcatgccaccgcttacagctgttgctccagtgccaatgggatccattccagttgttggaatgtctccaaccctagtatcttctgttcccacagcagctgtgccccccctggctaacggggctccccctgttatacaacctctgcctgcatttgctcatcctgcagccacattgccaaagagttcttcctttagtagatctggtccagggtcacaactaaacactaaattacaaaaggcacagtcatttgatgtggccagtgtcccaccagtggcagagtgggctgttcctcagtcatcaagactgaaatacaggcaattattcaatagtcatgacaaaactatgagtggacacttaacaggtccccaagcaagaactattcttatgcagtcaagtttaccacaggctcagctggcttcaatatggaatctttctgacattgatcaagatggaaaacttacagcagaggaatttatcctggcaatgcacctcattgatgtagctatgtctggccaaccactgccacctgtcctgcctccagaatacattccaccttcttttagaagagttcgatctggcagtggtatatctgtcataagctcaacatctgtagatcagaggctaccagaggaaccagttttagaagatgaacaacaacaattagaaaagaaattacctgtaacgtttgaagataagaagcgggagaactttgaacgtggcaacctggaactggagaaacgaaggcaagctctcctggaacagcagcgcaaggagcaggagcgcctggcccagctggagcgggcggagcaggagaggaaggagcgtgagcgccaggagcaagagcgcaaaagacaactggaactggagaagcaactggaaaagcagcgggagctagaacggcagagagaggaggagaggaggaaagaaattgagaggcgagaggctgcaaaacgggaacttgaaaggcaacgacaacttgagtgggaacggaatcgaaggcaagaactactaaatcaaagaaacaaagaacaagaggacatagttgtactgaaagcaaagaaaaagactttggaatttgaattagaagctctaaatgataaaaagcatcaactagaagggaaacttcaagatatcagatgtcgattgaccacccaaaggcaagaaattgagagcacaaacaaatctagagagttgagaattgccgaaatcacccatctacagcaacaattacaggaatctcagcaaatgcttggaagacttattccagaaaaacagatactcaatgaccaattaaaacaagttcagcagaacagtttgcacagagattcacttgttacacttaaaagagccttagaagcaaaagaactagctcggcagcacctacgagaccaactggatgaagtggagaaagaaactagatcaaaactacaggagattgatattttcaataatcagctgaaggaactaagagaaatacacaataagcaacaactccagaagcaaaagtccatggaggctgaacgactgaaacagaaagaacaagaacgaaagatcatagaattagaaaaacaaaaagaagaagcccaaagacgagctcaggaaagggacaagcagtggctggagcatgtgcagcaggaggacgagcatcagagaccaagaaaactccacgaagaggaaaaactgaaaagggaggagagtgtcaaaaagaaggatggcgaggaaaaaggcaaacaggaagcacaagacaagctgggtcggcttttccatcaacaccaagaaccagctaagccagctgtccaggcaccctggtccactgcagaaaaaggtccacttaccatttctgcacaggaaaatgtaaaagtggtgtattaccgggcactgtacccctttgaatccagaagccatgatgaaatcactatccagccaggagacatagtcatggtggatgaaagccaaactggagaacccggctggcttggaggagaattaaaaggaaagacagggtggttccctgcaaactatgcagagaaaatcccagaaaatgaggttcccgctccagtgaaaccagtgactgattcaacatctgcccctgcccccaaactggccttgcgtgagacccccgcccctttggcagtaacctcttcagagccctccacgacccctaataactgggccgacttcagctccacgtggcccaccagcacgaatgagaaaccagaaacggataactgggatgcatgggcagcccagccctctctcaccgttccaagtgccggccagttaaggcagaggtccgcctttactccagccacggccactggctcctccccgtctcctgtgctaggccagggtgaaaaggtggaggggctacaagctcaagccctatatccttggagagccaaaaaagacaaccacttaaattttaacaaaaatgatgtcatcaccgtcctggaacagcaagacatgtggtggtttggagaagttcaaggtcagaagggttggttccccaagtcttacgtgaaactcatttcagggcccataaggaagtctacaagcatggattctggttcttcagagagtcctgctagtctaaagcgagtagcctctccagcagccaagccggtcgtttcgggagaagaatttattgccatgtacacttacgagagttctgagcaaggagatttaacctttcagcaaggggatgtgattttggttaccaagaaagatggtgactggtggacaggaacagtgggcgacaaggccggagtcttcccttctaactatgtgaggcttaaagattcagagggctctggaactgctgggaaaacagggagtttaggaaaaaaacctgaaattgcccaggttattgcctcatacaccgccaccggccccgagcagctcactctcgcccctggtcagctgattttgatccgaaaaaagaacccaggtggatggtgggaaggagagctgcaagcacgtgggaaaaagcgccagataggctggttcccagctaattatgtaaagcttctaagccctgggacgagcaaaatcactccaacagagccacctaagtcaacagcattagcggcagtgtgccaggtgattgggatgtacgactacaccgcgcagaatgacgatgagctggccttcaacaagggccagatcatcaacgtcctcaacaaggaggaccctgactggtggaaaggagaagtcaatggacaagtggggctcttcccatccaattatgtgaagctgaccacagacatggacccaagccagcaatgaatcatatgttgtccatccccccctcaggcttgaaagtcctcaaagagacccactatcccatatcactgcccagagggatgatgggagatgcagccttgatcatgtgacttccagcatgatcacctactgccttctgagtagaagaactcactgcagagcagtttacctcattttaccttagttgcatgtgatcgcaatgtttgagttattacttgcagagataggagcaaaaattacaaaaacacacagggtagtgggtccttttgtggctttcctagttactcaaattgactttcccccacctttgcacaggtgctttcaatagttttaaaattatttttaaatatatattttagctttttaataaacaaaataaataaatgacttctttgctattttggttttgcaaaaagacccactatcaaggaatgctgcatgtgctattaaaaattgttccaaatgtccataaatctgagacttgatgtattttttcattttgtccagtgttaccaactaaattgtgcagtttggggcttttcccccttaccatagaagtgcagaggagttcagtatctctgttttaaagacgtatagaatgagcccaattaaagcgaaggtgtttgtgcttgtttgtgtgtatcagctgtaccttgttgagcatgtaatacatcctgtacataagaaattagttctttccatggcaaagctattaccttgtacgatgctctaatcatattgcatttaattttattttgcacagtgaccttgtagccacatgagaaagcactctgtgtttttgttcggtctcagatttatctggttgagttggtgttttgtttggggtttttaattttgcgtgtttgcatagcataaaatcagtagacaacaccactgaggtcgttacgatcaacgatatccacagtctctttttagtctctgttacatgaagttttattccagttacttttcatggaatgacctattttgaacaagtaattttcttgacaagaaagaatgtatagaagtctccctgcaattaatttccaatgtttacattttttaactagactgtggaatttctacagattaatatgaaatggagctcatggtccgtttgtgtgttagatatgctgtagctgaagccctgtttgtcttttaaacactagttggaagctctcaataaaaatgcctgctgctcacagcacagaaaatggggcagggggagcctcaagcacaatctagctgtcctcctaaagactctgtaatgctcactcccctcgcgttctcccggcgctgtcgggaggctgtgctggtggtcgtgtagaggtccttctcctttcacatggtgcagagagcgaggacctctcctcctcgttcagttgcacttcagtattttcacggatatgaatgtaaaatatataaatatataaacctgcggctttaacaactgtaatacaaccttttgaattagttccgtgtatagataattaaattcttcatacaaaagtta

SEQ ID NO: 14859 - DNA, 3913 bp, Homo sapiens
  source 1..3913: mol_type = unassigned DNA
acttatgggcggagatggatggtggatggggggcgggggaggcagcggagggagatgaggagataggcgggagcgagggagcgagggagggagcgaaggaggtagagaagagtggaggcgccaggggagggagcgtagcttggttgctccgtagtacggcggctcgcgaggaagaatcccgagcgggctccgggacggacagagaggcgggcggggatggtgtgcggggctgcggctcctgcgtccctcccagcggcgcgtgagcggcactgatttgtccctggggcggcagcgcggacccgcccggagatgaggcgtcgattagcaaggtaaaagtaacagaaccatggctcagtttccaacaccttttggtggcagcctggatatctgggccataactgtagaggaaagagcgaagcatgatcagcagttccatagtttaaagccaatatctggattcattactggtgatcaagctagaaactttttttttcaatctgggttacctcaacctgttttagcacagatatgggcactagctgacatgaataatgatggaagaatggatcaagtggagttttccatagctatgaaacttatcaaactgaagctacaaggatatcagctaccctctgcacttccccctgtcatgaaacagcaaccagttgctatttctagcgcaccagcatttgcagctgtgccccccctggctaacggggctccccctgttatacaacctctgcctgcatttgctcatcctgcagccacattgccaaagagttcttcctttagtagatctggtccagggtcacaactaaacactaaattacaaaaggcacagtcatttgatgtggccagtgtcccaccagtggcagagtgggctgttcctcagtcatcaagactgaaatacaggcaattattcaatagtcatgacaaaactatgagtggacacttaacaggtccccaagcaagaactattcttatgcagtcaagtttaccacaggctcagctggcttcaatatggaatctttctgacattgatcaagatggaaaacttacagcagaggaatttatcctggcaatgcacctcattgatgtagctatgtctggccaaccactgccacctgtcctgcctccagaatacattccaccttcttttagaagagttcgatctggcagtggtatatctgtcataagctcaacatctgtagatcagaggctaccagaggaaccagttttagaagatgaacaacaacaattagaaaagaaattacctgtaacgtttgaagataagaagcgggagaactttgaacgtggcaacctggaactggagaaacgaaggcaagctctcctggaacagcagcgcaaggagcaggagcgcctggcccagctggagcgggcggagcaggagaggaaggagcgtgagcgccaggagcaagagcgcaaaagacaactggaactggagaagcaactggaaaagcagcgggagctagaacggcagagagaggaggagaggaggaaagaaattgagaggcgagaggctgcaaaacgggaacttgaaaggcaacgacaacttgagtgggaacggaatcgaaggcaagaactactaaatcaaagaaacaaagaacaagaggacatagttgtactgaaagcaaagaaaaagactttggaatttgaattagaagctctaaatgataaaaagcatcaactagaagggaaacttcaagatatcagatgtcgattgaccacccaaaggcaagaaattgagagcacaaacaaatctagagagttgagaattgccgaaatcacccatctacagcaacaattacaggaatctcagcaaatgcttggaagacttattccagaaaaacagatactcaatgaccaattaaaacaagttcagcagaacagtttgcacagagattcacttgttacacttaaaagagccttagaagcaaaagaactagctcggcagcacctacgagaccaactggatgaagtggagaaagaaactagatcaaaactacaggagattgatattttcaataatcagctgaaggaactaagagaaatacacaataagcaacaactccagaagcaaaagtccatggaggctgaacgactgaaacagaaagaacaagaacgaaagatcatagaattagaaaaacaaaaagaagaagcccaaagacgagctcaggaaagggacaagcagtggctggagcatgtgcagcaggaggacgagcatcagagaccaagaaaactccacgaagaggaaaaactgaaaagggaggagagtgtcaaaaagaaggatggcgaggaaaaaggcaaacaggaagcacaagacaagctgggtcggcttttccatcaacaccaagaaccagctaagccagctgtccaggcaccctggtccactgcagaaaaaggtccacttaccatttctgcacaggaaaatgtaaaagtggtgtattaccgggcactgtacccctttgaatccagaagccatgatgaaatcactatccagccaggagacatagtcatggtggatgaaagccaaactggagaacccggctggcttggaggagaattaaaaggaaagacagggtggttccctgcaaactatgcagagaaaatcccagaaaatgaggttcccgctccagtgaaaccagtgactgattcaacatctgcccctgcccccaaactggccttgcgtgagacccccgcccctttggcagtaacctcttcagagccctccacgacccctaataactgggccgacttcagctccacgtggcccaccagcacgaatgagaaaccagaaacggataactgggatgcatgggcagcccagccctctctcaccgttccaagtgccggccagttaaggcagaggtccgcctttactccagccacggccactggctcctccccgtctcctgtgctaggccagggtgaaaaggtggaggggctacaagctcaagccctatatccttggagagccaaaaaagacaaccacttaaattttaacaaaaatgatgtcatcaccgtcctggaacagcaagacatgtggtggtttggagaagttcaaggtcagaagggttggttccccaagtcttacgtgaaactcatttcagggcccataaggaagtctacaagcatggattctggttcttcagagagtcctgctagtctaaagcgagtagcctctccagcagccaagccggtcgtttcgggagaagaatttattgccatgtacacttacgagagttctgagcaaggagatttaacctttcagcaaggggatgtgattttggttaccaagaaagatggtgactggtggacaggaacagtgggcgacaaggccggagtcttcccttctaactatgtgaggcttaaagattcagagggctctggaactgctgggaaaacagggagtttaggaaaaaaacctgaaattgcccaggttattgcctcatacaccgccaccggccccgagcagctcactctcgcccctggtcagctgattttgatccgaaaaaagaacccaggtggatggtgggaaggagagctgcaagcacgtgggaaaaagcgccagataggctggttcccagctaattatgtaaagcttctaagccctgggacgagcaaaatcactccaacagagccacctaagtcaacagcattagcggcagtgtgccaggtgattgggatgtacgactacaccgcgcagaatgacgatgagctggccttcaacaagggccagatcatcaacgtcctcaacaaggaggaccctgactggtggaaaggagaagtcaatggacaagtggggctcttcccatccaattatgtgaagctgaccacagacatggacccaagccagcaatgaatcatatgttgtccatccccccctcaggct

SEQ ID NO: 14860 - DNA, 4003 bp, Homo sapiens
  source 1..4003: mol_type = unassigned DNA
gaggtagagaagagtggaggcgccaggggagggagcgtagcttggttgctccgtagtacggcggctcgcgaggaagaatcccgagcgggctccgggacggacagagaggcgggcggggatggtgtgcggggctgcggctcctgcgtccctcccagcggcgcgtgagcggcactgatttgtccctggggcggcagcgcggacccgcccggagatgaggcgtcgattagcaaggtaaaagtaacagaaccatggctcagtttccaacaccttttggtggcagcctggatatctgggccataactgtagaggaaagagcgaagcatgatcagcagttccatagtttaaagccaatatctggattcattactggtgatcaagctagaaactttttttttcaatctgggttacctcaacctgttttagcacagatatgggcactagctgacatgaataatgatggaagaatggatcaagtggagttttccatagctatgaaacttatcaaactgaagctacaaggatatcagctaccctctgcacttccccctgtcatgaaacagcaaccagttgctatttctagcgcaccagcatttggtatgggaggtatcgccagcatgccaccgcttacagctgttgctccagtgccaatgggatccattccagttgttggaatgtctccaaccctagtatcttctgttcccacagcagctgtgccccccctggctaacggggctccccctgttatacaacctctgcctgcatttgctcatcctgcagccacattgccaaagagttcttcctttagtagatctggtccagggtcacaactaaacactaaattacaaaaggcacagtcatttgatgtggccagtgtcccaccagtggcagagtgggctgttcctcagtcatcaagactgaaatacaggcaattattcaatagtcatgacaaaactatgagtggacacttaacaggtccccaagcaagaactattcttatgcagtcaagtttaccacaggctcagctggcttcaatatggaatctttctgacattgatcaagatggaaaacttacagcagaggaatttatcctggcaatgcacctcattgatgtagctatgtctggccaaccactgccacctgtcctgcctccagaatacattccaccttcttttagaagagttcgatctggcagtggtatatctgtcataagctcaacatctgtagatcagaggctaccagaggaaccagttttagaagatgaacaacaacaattagaaaagaaattacctgtaacgtttgaagataagaagcgggagaactttgaacgtggcaacctggaactggagaaacgaaggcaagctctcctggaacagcagcgcaaggagcaggagcgcctggcccagctggagcgggcggagcaggagaggaaggagcgtgagcgccaggagcaagagcgcaaaagacaactggaactggagaagcaactggaaaagcagcgggagctagaacggcagagagaggaggagaggaggaaagaaattgagaggcgagaggctgcaaaacgggaacttgaaaggcaacgacaacttgagtgggaacggaatcgaaggcaagaactactaaatcaaagaaacaaagaacaagaggacatagttgtactgaaagcaaagaaaaagactttggaatttgaattagaagctctaaatgataaaaagcatcaactagaagggaaacttcaagatatcagatgtcgattgaccacccaaaggcaagaaattgagagcacaaacaaatctagagagttgagaattgccgaaatcacccatctacagcaacaattacaggaatctcagcaaatgcttggaagacttattccagaaaaacagatactcaatgaccaattaaaacaagttcagcagaacagtttgcacagagattcacttgttacacttaaaagagccttagaagcaaaagaactagctcggcagcacctacgagaccaactggatgaagtggagaaagaaactagatcaaaactacaggagattgatattttcaataatcagctgaaggaactaagagaaatacacaataagcaacaactccagaagcaaaagtccatggaggctgaacgactgaaacagaaagaacaagaacgaaagatcatagaattagaaaaacaaaaagaagaagcccaaagacgagctcaggaaagggacaagcagtggctggagcatgtgcagcaggaggacgagcatcagagaccaagaaaactccacgaagaggaaaaactgaaaagggaggagagtgtcaaaaagaaggatggcgaggaaaaaggcaaacaggaagcacaagacaagctgggtcggcttttccatcaacaccaagaaccagctaagccagctgtccaggcaccctggtccactgcagaaaaaggtccacttaccatttctgcacaggaaaatgtaaaagtggtgtattaccgggcactgtacccctttgaatccagaagccatgatgaaatcactatccagccaggagacatagtcatggttaaaggggaatgggtggatgaaagccaaactggagaacccggctggcttggaggagaattaaaaggaaagacagggtggttccctgcaaactatgcagagaaaatcccagaaaatgaggttcccgctccagtgaaaccagtgactgattcaacatctgcccctgcccccaaactggccttgcgtgagacccccgcccctttggcagtaacctcttcagagccctccacgacccctaataactgggccgacttcagctccacgtggcccaccagcacgaatgagaaaccagaaacggataactgggatgcatgggcagcccagccctctctcaccgttccaagtgccggccagttaaggcagaggtccgcctttactccagccacggccactggctcctccccgtctcctgtgctaggccagggtgaaaaggtggaggggctacaagctcaagccctatatccttggagagccaaaaaagacaaccacttaaattttaacaaaaatgatgtcatcaccgtcctggaacagcaagacatgtggtggtttggagaagttcaaggtcagaagggttggttccccaagtcttacgtgaaactcatttcagggcccataaggaagtctacaagcatggattctggttcttcagagagtcctgctagtctaaagcgagtagcctctccagcagccaagccggtcgtttcgggagaagaaattgcccaggttattgcctcatacaccgccaccggccccgagcagctcactctcgcccctggtcagctgattttgatccgaaaaaagaacccaggtggatggtgggaaggagagctgcaagcacgtgggaaaaagcgccagataggctggttcccagctaattatgtaaagcttctaagccctgggacgagcaaaatcactccaacagagccacctaagtcaacagcattagcggcagtgtgccaggtgattgggatgtacgactacaccgcgcagaatgacgatgagctggccttcaacaagggccagatcatcaacgtcctcaacaaggaggaccctgactggtggaaaggagaagtcaatggacaagtggggctcttcccatccaattatgtgaagctgaccacagacatggacccaagccagcaatgaatcatatgttgtccatccccccctcaggcttgaaagtcctcaaagagacccactatcccatatcactgcccagagggatgatgggagatgcagccttgatcatgtgacttccagcatgatcacctactgccttctgagtagaagaactcactgcagagcagtttacctcattttaccttagttgcatgtgatcgcaatgtttgagttattacttgcagagataggagcaaaaattacaaaaacacacagggtagtgggtccttttgtggctttcctagttactcaaattgactttcccccacctt

SEQ ID NO: 14861 - DNA, 5722 bp, Homo sapiens
  source 1..5722: mol_type = unassigned DNA
agggagggagcgaaggaggtagagaagagtggaggcgccaggggagggagcgtagcttggttgctccgtagtacggcggctcgcgaggaagaatcccgagcgggctccgggacggacagagaggcgggcggggatggtgtgcggggctgcggctcctgcgtccctcccagcggcgcgtgagcggcactgatttgtccctggggcggcagcgcggacccgcccggagatgaggcgtcgattagcaaggtaaaagtaacagaaccatggctcagtttccaacaccttttggtggcagcctggatatctgggccataactgtagaggaaagagcgaagcatgatcagcagttccatagtttaaagccaatatctggattcattactggtgatcaagctagaaactttttttttcaatctgggttacctcaacctgttttagcacagatatgggcactagctgacatgaataatgatggaagaatggatcaagtggagttttccatagctatgaaacttatcaaactgaagctacaaggatatcagctaccctctgcacttccccctgtcatgaaacagcaaccagttgctatttctagcgcaccagcatttggtatgggaggtatcgccagcatgccaccgcttacagctgttgctccagtgccaatgggatccattccagttgttggaatgtctccaaccctagtatcttctgttcccacagcagctgtgccccccctggctaacggggctccccctgttatacaacctctgcctgcatttgctcatcctgcagccacattgccaaagagttcttcctttagtagatctggtccagggtcacaactaaacactaaattacaaaaggcacagtcatttgatgtggccagtgtcccaccagtggcagagtgggctgttcctcagtcatcaagactgaaatacaggcaattattcaatagtcatgacaaaactatgagtggacacttaacaggtccccaagcaagaactattcttatgcagtcaagtttaccacaggctcagctggcttcaatatggaatctttctgacattgatcaagatggaaaacttacagcagaggaatttatcctggcaatgcacctcattgatgtagctatgtctggccaaccactgccacctgtcctgcctccagaatacattccaccttcttttagaagagttcgatctggcagtggtatatctgtcataagctcaacatctgtagatcagaggctaccagaggaaccagttttagaagatgaacaacaacaattagaaaagaaattacctgtaacgtttgaagataagaagcgggagaactttgaacgtggcaacctggaactggagaaacgaaggcaagctctcctggaacagcagcgcaaggagcaggagcgcctggcccagctggagcgggcggagcaggagaggaaggagcgtgagcgccaggagcaagagcgcaaaagacaactggaactggagaagcaactggaaaagcagcgggagctagaacggcagagagaggaggagaggaggaaagaaattgagaggcgagaggctgcaaaacgggaacttgaaaggcaacgacaacttgagtgggaacggaatcgaaggcaagaactactaaatcaaagaaacaaagaacaagaggacatagttgtactgaaagcaaagaaaaagactttggaatttgaattagaagctctaaatgataaaaagcatcaactagaagggaaacttcaagatatcagatgtcgattgaccacccaaaggcaagaaattgagagcacaaacaaatctagagagttgagaattgccgaaatcacccatctacagcaacaattacaggaatctcagcaaatgcttggaagacttattccagaaaaacagatactcaatgaccaattaaaacaagttcagcagaacagtttgcacagagattcacttgttacacttaaaagagccttagaagcaaaagaactagctcggcagcacctacgagaccaactggatgaagtggagaaagaaactagatcaaaactacaggagattgatattttcaataatcagctgaaggaactaagagaaatacacaataagcaacaactccagaagcaaaagtccatggaggctgaacgactgaaacagaaagaacaagaacgaaagatcatagaattagaaaaacaaaaagaagaagcccaaagacgagctcaggaaagggacaagcagtggctggagcatgtgcagcaggaggacgagcatcagagaccaagaaaactccacgaagaggaaaaactgaaaagggaggagagtgtcaaaaagaaggatggcgaggaaaaaggcaaacaggaagcacaagacaagctgggtcggcttttccatcaacaccaagaaccagctaagccagctgtccaggcaccctggtccactgcagaaaaaggtccacttaccatttctgcacaggaaaatgtaaaagtggtgtattaccgggcactgtacccctttgaatccagaagccatgatgaaatcactatccagccaggagacatagtcatggtggatgaaagccaaactggagaacccggctggcttggaggagaattaaaaggaaagacagggtggttccctgcaaactatgcagagaaaatcccagaaaatgaggttcccgctccagtgaaaccagtgactgattcaacatctgcccctgcccccaaactggccttgcgtgagacccccgcccctttggcagtaacctcttcagagccctccacgacccctaataactgggccgacttcagctccacgtggcccaccagcacgaatgagaaaccagaaacggataactgggatgcatgggcagcccagccctctctcaccgttccaagtgccggccagttaaggcagaggtccgcctttactccagccacggccactggctcctccccgtctcctgtgctaggccagggtgaaaaggtggaggggctacaagctcaagccctatatccttggagagccaaaaaagacaaccacttaaattttaacaaaaatgatgtcatcaccgtcctggaacagcaagacatgtggtggtttggagaagttcaaggtcagaagggttggttccccaagtcttacgtgaaactcatttcagggcccataaggaagtctacaagcatggattctggttcttcagagagtcctgctagtctaaagcgagtagcctctccagcagccaagccggtcgtttcgggagaagaatttattgccatgtacacttacgagagttctgagcaaggagatttaacctttcagcaaggggatgtgattttggttaccaagaaagatggtgactggtggacaggaacagtgggcgacaaggccggagtcttcccttctaactatgtgaggcttaaagattcagagggctctggaactgctgggaaaacagggagtttaggaaaaaaacctgaaattgcccaggttattgcctcatacaccgccaccggccccgagcagctcactctcgcccctggtcagctgattttgatccgaaaaaagaacccaggtggatggtgggaaggagagctgcaagcacgtgggaaaaagcgccagataggctggttcccagctaattatgtaaagcttctaagccctgggacgagcaaaatcactccaacagagccacctaagtcaacagcattagcggcagtgtgccaggtgattgggatgtacgactacaccgcgcagaatgacgatgagctggccttcaacaagggccagatcatcaacgtcctcaacaaggaggaccctgactggtggaaaggagaagtcaatggacaagtggggctcttcccatccaattatgtgaagctgaccacagacatggacccaagccagcaatggtgttcagacttacatctcttggatatgttgaccccaactgaaagaaagcgacaaggatacatccacgagctcattgtcaccgaggagaactatgtgaatgacctgcagctggtcacagagatttttcaaaaacccctgatggagtctgagctgctgacagaaaaagaggttgctatgatttttgtgaactggaaggagctgattatgtgtaatatcaaactactaaaagcgctgagagtccgcaagaagatgtccggggagaagatgcctgtgaagatgattggagacatcctgagcgcacagctgccgcacatgcagccctacatccgcttctgcagccgccagctcaacggggctgccctgatccagcagaagacggatgaggccccagacttcaaggagttcgtcaaaagattggcaatggatcctcggtgtaaagggatgccactctctagttttatactgaagcctatgcaacgggtaacaagatacccactgatcattaaaaatatcctggaaaacacccctgaaaaccacccggaccacagccacttgaagcacgccctggagaaggcggaagagctctgttcccaggtgaacgaaggggtgcgggagaaggagaactctgaccggctggagtggatccaggcccacgtgcagtgtgaaggcctgtctgagcaacttgtgttcaattcagtgaccaattgcttggggccgcgcaaatttctgcacagtgggaagctctacaaggccaagagcaacaaggagctgtatggcttccttttcaacgacttcctcctgctgactcagatcacgaagcctttggggtcttctggcaccgacaaagtcttcagccccaaatcaaacctgcagtataaaatgtataaaacacctattttcctaaatgaggttctagtaaaattacccaccgacccttctggagacgagcccatcttccacatctcccacattgaccgcgtctatactctccgagcagaaagcataaatgaaaggactgcctgggtgcagaaaatcaaagctgcttctgaactctacatagagactgagaaaaagaagcgcgagaaagcgtacctggtccgttcccaaagggcaacaggcattggaaggttgatggtgaacgtggttgaaggcatcgagttgaaaccctgtcggtcacatggaaagagcaacccgtactgtgaggtgaccatgggttcccagtgccacatcaccaagacgatccaggacactctgaaccccaagtggaattccaactgccagttcttcatccgagacctggagcaggaagtcctctgcatcactgtgttcgagagggaccagttctcaccagatgattttttgggtcggacggagatccgtgtggcggacatcaagaaagaccagggctccaaaggtccagttacgaagtgtcttctgctgcacgaagtccccacgggagagattgtggtccgcttggacctgcagttgtttgatgagccgtaggcagcgggctcagggtgtgctcagcagggtcccagcccacggccacacatgctgtctggaaattgtattccttttctaagaaaccaccatttggtattcagtcacagggatatgggatggcaaagacaggcccctcaaagctcctaggaatcattctcgacaatcctccctgccccgaaacaatttcctgtttcatgaaacaaagctgtgttttcctttgtcctcactacaggtctcattatggcttctagggtcgctgaaatcccatagccctcaacagggtgcagctgggagtctagccccttccc

SEQ ID NO: 14862 - DNA, 4992 bp, Homo sapiens
  source 1..4992: mol_type = unassigned DNA
catggctcagtttccaacaccttttggtggcagcctggatatctgggccataactgtagaggaaagagcgaagcatgatcagcagttccatagtttaaagccaatatctggattcattactggtgatcaagctagaaactttttttttcaatctgggttacctcaacctgttttagcacagatatgggcactagctgacatgaataatgatggaagaatggatcaagtggagttttccatagctatgaaacttatcaaactgaagctacaaggatatcagctaccctctgcacttccccctgtcatgaaacagcaaccagttgctatttctagcgcaccagcatttggtatgggaggtatcgccagcatgccaccgcttacagctgttgctccagtgccaatgggatccattccagttgttggaatgtctccaaccctagtatcttctgttcccacagcagctgtgccccccctggctaacggggctccccctgttatacaacctctgcctgcatttgctcatcctgcagccacattgccaaagagttcttcctttagtagatctggtccagggtcacaactaaacactaaattacaaaaggcacagtcatttgatgtggccagtgtcccaccagtggcagagtgggctgttcctcagtcatcaagactgaaatacaggcaattattcaatagtcatgacaaaactatgagtggacacttaacaggtccccaagcaagaactattcttatgcagtcaagtttaccacaggctcagctggcttcaatatggaatctttctgacattgatcaagatggaaaacttacagcagaggaatttatcctggcaatgcacctcattgatgtagctatgtctggccaaccactgccacctgtcctgcctccagaatacattccaccttcttttagaagagttcgatctggcagtggtatatctgtcataagctcaacatctgtagatcagaggctaccagaggaaccagttttagaagatgaacaacaacaattagaaaagaaattacctgtaacgtttgaagataagaagcgggagaactttgaacgtggcaacctggaactggagaaacgaaggcaagctctcctggaacagcagcgcaaggagcaggagcgcctggcccagctggagcgggcggagcaggagaggaaggagcgtgagcgccaggagcaagagcgcaaaagacaactggaactggagaagcaactggaaaagcagcgggagctagaacggcagagagaggaggagaggaggaaagaaattgagaggcgagaggctgcaaaacgggaacttgaaaggcaacgacaacttgagtgggaacggaatcgaaggcaagaactactaaatcaaagaaacaaagaacaagaggacatagttgtactgaaagcaaagaaaaagactttggaatttgaattagaagctctaaatgataaaaagcatcaactagaagggaaacttcaagatatcagatgtcgattgaccacccaaaggcaagaaattgagagcacaaacaaatctagagagttgagaattgccgaaatcacccatctacagcaacaattacaggaatctcagcaaatgcttggaagacttattccagaaaaacagatactcaatgaccaattaaaacaagttcagcagaacagtttgcacagagattcacttgttacacttaaaagagccttagaagcaaaagaactagctcggcagcacctacgagaccaactggatgaagtggagaaagaaactagatcaaaactacaggagattgatattttcaataatcagctgaaggaactaagagaaatacacaataagcaacaactccagaagcaaaagtccatggaggctgaacgactgaaacagaaagaacaagaacgaaagatcatagaattagaaaaacaaaaagaagaagcccaaagacgagctcaggaaagggacaagcagtggctggagcatgtgcagcaggaggacgagcatcagagaccaagaaaactccacgaagaggaaaaactgaaaagggaggagagtgtcaaaaagaaggatggcgaggaaaaaggcaaacaggaagcacaagacaagctgggtcggcttttccatcaacaccaagaaccagctaagccagctgtccaggcaccctggtccactgcagaaaaaggtccacttaccatttctgcacaggaaaatgtaaaagtggtgtattaccgggcactgtacccctttgaatccagaagccatgatgaaatcactatccagccaggagacatagtcatggtggatgaaagccaaactggagaacccggctggcttggaggagaattaaaaggaaagacagggtggttccctgcaaactatgcagagaaaatcccagaaaatgaggttcccgctccagtgaaaccagtgactgattcaacatctgcccctgcccccaaactggccttgcgtgagacccccgcccctttggcagtaacctcttcagagccctccacgacccctaataactgggccgacttcagctccacgtggcccaccagcacgaatgagaaaccagaaacggataactgggatgcatgggcagcccagccctctctcaccgttccaagtgccggccagttaaggcagaggtccgcctttactccagccacggccactggctcctccccgtctcctgtgctaggccagggtgaaaaggtggaggggctacaagctcaagccctatatccttggagagccaaaaaagacaaccacttaaattttaacaaaaatgatgtcatcaccgtcctggaacagcaagacatgtggtggtttggagaagttcaaggtcagaagggttggttccccaagtcttacgtgaaactcatttcagggcccataaggaagtctacaagcatggattctggttcttcagagagtcctgctagtctaaagcgagtagcctctccagcagccaagccggtcgtttcgggagaagaatttattgccatgtacacttacgagagttctgagcaaggagatttaacctttcagcaaggggatgtgattttggttaccaagaaagatggtgactggtggacaggaacagtgggcgacaaggccggagtcttcccttctaactatgtgaggcttaaagattcagagggctctggaactgctgggaaaacagggagtttaggaaaaaaacctgaaattgcccaggttattgcctcatacaccgccaccggccccgagcagctcactctcgcccctggtcagctgattttgatccgaaaaaagaacccaggtggatggtgggaaggagagctgcaagcacgtgggaaaaagcgccagataggctggttcccagctaattatgtaaagcttctaagccctgggacgagcaaaatcactccaacagagccacctaagtcaacagcattagcggcagtgtgccaggtgattgggatgtacgactacaccgcgcagaatgacgatgagctggccttcaacaagggccagatcatcaacgtcctcaacaaggaggaccctgactggtggaaaggagaagtcaatggacaagtggggctcttcccatccaattatgtgaagctgaccacagacatggacccaagccagcaatggtgttcagacttacatctcttggatatgttgaccccaactgaaagaaagcgacaaggatacatccacgagctcattgtcaccgaggagaactatgtgaatgacctgcagctggtcacagagatttttcaaaaacccctgatggagtctgagctgctgacagaaaaagaggttgctatgatttttgtgaactggaaggagctgattatgtgtaatatcaaactactaaaagcgctgagagtccgcaagaagatgtccggggagaagatgcctgtgaagatgattggagacatcctgagcgcacagctgccgcacatgcagccctacatccgcttctgcagccgccagctcaacggggctgccctgatccagcagaagacggatgaggccccagacttcaaggagttcgtcaaaagattggcaatggatcctcggtgtaaagggatgccactctctagttttatactgaagcctatgcaacgggtaacaagatacccactgatcattaaaaatcaacttgtgttcaattcagtgaccaattgcttggggccgcgcaaatttctgcacagtgggaagctctacaaggccaagagcaacaaggagctgtatggcttccttttcaacgacttcctcctgctgactcagatcacgaagcctttggggtcttctggcaccgacaaagtcttcagccccaaatcaaacctgcagtataaaatgtataaaacacctattttcctaaatgaggttctagtaaaattacccaccgacccttctggagacgagcccatcttccacatctcccacattgaccgcgtctatactctccgagcagaaagcataaatgaaaggactgcctgggtgcagaaaatcaaagctgcttctgaactctacatagagactgagaaaaagaagcgcgagaaagcgtacctggtccgttcccaaagggcaacaggcattggaaggttgatggtgaacgtggttgaaggcatcgagttgaaaccctgtcggtcacatggaaagagcaacccgtactgtgaggtgaccatgggttcccagtgccacatcaccaagacgatccaggacactctgaaccccaagtggaattccaactgccagttcttcatccgagacctggagcaggaagtcctctgcatcactgtgttcgagagggaccagttctcaccagatgattttttgggtcggacggagatccgtgtggcggacatcaagaaagaccagggctccaaaggtccagttacgaagtgtcttctgctgcacgaagtccccacgggagagattgtggtccgcttggacctgcagttgtttgatgagccgtaggcagcggg

SEQ ID NO: 14863 - DNA, 827 bp, Homo sapiens
  source 1..827: mol_type = unassigned DNA
agatgaggagataggcgggagcgagggagcgagggagggagcgaaggaggtagagaagagtggaggcgccaggggagggagcgtagcttggttgctccgtagtacggcggctcgcgaggaagaatcccgagcgggctccgggacggacagagaggcgggcggggatggtgtgcggggctgcggctcctgcgtccctcccagcggcgcgtgagcggcactgatttgtccctggggcggcagcgcggacccgcccggagatgaggtttaagctgtcaccttcccaaatgcggcatctgtgtagccccagagggagcattctaaaaggcagcacttagatgagttgatcccttcacaccccacccagcagttcgttctacctggcaaaacttaacagcttcggtgaagaaacctccacattactgaacatttggaggtgtcccaatgaaaaggcgtcgattagcaaggtaaaagtaacagaaccatggctcagtttccaacaccttttggtggcagcctggatatctgggccataactgtagaggaaagagcgaagcatgatcagcagttccatagtttaaagccaatatctggattcattactggtgatcaagctagaaactttttttttcaatctgggttacctcaacctgttttagcacagatatgggcactagctgacatgaataatgatggaagaatggatcaagtggagttttccatagctatgaaacttatcaaactgaagctacaaggatatcagctaccctctgcacttccccctgtcatgaaacagcaaccagttgctatttctagcgcaccagcatttg

SEQ ID NO: 14864 - DNA, 501 bp, Homo sapiens
  source 1..501: mol_type = unassigned DNA
gttgctccgtagtacggcggctcgcgaggaagaatcccgagcgggctccgggacggacagagaggcgggcggggatggtgtgcggggctgcggctcctgcgtccctcccagcggcgcgtgagcggcactgatttgtccctggggcggcagcgcggacccgcccggagatgaggtttaagctgtcaccttcccaaatgcggcatctgtgtagccccagagggagcattctaaaaggcgtcgattagcaaggtaaaagtaacagaaccatggctcagtttccaacaccttttggtggcagcctggatatctgggccataactgtagaggaaagagcgaagcatgatcagcagttccatagtttaaagccaatatctggattcattactggtgatcaagctagaaactttttttttcaatctgggttacctcaacctgttttagcacagatatgggcactagctgacatgaataatgatggaagaatggatcaagtggagtttt

SEQ ID NO: 14865 - DNA, 6300 bp, Homo sapiens
  source 1..6300: mol_type = unassigned DNA
gcttcggacccgaccgactcggagcagaccttcagggttcaatgccccggaactcctggggcgaggagccacgcccgggcagtttcgggctccggagggtggggagtcggtgcccggcagcgggcgggccgtcagctgcccggcccggcgcctacctccccgccccccggcttcctgcggaggccgcggccgccatgttgttgtggggctgaggcggcgccggcggagccctgagcggctgtgacaggctacgcaacaggttcgcgggcggcggcctgacgaccaagccagctgcagtggcggcgacggcggcagagcagggtctccccgcgcctgcccgcgcccaggctgccggtgctgagggacgcggagtcgcgctgtgacgagcgggaggcgcggcgagggcgccagatggctgagagctagcaaggaaaactcaggaccatgatggctcagtttcccacagctatgaatggagggccaaacatgtgggctattacctctgaagaacgtactaagcatgacaggcagtttgataacctcaaaccttcaggaggttacataacaggtgatcaagcacgtaattttttcctacaatcaggtctgccggcccctgttttagctgaaatatgggctttatcagacctaaacaaggatgggaagatggatcagcaagagttctccatagctatgaaactcatcaaactgaagcttcaaggccaacagttgcctgtggttctccctcctattatgaagcaaccccctatgttttctccattaatttctgctcgttttggaatgggaagcatgcccaatctgtccattcctcagccattgcctccagctgcacctataacatcattgtcttctgcgacttcagggaccaaccttcctcccttaatgatgcccactcccctagtgccttctgttagcacatcatcattaccaaatggaaccgccagtctcattcagcctttacccattccttattcttcttcaacattgcctcatgggtcatcttatagtctgatgatgggaggatttggaggtgctagtatacagaaagcgcagtctctgattgatttaggatctagtagctcaacttcctcgactgcttcactctcagggaactcacccaagactgggacctcagagtgggcagttcctcagcctacaagattaaaatatcggcaaaaatttaatactcttgacaaaagtatgagtggatatctctcaggttttcaagctagaaatgcccttcttcagtcaaatctttctcaaactcagctggctactatttggactctggctgacgttgatggtgatggacagctaaaagcagaagagtttattcttgcaatgcaccttactgacatggccaaagctggacagccattaccactgactttacctcctgagcttgttcctccatctttcagaggaggaaagcaaattgattccattaatggaactctgccttcatatcagaaaatgcaagaagaggagcctcagaagaaattaccagttacttttgaggacaaacggaaagccaactatgagcgagggaacatggagctggaaaagcgacgccaagccttgatggagcagcaacaaagggaggcagaacgtaaagcccagaaagaaaaggaagagtgggaacgaaaacagagagaattacaagaacaagaatggaagaaacaacttgaattagaaaaacgcttagagaagcaacgggaattggagagacaacgagaggaagaaaggagaaaagacatagaaagacgagaggcagcaaaacaggaacttgaacgacaacgtcgcttagaatgggagagaattcggcgacaggagcttctcaatcaaaagaatagagaacaagaagaaattgtcaggttaaactctaaaaagaagaatcttcatcttgagttggaagcactgaatggcaaacatcagcagatctcaggcagacttcaggatgtccgactcaaaaagcaaactcaaaagactgagctggaagttctggataagcagtgtgacttggaaattatggaaatcaagcaacttcaacaggaacttcaggaatatcagaataagcttatctatctggtacctgagaagcaattattaaatgaaagaattaaaaacatgcagttcagtaacacacctgattcaggggtcagtttacttcataaaaaatcattagaaaaggaagaattatgccaaagacttaaagaacagttagatgctcttgaaaaagaaactgcatctaagctgtcagaaatggattcttttaacaatcaactaaagtgtgggaatatggatgactctgttcttcagtgccttttgtctctgctaagctgtctcaacaacctcttcctcttacttaaggaactgagagaaacctacaacacacagcagttagcccttgaacagctttataagatcaaacgtgacaagttgaaggaaattgaaaggaaaagattagaactaatgcagaaaaagaaactagaagatgaggctgcaaggaaagcaaagcaaggaaaagaaaacttatggaaagaaaatcttagaaaggaggaagaagaaaaacaaaagcgactccaggaagaaaaaacacaagaaaaaattcaagaagaggaacggaaagctgaggagaaacaacgtaaggataaggatactttgaaagctgaggagaaaaaacgtgagacagctagtgttttggtgaattatagagcattatacccctttgaagcaaggaaccatgatgagatgagttttaattctggagatataattcaggttgatgaaaaaaccgtaggagaacctggttggctttatggtagttttcaaggaaattttggctggtttccatgcaattatgtagaaaaaatgccatcaagtgaaaatgaaaaagctgtatctccaaagaaggccttacttcctcctacagtttctttatctgctacctcaacttcctctgaaccactttcttcaaatcaaccagcatcagtgactgattatcaaaatgtatctttttcaaacctaactgtaaatacatcatggcagaaaaaatcagccttcactcgaactgtgtcccctggatctgtatcacctattcatggacagggacaagtggtagaaaacttaaaagcacaggccctttgttcctggactgcaaagaaagataaccacttgaacttctcaaaacatgacattattactgtcttggagcagcaagaaaattggtggtttggggaggtgcatggaggaagaggatggtttcccaaatcttatgtcaagatcattcctgggagtgaagtaaaacgggaagaaccagaagctttgtatgcagctgtaaataagaaacctacctcggcagcctattcagttggagaagaatatattgcactttatccatattcaagtgtggaacctggagatttgactttcacagaaggtgaagaaatattggtgacccagaaagatggagagtggtggacaggaagtattggagatagaagtggaatttttccatcaaactatgtcaaaccaaaggatcaagagagttttgggagtgctagcaagtctggagcatcaaataaaaaacctgagattgctcaggtaacttcagcatatgttgcttctggttctgaacaacttagccttgcaccaggacagttaatattaattctaaagaaaaatacaagtgggtggtggcaaggagagttacaggccagaggaaaaaagcgacagaaaggatggtttcctgccagtcatgttaaacttttgggtccaagtagtgaaagagccacacctgcctttcatcctgtatgtcaggtgattgctatgtatgactatgcagcaaataatgaagatgagctcagtttctccaagggacaactcattaatgttatgaacaaagatgatcctgattggtggcaaggagagatcaacggggtgactggtctctttccttcaaactacgttaagatgacgacagactcagatccaagtcaacagtggtgtgctgatctgcaaaccctggacacaatgcagccaattgagaggaaaagacagggctatattcatgagctgattcagaccgaagagcggtacatggctgaccttcagctcgtcgtcgaggtttttcagaaacgcatggcagagtcaggctttctcactgaaggggagatggccctgatttttgttaactggaaggagctcatcatgtccaacacaaagctgctgaaggctttgcgggtgcggaagaagaccgggggcgagaagatgccggtgcagatgattggggacatcctggccgctgagctgtcccacatgcaggcttacatcaggttctgcagctgccagcttaatggagcagctctgttacagcagaagacagatgaagacacagatttcaaagaatttttaaagaagctggcatctgacccgcggtgtaaaggaatgcccctctccagcttcctgctgaaacccatgcagaggatcacccgctacccactgctcatcagaagtattctggagaacaccccggagagccatgcagaccattcctccctaaagctggccctcgagcgggcagaggagctgtgctctcaagtgaatgagggagttcgggagaaggaaaactcggaccgactggagtggatccaggcgcacgtgcagtgtgaaggcctcgcggagcaacttattttcaactctctcaccaactgcctggggccccggaagctcttacacagtgggaaattatacaagaccaagagcaacaaggaactgcacggattcctcttcaatgacttcctgcttcttacctacatggtcaagcagtttgctgtttcctctggctctgagaaacttttcagctcgaagtccaatgctcaattcaaaatgtataaaacgcccattttcctgaatgaagtcttggtgaaactgcccacagacccttccagcgatgagcctgtcttccacatttcccacattgatcgggtctacaccctccgaacagacaacattaatgagaggaccgcctgggtgcagaagatcaaggcggcgtctgagcagtacatcgacaccgagaagaagaagcgtgagaaagcttaccaagcccgctcccaaaagacttcaggcattgggcgcctgatggtgcatgtcattgaagctacagaattaaaagcctgcaaaccaaatggaaagagcaacccatactgtgaaatcagcatgggctcccagagctacaccaccaggaccatccaggacacactcaatcccaagtggaattttaactgccagttctttattaaggatctctaccaagacgtgctgtgtctcaccctgtttgacagagaccagttttcaccagatgatttcctgggtcgtactgaaattccagtggcaaaaattcgaacagaacaggaaagcaaaggccctatgacccgccgactgctgctgcatgaggtccccaccggggaggtctgggtccgttttgacctgcagctttttgagcaaaaaactctcctgtaggggttctaaaggacagcaccagcgggacagcccacaaggctggggctggagaatgagagactgcgctctcttggggctgagggagcaccatgcagcttcacccctcacaaagccatgcacgctgggggctctgttttcctgcacactaaatagctagcaatctatgcaaacacctttcccataaagaaaccaaaccccatagtacagtgccttgtcctagtgttcacatgttcagctctgtttgtttagatgccaaggtttccattttcagggctataaaaagtattacttggaaatgaggcatcagaccaccagatgttaccgctcggttgaatgtgtccaccgtggagtggtttggtgacgctgtaaccattccacgccagtgacctctgctgggtcacagccactcaggaggggaagggtcaggatgagaggctgcagcctcgacacttggcgcggcctgatactgaaatagcgtctactcgtgcactgaataaaaacagaaacttgatcattttattcctgattagattttatcactctctgctaagacaatatagtctggagtataagtgggaaagcttgatttaaatactgtgaactctaataatgtggaaaatatttttcaactttaattttctgaagtataaattatttatgtaaattcattgtttttgcatatttcttaggacatgcatctttaagctttatcattgcccatatgtacagaaagagaataaagacatatgtttatggatggaa

SEQ ID NO: 14866 - DNA, 5811 bp, Homo sapiens
  source 1..5811: mol_type = unassigned DNA
cagatggctgagagctagcaaggaaaactcaggaccatgatggctcagtttcccacagctatgaatggagggccaaacatgtgggctattacctctgaagaacgtactaagcatgacaggcagtttgataacctcaaaccttcaggaggttacataacaggtgatcaagcacgtaattttttcctacaatcaggtctgccggcccctgttttagctgaaatatgggctttatcagacctaaacaaggatgggaagatggatcagcaagagttctccatagctatgaaactcatcaaactgaagcttcaaggccaacagttgcctgtggttctccctcctattatgaagcaaccccctatgttttctccattaatttctgctcgttttggaatgggaagcatgcccaatctgtccattcctcagccattgcctccagctgcacctataacatcattgtcttctgcgacttcagggaccaaccttcctcccttaatgatgcccactcccctagtgccttctgttagcacatcatcattaccaaatggaaccgccagtctcattcagcctttacccattccttattcttcttcaacattgcctcatgggtcatcttatagtctgatgatgggaggatttggaggtgctagtatacagaaagcgcagtctctgattgatttaggatctagtagctcaacttcctcgactgcttcactctcagggaactcacccaagactgggacctcagagtgggcagttcctcagcctacaagattaaaatatcggcaaaaatttaatactcttgacaaaagtatgagtggatatctctcaggttttcaagctagaaatgcccttcttcagtcaaatctttctcaaactcagctggctactatttggactctggctgacgttgatggtgatggacagctaaaagcagaagagtttattcttgcaatgcaccttactgacatggccaaagctggacagccattaccactgactttacctcctgagcttgttcctccatctttcagaggaggaaagcaaattgattccattaatggaactctgccttcatatcagaaaatgcaagaagaggagcctcagaagaaattaccagttacttttgaggacaaacggaaagccaactatgagcgagggaacatggagctggaaaagcgacgccaagccttgatggagcagcaacaaagggaggcagaacgtaaagcccagaaagaaaaggaagagtgggaacgaaaacagagagaattacaagaacaagaatggaagaaacaacttgaattagaaaaacgcttagagaagcaacgggaattggagagacaacgagaggaagaaaggagaaaagacatagaaagacgagaggcagcaaaacaggaacttgaacgacaacgtcgcttagaatgggagagaattcggcgacaggagcttctcaatcaaaagaatagagaacaagaagaaattgtcaggttaaactctaaaaagaagaatcttcatcttgagttggaagcactgaatggcaaacatcagcagatctcaggcagacttcaggatgtccgactcaaaaagcaaactcaaaagactgagctggaagttctggataagcagtgtgacttggaaattatggaaatcaagcaacttcaacaggaacttcaggaatatcagaataagcttatctatctggtacctgagaagcaattattaaatgaaagaattaaaaacatgcagttcagtaacacacctgattcaggggtcagtttacttcataaaaaatcattagaaaaggaagaattatgccaaagacttaaagaacagttagatgctcttgaaaaagaaactgcatctaagctgtcagaaatggattcttttaacaatcaactaaaggaactgagagaaacctacaacacacagcagttagcccttgaacagctttataagatcaaacgtgacaagttgaaggaaattgaaaggaaaagattagaactaatgcagaaaaagaaactagaagatgaggctgcaaggaaagcaaagcaaggaaaagaaaacttatggaaagaaaatcttagaaaggaggaagaagaaaaacaaaagcgactccaggaagaaaaaacacaagaaaaaattcaagaagaggaacggaaagctgaggagaaacaacgtaaggataaggatactttgaaagctgaggagaaaaaacgtgagacagctagtgttttggtgaattatagagcattatacccctttgaagcaaggaaccatgatgagatgagttttaattctggagatataattcaggttgatgaaaaaaccgtaggagaacctggttggctttatggtagttttcaaggaaattttggctggtttccatgcaattatgtagaaaaaatgccatcaagtgaaaatgaaaaagctgtatctccaaagaaggccttacttcctcctacagtttctttatctgctacctcaacttcctctgaaccactttcttcaaatcaaccagcatcagtgactgattatcaaaatgtatctttttcaaacctaactgtaaatacatcatggcagaaaaaatcagccttcactcgaactgtgtcccctggatctgtatcacctattcatggacagggacaagtggtagaaaacttaaaagcacaggccctttgttcctggactgcaaagaaagataaccacttgaacttctcaaaacatgacattattactgtcttggagcagcaagaaaattggtggtttggggaggtgcatggaggaagaggatggtttcccaaatcttatgtcaagatcattcctgggagtgaagtaaaacgggaagaaccagaagctttgtatgcagctgtaaataagaaacctacctcggcagcctattcagttggagaagaatatattgcactttatccatattcaagtgtggaacctggagatttgactttcacagaaggtgaagaaatattggtgacccagaaagatggagagtggtggacaggaagtattggagatagaagtggaatttttccatcaaactatgtcaaaccaaaggatcaagagagttttgggagtgctagcaagtctggagcatcaaataaaaaacctgagattgctcaggtaacttcagcatatgttgcttctggttctgaacaacttagccttgcaccaggacagttaatattaattctaaagaaaaatacaagtgggtggtggcaaggagagttacaggccagaggaaaaaagcgacagaaaggatggtttcctgccagtcatgttaaacttttgggtccaagtagtgaaagagccacacctgcctttcatcctgtatgtcaggtgattgctatgtatgactatgcagcaaataatgaagatgagctcagtttctccaagggacaactcattaatgttatgaacaaagatgatcctgattggtggcaaggagagatcaacggggtgactggtctctttccttcaaactacgttaagatgacgacagactcagatccaagtcaacagtggtgtgctgatctgcaaaccctggacacaatgcagccaattgagaggaaaagacagggctatattcatgagctgattcagaccgaagagcggtacatggctgaccttcagctcgtcgtcgaggtttttcagaaacgcatggcagagtcaggctttctcactgaaggggagatggccctgatttttgttaactggaaggagctcatcatgtccaacacaaagctgctgaaggctttgcgggtgcggaagaagaccgggggcgagaagatgccggtgcagatgattggggacatcctggccgctgagctgtcccacatgcaggcttacatcaggttctgcagctgccagcttaatggagcagctctgttacagcagaagacagatgaagacacagatttcaaagaatttttaaagaagctggcatctgacccgcggtgtaaaggaatgcccctctccagcttcctgctgaaacccatgcagaggatcacccgctacccactgctcatcagaagtattctggagaacaccccggagagccatgcagaccattcctccctaaagctggccctcgagcgggcagaggagctgtgctctcaagtgaatgagggagttcgggagaaggaaaactcggaccgactggagtggatccaggcgcacgtgcagtgtgaaggcctcgcggagcaacttattttcaactctctcaccaactgcctggggccccggaagctcttacacagtgggaaattatacaagaccaagagcaacaaggaactgcacggattcctcttcaatgacttcctgcttcttacctacatggtcaagcagtttgctgtttcctctggctctgagaaacttttcagctcgaagtccaatgctcaattcaaaatgtataaaacgcccattttcctgaatgaagtcttggtgaaactgcccacagacccttccagcgatgagcctgtcttccacatttcccacattgatcgggtctacaccctccgaacagacaacattaatgagaggaccgcctgggtgcagaagatcaaggcggcgtctgagcagtacatcgacaccgagaagaagaagcgtgagaaagcttaccaagcccgctcccaaaagacttcaggcattgggcgcctgatggtgcatgtcattgaagctacagaattaaaagcctgcaaaccaaatggaaagagcaacccatactgtgaaatcagcatgggctcccagagctacaccaccaggaccatccaggacacactcaatcccaagtggaattttaactgccagttctttattaaggatctctaccaagacgtgctgtgtctcaccctgtttgacagagaccagttttcaccagatgatttcctgggtcgtactgaaattccagtggcaaaaattcgaacagaacaggaaagcaaaggccctatgacccgccgactgctgctgcatgaggtccccaccggggaggtctgggtccgttttgacctgcagctttttgagcaaaaaactctcctgtaggggttctaaaggacagcaccagcgggacagcccacaaggctggggctggagaatgagagactgcgctctcttggggctgagggagcaccatgcagcttcacccctcacaaagccatgcacgctgggggctctgttttcctgcacactaaatagctagcaatctatgcaaacacctttcccataaagaaaccaaaccccatagtacagtgccttgtcctagtgttcacatgttcagctctgtttgtttagatgccaaggtttccattttcagggctataaaaagtattacttggaaatgaggcatcagaccaccagatgttaccgctcggttgaatgtgtccaccgtggagtggtttggtgacgctgtaaccattccacgccagtgacctctgctgggtcacagccactcaggaggggaagggtcaggatgagaggctgcagcctcgacacttggcgcggcctgatactgaaatagcgtctactcgtgcactgaataaaaacagaaacttgatcattttattcctgattagattttatcactctctgctaagacaatatagtctggagtataagtgggaaagcttgatttaaatactgtgaactctaataatgtggaaaatatttttcaactttaattttctgaagtataaattatttatgtaaattcattgtttttgcatatttcttaggacatgcatctttaagctttatcattgcccatatgtacagaaagagaataaagacatatgtttatggatggaa

SEQ ID NO: 14867 - DNA, 6031 bp, Homo sapiens
  source 1..6031: mol_type = unassigned DNA
cggccgccatgttgttgtggggctgaggcggcgccggcggagccctgagcggctgtgacaggctacgcaacaggttcgcgggcggcggcctgacgaccaagccagctgcagtggcggcgacggcggcagagcagggtctccccgcgcctgcccgcgcccaggctgccggtgctgagggacgcggagtcgcgctgtgacgagcgggaggcgcggcgagggcgccagatggctgagagctagcaaggaaaactcaggaccatgatggctcagtttcccacagctatgaatggagggccaaacatgtgggctattacctctgaagaacgtactaagcatgacaggcagtttgataacctcaaaccttcaggaggttacataacaggtgatcaagcacgtaattttttcctacaatcaggtctgccggcccctgttttagctgaaatatgggctttatcagacctaaacaaggatgggaagatggatcagcaagagttctccatagctatgaaactcatcaaactgaagcttcaaggccaacagttgcctgtggttctccctcctattatgaagcaaccccctatgttttctccattaatttctgctcgttttggaatgggaagcatgcccaatctgtccattcctcagccattgcctccagctgcacctataacatcattgtcttctgcgacttcagggaccaaccttcctcccttaatgatgcccactcccctagtgccttctgttagcacatcatcattaccaaatggaaccgccagtctcattcagcctttacccattccttattcttcttcaacattgcctcatgggtcatcttatagtctgatgatgggaggatttggaggtgctagtatacagaaagcgcagtctctgattgatttaggatctagtagctcaacttcctcgactgcttcactctcagggaactcacccaagactgggacctcagagtgggcagttcctcagcctacaagattaaaatatcggcaaaaatttaatactcttgacaaaagtatgagtggatatctctcaggttttcaagctagaaatgcccttcttcagtcaaatctttctcaaactcagctggctactatttggactctggctgacgttgatggtgatggacagctaaaagcagaagagtttattcttgcaatgcaccttactgacatggccaaagctggacagccattaccactgactttacctcctgagcttgttcctccatctttcagaggaggaaagcaaattgattccattaatggaactctgccttcatatcagaaaatgcaagaagaggagcctcagaagaaattaccagttacttttgaggacaaacggaaagccaactatgagcgagggaacatggagctggaaaagcgacgccaagccttgatggagcagcaacaaagggaggcagaacgtaaagcccagaaagaaaaggaagagtgggaacgaaaacagagagaattacaagaacaagaatggaagaaacaacttgaattagaaaaacgcttagagaagcaacgggaattggagagacaacgagaggaagaaaggagaaaagacatagaaagacgagaggcagcaaaacaggaacttgaacgacaacgtcgcttagaatgggagagaattcggcgacaggagcttctcaatcaaaagaatagagaacaagaagaaattgtcaggttaaactctaaaaagaagaatcttcatcttgagttggaagcactgaatggcaaacatcagcagatctcaggcagacttcaggatgtccgactcaaaaagcaaactcaaaagactgagctggaagttctggataagcagtgtgacttggaaattatggaaatcaagcaacttcaacaggaacttcaggaatatcagaataagcttatctatctggtacctgagaagcaattattaaatgaaagaattaaaaacatgcagttcagtaacacacctgattcaggggtcagtttacttcataaaaaatcattagaaaaggaagaattatgccaaagacttaaagaacagttagatgctcttgaaaaagaaactgcatctaagctgtcagaaatggattcttttaacaatcaactaaaggaactgagagaaacctacaacacacagcagttagcccttgaacagctttataagatcaaacgtgacaagttgaaggaaattgaaaggaaaagattagaactaatgcagaaaaagaaactagaagatgaggctgcaaggaaagcaaagcaaggaaaagaaaacttatggaaagaaaatcttagaaaggaggaagaagaaaaacaaaagcgactccaggaagaaaaaacacaagaaaaaattcaagaagaggaacggaaagctgaggagaaacaacgtaaggataaggatactttgaaagctgaggagaaaaaacgtgagacagctagtgttttggtgaattatagagcattatacccctttgaagcaaggaaccatgatgagatgagttttaattctggagatataattcaggttgatgaaaaaaccgtaggagaacctggttggctttatggtagttttcaaggaaattttggctggtttccatgcaattatgtagaaaaaatgccatcaagtgaaaatgaaaaagctgtatctccaaagaaggccttacttcctcctacagtttctttatctgctacctcaacttcctctgaaccactttcttcaaatcaaccagcatcagtgactgattatcaaaatgtatctttttcaaacctaactgtaaatacatcatggcagaaaaaatcagccttcactcgaactgtgtcccctggatctgtatcacctattcatggacagggacaagtggtagaaaacttaaaagcacaggccctttgttcctggactgcaaagaaagataaccacttgaacttctcaaaacatgacattattactgtcttggagcagcaagaaaattggtggtttggggaggtgcatggaggaagaggatggtttcccaaatcttatgtcaagatcattcctgggagtgaagtaaaacgggaagaaccagaagctttgtatgcagctgtaaataagaaacctacctcggcagcctattcagttggagaagaatatattgcactttatccatattcaagtgtggaacctggagatttgactttcacagaaggtgaagaaatattggtgacccagaaagatggagagtggtggacaggaagtattggagatagaagtggaatttttccatcaaactatgtcaaaccaaaggatcaagagagttttgggagtgctagcaagtctggagcatcaaataaaaaacctgagattgctcaggtaacttcagcatatgttgcttctggttctgaacaacttagccttgcaccaggacagttaatattaattctaaagaaaaatacaagtgggtggtggcaaggagagttacaggccagaggaaaaaagcgacagaaaggatggtttcctgccagtcatgttaaacttttgggtccaagtagtgaaagagccacacctgcctttcatcctgtatgtcaggtgattgctatgtatgactatgcagcaaataatgaagatgagctcagtttctccaagggacaactcattaatgttatgaacaaagatgatcctgattggtggcaaggagagatcaacggggtgactggtctctttccttcaaactacgttaagatgacgacagactcagatccaagtcaacagtggtgtgctgatctgcaaaccctggacacaatgcagccaattgagaggaaaagacagggctatattcatgagctgattcagaccgaagagcggtacatggctgaccttcagctcgtcgtcgaggtttttcagaaacgcatggcagagtcaggctttctcactgaaggggagatggccctgatttttgttaactggaaggagctcatcatgtccaacacaaagctgctgaaggctttgcgggtgcggaagaagaccgggggcgagaagatgccggtgcagatgattggggacatcctggccgctgagctgtcccacatgcaggcttacatcaggttctgcagctgccagcttaatggagcagctctgttacagcagaagacagatgaagacacagatttcaaagaatttttaaagaagctggcatctgacccgcggtgtaaaggaatgcccctctccagcttcctgctgaaacccatgcagaggatcacccgctacccactgctcatcagaagtattctggagaacaccccggagagccatgcagaccattcctccctaaagctggccctcgagcgggcagaggagctgtgctctcaagtgaatgagggagttcgggagaaggaaaactcggaccgactggagtggatccaggcgcacgtgcagtgtgaaggcctcgcggagcaacttattttcaactctctcaccaactgcctggggccccggaagctcttacacagtgggaaattatacaagaccaagagcaacaaggaactgcacggattcctcttcaatgacttcctgcttcttacctacatggtcaagcagtttgctgtttcctctggctctgagaaacttttcagctcgaagtccaatgctcaattcaaaatgtataaaacgcccattttcctgaatgaagtcttggtgaaactgcccacagacccttccagcgatgagcctgtcttccacatttcccacattgatcgggtctacaccctccgaacagacaacattaatgagaggaccgcctgggtgcagaagatcaaggcggcgtctgagcagtacatcgacaccgagaagaagaagcgtgagaaagcttaccaagcccgctcccaaaagacttcaggcattgggcgcctgatggtgcatgtcattgaagctacagaattaaaagcctgcaaaccaaatggaaagagcaacccatactgtgaaatcagcatgggctcccagagctacaccaccaggaccatccaggacacactcaatcccaagtggaattttaactgccagttctttattaaggatctctaccaagacgtgctgtgtctcaccctgtttgacagagaccagttttcaccagatgatttcctgggtcgtactgaaattccagtggcaaaaattcgaacagaacaggaaagcaaaggccctatgacccgccgactgctgctgcatgaggtccccaccggggaggtctgggtccgttttgacctgcagctttttgagcaaaaaactctcctgtaggggttctaaaggacagcaccagcgggacagcccacaaggctggggctggagaatgagagactgcgctctcttggggctgagggagcaccatgcagcttcacccctcacaaagccatgcacgctgggggctctgttttcctgcacactaaatagctagcaatctatgcaaacacctttcccataaagaaaccaaaccccatagtacagtgccttgtcctagtgttcacatgttcagctctgtttgtttagatgccaaggtttccattttcagggctataaaaagtattacttggaaatgaggcatcagaccaccagatgttaccgctcggttgaatgtgtccaccgtggagtggtttggtgacgctgtaaccattccacgccagtgacctctgctgggtcacagccactcaggaggggaagggtcaggatgagaggctgcagcctcgacacttggcgcggcctgatactgaaatagcgtctactcgtgcactgaataaaaacagaaacttgatcattttattcctgattagattttatcactctctgctaagacaatatagtctggagtataagtgggaaagcttgatttaaatactgtgaactctaataatgtggaaaatatttttcaactttaattttctgaagtataaattatttatgtaaattcattgtttttgcatatttcttaggacatgcatctttaagctttatcattgcccatatgtacagaaagagaataaagacatatgtttatggatgg

SEQ ID NO: 14868 - DNA, 6187 bp, Homo sapiens
  source 1..6187: mol_type = unassigned DNA
cggccgccatgttgttgtggggctgaggcggcgccggcggagccctgagcggctgtgacaggctacgcaacaggttcgcgggcggcggcctgacgaccaagccagctgcagtggcggcgacggcggcagagcagggtctccccgcgcctgcccgcgcccaggctgccggtgctgagggacgcggagtcgcgctgtgacgagcgggaggcgcggcgagggcgccagatggctgagagctagcaaggaaaactcaggaccatgatggctcagtttcccacagctatgaatggagggccaaacatgtgggctattacctctgaagaacgtactaagcatgacaggcagtttgataacctcaaaccttcaggaggttacataacaggtgatcaagcacgtaattttttcctacaatcaggtctgccggcccctgttttagctgaaatatgggctttatcagacctaaacaaggatgggaagatggatcagcaagagttctccatagctatgaaactcatcaaactgaagcttcaaggccaacagttgcctgtggttctccctcctattatgaagcaaccccctatgttttctccattaatttctgctcgttttggaatgggaagcatgcccaatctgtccattcctcagccattgcctccagctgcacctataacatcattgtcttctgcgacttcagggaccaaccttcctcccttaatgatgcccactcccctagtgccttctgttagcacatcatcattaccaaatggaaccgccagtctcattcagcctttacccattccttattcttcttcaacattgcctcatgggtcatcttatagtctgatgatgggaggatttggaggtgctagtatacagaaagcgcagtctctgattgatttaggatctagtaggagctggagctcaggtagtagtgctcactcacctgccactcaccgagccccgctgtccagcccggttcctaacagctcaacttcctcgactgcttcactctcagggaactcacccaagactgggacctcagagtgggcagttcctcagcctacaagattaaaatatcggcaaaaatttaatactcttgacaaaagtatgagtggatatctctcaggttttcaagctagaaatgcccttcttcagtcaaatctttctcaaactcagctggctactatttggactctggctgacgttgatggtgatggacagctaaaagcagaagagtttattcttgcaatgcaccttactgacatggccaaagctggacagccattaccactgactttacctcctgagcttgttcctccatctttcagaggaggaaagcaaattgattccattaatggaactctgccttcatatcagaaaatgcaagaagaggagcctcagaagaaattaccagttacttttgaggacaaacggaaagccaactatgagcgagggaacatggagctggaaaagcgacgccaagccttgatggagcagcaacaaagggaggcagaacgtaaagcccagaaagaaaaggaagagtgggaacgaaaacagagagaattacaagaacaagaatggaagaaacaacttgaattagaaaaacgcttagagaagcaacgggaattggagagacaacgagaggaagaaaggagaaaagacatagaaagacgagaggcagcaaaacaggaacttgaacgacaacgtcgcttagaatgggagagaattcggcgacaggagcttctcaatcaaaagaatagagaacaagaagaaattgtcaggttaaactctaaaaagaagaatcttcatcttgagttggaagcactgaatggcaaacatcagcagatctcaggcagacttcaggatgtccgactcaaaaagcaaactcaaaagactgagctggaagttctggataagcagtgtgacttggaaattatggaaatcaagcaacttcaacaggaacttcaggaatatcagaataagcttatctatctggtacctgagaagcaattattaaatgaaagaattaaaaacatgcagttcagtaacacacctgattcaggggtcagtttacttcataaaaaatcattagaaaaggaagaattatgccaaagacttaaagaacagttagatgctcttgaaaaagaaactgcatctaagctgtcagaaatggattcttttaacaatcaactaaagtgtgggaatatggatgactctgttcttcagtgccttttgtctctgctaagctgtctcaacaacctcttcctcttacttaaggaactgagagaaacctacaacacacagcagttagcccttgaacagctttataagatcaaacgtgacaagttgaaggaaattgaaaggaaaagattagaactaatgcagaaaaagaaactagaagatgaggctgcaaggaaagcaaagcaaggaaaagaaaacttatggaaagaaaatcttagaaaggaggaagaagaaaaacaaaagcgactccaggaagaaaaaacacaagaaaaaattcaagaagaggaacggaaagctgaggagaaacaacgtaaggataaggatactttgaaagctgaggagaaaaaacgtgagacagctagtgttttggtgaattatagagcattatacccctttgaagcaaggaaccatgatgagatgagttttaattctggagatataattcaggttgatgaaaaaaccgtaggagaacctggttggctttatggtagttttcaaggaaattttggctggtttccatgcaattatgtagaaaaaatgccatcaagtgaaaatgaaaaagctgtatctccaaagaaggccttacttcctcctacagtttctttatctgctacctcaacttcctctgaaccactttcttcaaatcaaccagcatcagtgactgattatcaaaatgtatctttttcaaacctaactgtaaatacatcatggcagaaaaaatcagccttcactcgaactgtgtcccctggatctgtatcacctattcatggacagggacaagtggtagaaaacttaaaagcacaggccctttgttcctggactgcaaagaaagataaccacttgaacttctcaaaacatgacattattactgtcttggagcagcaagaaaattggtggtttggggaggtgcatggaggaagaggatggtttcccaaatcttatgtcaagatcattcctgggagtgaagtaaaacgggaagaaccagaagctttgtatgcagctgtaaataagaaacctacctcggcagcctattcagttggagaagaatatattgcactttatccatattcaagtgtggaacctggagatttgactttcacagaaggtgaagaaatattggtgacccagaaagatggagagtggtggacaggaagtattggagatagaagtggaatttttccatcaaactatgtcaaaccaaaggatcaagagagttttgggagtgctagcaagtctggagcatcaaataaaaaacctgagattgctcaggtaacttcagcatatgttgcttctggttctgaacaacttagccttgcaccaggacagttaatattaattctaaagaaaaatacaagtgggtggtggcaaggagagttacaggccagaggaaaaaagcgacagaaaggatggtttcctgccagtcatgttaaacttttgggtccaagtagtgaaagagccacacctgcctttcatcctgtatgtcaggtgattgctatgtatgactatgcagcaaataatgaagatgagctcagtttctccaagggacaactcattaatgttatgaacaaagatgatcctgattggtggcaaggagagatcaacggggtgactggtctctttccttcaaactacgttaagatgacgacagactcagatccaagtcaacagtggtgtgctgatctgcaaaccctggacacaatgcagccaattgagaggaaaagacagggctatattcatgagctgattcagaccgaagagcggtacatggctgaccttcagctcgtcgtcgaggtttttcagaaacgcatggcagagtcaggctttctcactgaaggggagatggccctgatttttgttaactggaaggagctcatcatgtccaacacaaagctgctgaaggctttgcgggtgcggaagaagaccgggggcgagaagatgccggtgcagatgattggggacatcctggccgctgagctgtcccacatgcaggcttacatcaggttctgcagctgccagcttaatggagcagctctgttacagcagaagacagatgaagacacagatttcaaagaatttttaaagaagctggcatctgacccgcggtgtaaaggaatgcccctctccagcttcctgctgaaacccatgcagaggatcacccgctacccactgctcatcagaagtattctggagaacaccccggagagccatgcagaccattcctccctaaagctggccctcgagcgggcagaggagctgtgctctcaagtgaatgagggagttcgggagaaggaaaactcggaccgactggagtggatccaggcgcacgtgcagtgtgaaggcctcgcggagcaacttattttcaactctctcaccaactgcctggggccccggaagctcttacacagtgggaaattatacaagaccaagagcaacaaggaactgcacggattcctcttcaatgacttcctgcttcttacctacatggtcaagcagtttgctgtttcctctggctctgagaaacttttcagctcgaagtccaatgctcaattcaaaatgtataaaacgcccattttcctgaatgaagtcttggtgaaactgcccacagacccttccagcgatgagcctgtcttccacatttcccacattgatcgggtctacaccctccgaacagacaacattaatgagaggaccgcctgggtgcagaagatcaaggcggcgtctgagcagtacatcgacaccgagaagaagaagcgtgagaaagcttaccaagcccgctcccaaaagacttcaggcattgggcgcctgatggtgcatgtcattgaagctacagaattaaaagcctgcaaaccaaatggaaagagcaacccatactgtgaaatcagcatgggctcccagagctacaccaccaggaccatccaggacacactcaatcccaagtggaattttaactgccagttctttattaaggatctctaccaagacgtgctgtgtctcaccctgtttgacagagaccagttttcaccagatgatttcctgggtcgtactgaaattccagtggcaaaaattcgaacagaacaggaaagcaaaggccctatgacccgccgactgctgctgcatgaggtccccaccggggaggtctgggtccgttttgacctgcagctttttgagcaaaaaactctcctgtaggggttctaaaggacagcaccagcgggacagcccacaaggctggggctggagaatgagagactgcgctctcttggggctgagggagcaccatgcagcttcacccctcacaaagccatgcacgctgggggctctgttttcctgcacactaaatagctagcaatctatgcaaacacctttcccataaagaaaccaaaccccatagtacagtgccttgtcctagtgttcacatgttcagctctgtttgtttagatgccaaggtttccattttcagggctataaaaagtattacttggaaatgaggcatcagaccaccagatgttaccgctcggttgaatgtgtccaccgtggagtggtttggtgacgctgtaaccattccacgccagtgacctctgctgggtcacagccactcaggaggggaagggtcaggatgagaggctgcagcctcgacacttggcgcggcctgatactgaaatagcgtctactcgtgcactgaataaaaacagaaacttgatcattttattcctgattagattttatcactctctgctaagacaatatagtctggagtataagtgggaaagcttgatttaaatactgtgaactctaataatgtggaaaatatttttcaactttaattttctgaagtataaattatttatgtaaattcattgtttttgcatatttcttaggacatgcatctttaagctttatcattgcccatatgtacagaaagagaataaagacatatgtttatggatgg

SEQ ID NO: 14869 - DNA, 4558 bp, Homo sapiens
  source 1..4558: mol_type = unassigned DNA
ggctgaggcggcgccggcggagccctgagcggctgtgacaggctacgcaacaggttcgcgggcggcggcctgacgaccaagccagctgcagtggcggcgacggcggcagagcagggtctccccgcgcctgcccgcgcccaggctgccggtgctgagggacgcggagtcgcgctgtgacgagcgggaggcgcggcgagggcgccagatggctgagagctagcaaggaaaactcaggaccatgatggctcagtttcccacagctatgaatggagggccaaacatgtgggctattacctctgaagaacgtactaagcatgacaggcagtttgataacctcaaaccttcaggaggttacataacaggtgatcaagcacgtaattttttcctacaatcaggtctgccggcccctgttttagctgaaatatgggctttatcagacctaaacaaggatgggaagatggatcagcaagagttctccatagctatgaaactcatcaaactgaagcttcaaggccaacagttgcctgtggttctccctcctattatgaagcaaccccctatgttttctccattaatttctgctcgttttggaatgggaagcatgcccaatctgtccattcctcagccattgcctccagctgcacctataacatcattgtcttctgcgacttcagggaccaaccttcctcccttaatgatgcccactcccctagtgccttctgttagcacatcatcattaccaaatggaaccgccagtctcattcagcctttacccattccttattcttcttcaacattgcctcatgggtcatcttatagtctgatgatgggaggatttggaggtgctagtatacagaaagcgcagtctctgattgatttaggatctagtagctcaacttcctcgactgcttcactctcagggaactcacccaagactgggacctcagagtgggcagttcctcagcctacaagattaaaatatcggcaaaaatttaatactcttgacaaaagtatgagtggatatctctcaggttttcaagctagaaatgcccttcttcagtcaaatctttctcaaactcagctggctactatttggactctggctgacgttgatggtgatggacagctaaaagcagaagagtttattcttgcaatgcaccttactgacatggccaaagctggacagccattaccactgactttacctcctgagcttgttcctccatctttcagaggaggaaagcaaattgattccattaatggaactctgccttcatatcagaaaatgcaagaagaggagcctcagaagaaattaccagttacttttgaggacaaacggaaagccaactatgagcgagggaacatggagctggaaaagcgacgccaagccttgatggagcagcaacaaagggaggcagaacgtaaagcccagaaagaaaaggaagagtgggaacgaaaacagagagaattacaagaacaagaatggaagaaacaacttgaattagaaaaacgcttagagaagcaacgggaattggagagacaacgagaggaagaaaggagaaaagacatagaaagacgagaggcagcaaaacaggaacttgaacgacaacgtcgcttagaatgggagagaattcggcgacaggagcttctcaatcaaaagaatagagaacaagaagaaattgtcaggttaaactctaaaaagaagaatcttcatcttgagttggaagcactgaatggcaaacatcagcagatctcaggcagacttcaggatgtccgactcaaaaagcaaactcaaaagactgagctggaagttctggataagcagtgtgacttggaaattatggaaatcaagcaacttcaacaggaacttcaggaatatcagaataagcttatctatctggtacctgagaagcaattattaaatgaaagaattaaaaacatgcagttcagtaacacacctgattcaggggtcagtttacttcataaaaaatcattagaaaaggaagaattatgccaaagacttaaagaacagttagatgctcttgaaaaagaaactgcatctaagctgtcagaaatggattcttttaacaatcaactaaagtgtgggaatatggatgactctgttcttcagtgccttttgtctctgctaagctgtctcaacaacctcttcctcttacttaaggaactgagagaaacctacaacacacagcagttagcccttgaacagctttataagatcaaacgtgacaagttgaaggaaattgaaaggaaaagattagaactaatgcagaaaaagaaactagaagatgaggctgcaaggaaagcaaagcaaggaaaagaaaacttatggaaagaaaatcttagaaaggaggaagaagaaaaacaaaagcgactccaggaagaaaaaacacaagaaaaaattcaagaagaggaacggaaagctgaggagaaacaacgtaaggataaggatactttgaaagctgaggagaaaaaacgtgagacagctagtgttttggtgaattatagagcattatacccctttgaagcaaggaaccatgatgagatgagttttaattctggagatataattcaggttgatgaaaaaaccgtaggagaacctggttggctttatggtagttttcaaggaaattttggctggtttccatgcaattatgtagaaaaaatgccatcaagtgaaaatgaaaaagctgtatctccaaagaaggccttacttcctcctacagtttctttatctgctacctcaacttcctctgaaccactttcttcaaatcaaccagcatcagtgactgattatcaaaatgtatctttttcaaacctaactgtaaatacatcatggcagaaaaaatcagccttcactcgaactgtgtcccctggatctgtatcacctattcatggacagggacaagtggtagaaaacttaaaagcacaggccctttgttcctggactgcaaagaaagataaccacttgaacttctcaaaacatgacattattactgtcttggagcagcaagaaaattggtggtttggggaggtgcatggaggaagaggatggtttcccaaatcttatgtcaagatcattcctgggagtgaagtaaaacgggaagaaccagaagctttgtatgcagctgtaaataagaaacctacctcggcagcctattcagttggagaagaatatattgcactttatccatattcaagtgtggaacctggagatttgactttcacagaaggtgaagaaatattggtgacccagaaagatggagagtggtggacaggaagtattggagatagaagtggaatttttccatcaaactatgtcaaaccaaaggatcaagagagttttgggagtgctagcaagtctggagcatcaaataaaaaacctgagattgctcaggtaacttcagcatatgttgcttctggttctgaacaacttagccttgcaccaggacagttaatattaattctaaagaaaaatacaagtgggtggtggcaaggagagttacaggccagaggaaaaaagcgacagaaaggatggtttcctgccagtcatgttaaacttttgggtccaagtagtgaaagagccacacctgcctttcatcctgtatgtcaggtgattgctatgtatgactatgcagcaaataatgaagatgagctcagtttctccaagggacaactcattaatgttatgaacaaagatgatcctgattggtggcaaggagagatcaacggggtgactggtctctttccttcaaactacgttaagatgacgacagactcagatccaagtcaacagtggtgtgctgatctgcaaaccctggacacaatgcagccaattgagaggaaaagacagggctatattcatgagctgattcagaccgaagagcggtacatggctgaccttcagctcgtcgtcgaggtgaggaggctgctgctggctagctctcggggtatctgctgtctctcatgagagatggtgggcatcagactcagggctgcctccacgcagagtcaaagcaaggcatcacttttgatgtgtgaattcacaaatagtgacggaagctctcacatcctccaaatgctgtctctgcctgccggataatgcttgagattgaaagtctctaatgagctctttcccccagatgaggtcactcagagtgaagcgggagaacaagagggcattcgcatggcttcgttggatgtggcaggagccccatcaaggaaggacggggatagagtggatgggaagggcctatggcagaccgtagcttccttggatatttgcctaatatctgttttaacatctgacattttcataaactggtatctctggaggaactgtgaaacagtgaaagtgttcacctcatggttgtatcagtttggaaaacccaatgggagcatattgtaaaatagttcccaaatatcatatagctactgtttgtttataccagtgacctctacgctgatgacagctatccttattcgagtagcactttaaaatgatttgtgcttgagtgaacaaaagaagactttccatttc

SEQ ID NO: 14870 - DNA, 6116 bp, Homo sapiens
  source 1..6116: mol_type = unassigned DNA
gcgccgtgcggcccgtgcgactcgccggacctcgcgggcgtccctgtacggagccctcggccggtcctagcagggattgtccccatttccagctccggagcgggcggctgcgccccgctcgtcgaggagctgcgctcacctcaggggcgggcccccgcctgcgttcgcggcgccagcagaagactgatttttggaaatatgtatttgggagacagtcacgtcctattgaataccttgtgctggtgctgccatcgaaaaatctggttacactctggggaggactgctaccactgcagaactgaaccacttcggccgtgagatgagtgtccggcctgagcaggcacaccatgaatagatacacaacaatcaggcagctcggggatggaacctacggttccgtcctgctgggaagaagcattgagtctggggagctgatcgctattaaaaaaatgaaaagaaaattttattcctgggaggaatgcatgaaccttcgggaggttaagtctttaaagaagctcaaccatgccaatgtagtcaaattaaaagaagttatcagggaaaatgatcatctttattttatcttcgagtacatgaaggaaaatctttaccagctcattaaagagagaaataagttgtttcctgagtctgctataaggaatatcatgtatcagatattacaaggactcgcatttattcacaaacacggcttctttcatcgagacttaaagcctgagaacctcctctgcatgggaccagaacttgtgaaaattgcagactttggtttggcccgagaaatacgatcaaaacctccatatacagattatgtatctaccagatggtacagggctccagaagtactcctgaggtctaccaactacagctcccccattgacgtctgggcggtgggctgcatcatggcagaagtttacaccctcaggccactcttccctggagccagtgaaattgacacaatattcaaaatttgccaagtgctggggacaccaaaaaagactgactggcctgaaggctatcaactttcaagtgcaatgaacttccgttggccacagtgtgtacccaataacttaaagaccttgattcccaatgctagcagtgaagcagtccagctcctgagagacatgcttcagtgggatcccaagaaacgaccaacagctagtcaggcacttcgatatccttacttccaagttggacacccactaggcagcaccacacaaaaccttcaggattcagaaaaaccacagaaaggcatcctggaaaaggcaggcccacctccttatattaagccagtcccacctgcccagccaccagccaagccacacacacgaatttcttcacgacagcatcaagccagccagccccctctgcatctcacgtacccctacaaagcagaggtctccaggacagatcacccaagccatctccaggaggacaagccaagcccgttgcttttcccatccctccacaacaagcatccacagtcgaaaatcacagctggcctggagcacaaaaatggtgagataaagccaaagagtaggagaaggtggggtcttatttccaggtcaacaaaggattcagatgattgggctgacttggatgacttggatttcagtccatccctcagcaggattgacctgaaaaacaagaaaagacagagtgatgacactctctgcaggtttgagagtgttttggacctgaagccctctgagcctgtgggcacaggaaacagtgcccccacccagacgtcatatcagcggcgagacacgcccaccctgagatctgcagccaagcagcactatttgaagcactctcgatacttgcctgggatcagtataagaaatggcatactctcgaatccaggcaaggaatttattccacctaatccatggtctagttctggcttgtctggaaaatcttcagggacaatgtcagtaatcagcaaagtaaattcagttggttccagctctacaagttctagtggactgactggaaactatgtcccttcctttctgaaaaaagaaatcggttctgctatgcagagggtacacctagcacctattccagacccttcccctggttattcctccctgaaggccatgagacctcatcctgggcgaccattcttccacacccagcctagaagcactcctgggttgataccacggcctccagccgcccagccagtgcatggccggacagactgggcttccaagtacgcatctcggcgatgactgtctgccttggtgatgaatctcttcctagggagaagcaggatactttccctcagctgactggtgttctacctgcaagatgtgcagagggcataaaagcaaatcaacactttatagttattcttctgaactaagacatgtcaatattcttttttaaagtttttttttaaaatattgatttgaatgcagtaggcttttttgtataaaattattttattctaaaactgggtcccattattttcttaaacaacagcattttgtatatatggattatgttttagcattttatacagtcaactttgtaatgaactttttaaaaattaattgattttcctttggggttccagataatattttctacagattttgaaaaatgtaataatattaatgcagtattgcaacaggggtgcaatttaaggctatgtgatagagggttatttactcagtgtgtgcagatatttatgaagtggtgaaatttcaagtgtggctcactaggtacttcaggccttcttggactgttgttagaaaagtgatcctctgcttttcttagtaggtcattggtttgatttttggataccactctgctgttctaaaaggactattatattatataattcactttgttttacttttgttccccagatgaaagaactctaagtaaatacattttaaaaaatttttctgacaccctttaatgtggttgcagatctcagatgaaaccaagcttaattatactatgccattatattctaatttattccatttttgaaatcaagttgtatgtgtaccaataaaagagatttctgcttcaaaaggctctcaacatgaaggttaacacagtcaatcaaacttacattcctgccaagatgcatggccaaaaaactaagtatcaaagcagcagaaggtttttgattatagtaactgagatggaattttgtgcctagctcagttctccagatctggctaggagcagtcaatgactaatgttctgtcctagccaaattctcaggacaatttggggagcagaaagagttatggcagaggttccactcatctacaaagtcacagtcacatgccacatttgatctcctaaccctggtgtagtttctttcaagagtgagaactttatttgttgggcagaggctgttccattgagaggaatgtttacagcagtttcaaaaatgacaaagtcagtttggagacagaaaaagacaaaaggtccagtctcatccatctctatatggtacatttgcctcacttatggttgccttaaaggcaagagggaaggtcaccatcagtgaacgcaatgcaatctcaacagtgtattgattcatattctcctagggctcaaactactctctattggttccaggataatgacaaattgaaccatatgtaagtaatcttttattttttattttttttttgagacagagtctcactctgtcacccaggctggagtgcagtggcgcgatcttagctctctgcaacctctgcctcccaggttcaagcctcctgagtaactgggactacaggcgcccgccaccacgcccagctaattttttgtatttttagtagagacggggtttcactgtgttagccaggacggcctcgatctcctgacctcgtgatccaccctcctccacctcccaaagtactgggattacaggcatgagccactgcacccagccaagtgatcatttttataggttaaaatgataggtgaaatgaatatagacactttcatatggttcaacctaatgacttggtaaattattgccttggtgtattaataatatgttgcattctgaacaaataaccatggcttccaaagggccctaacctaaaatcggagagtaatttatgctttggagaatttgactcaaatatatacttgaccaagcaccatgatccctaggggcatgagaaaagcacataatggatgtggatgtgataggtggtcttttcctgttaacaagctggcagcaaagcttcagaaaatatatatgcaagcacaacttgaagctgaattcatttctgtattatattctcaactcgttatctaaagcatcagaacatgtgttttcagagatgagtcctttactataaggttaatatttattttcattttctgtattatatatgaaaagtaaattaatgtgaaacctggcccagcttgctggaaagcaggttttaaattgtaaatattccttagaggagcaaatggattgtttaataccatagtctcagtaatctagcttatataaggtcattacattttttaactgaaaaacctagttacctgattattgcacattataaaattgtttttctaatactttatagggcccaacttcagaaaatacttcgcttttttctttttatgctttcgtttgtttaccagcaagcaacttccctggggaagccaaacacatattcataaaaaaaatcaagtagctgatgtgcagttgagaaaactagaggactgaaaaaacaaattttaactagcaaatgctgtgaattactcttcctccccttctctgaaatgggtaaaggacaaattgtgtaaaaaaacctatgcactatagaagggaatagtaaccatttcttttgtctctctgtttctgttctgactgagaacctgcagccatttcttgttacatgaaaacaaaatgctacttgttacctctattttttgttactatacaattatgaaatgtaatgtaagacaccaacagaaatgatatacctgtaactgtacctatcaggactatacctcatttacagtcagaaagcttactgggatgtcaggaaatgatacagggttggttctcatttcgtgccgaaatgagacagaaattcagtgacgaaggtgcgttgtaggggtattgatgtgccccaggtagtgccagcagagtagggaaaactgcatttgcataaaaactactcttgacatgattgttcattttacaaaaaaattccattaattaccaagccctcacccagcccatgtgtgataggatttatgtaggaagaaacttgattttcaaataattttttaaatgtatctcttgcctaaaggactatatacatctaataaagtaacactgtgtcatcttctggagttatcaaaaattgtatacaatcaagacaacacaagaattattttatttttgagtgcaaatacaggtactgttggagttgatgggcaccatgctttctcatgaagtagcatttccctaccatcaagccattgttttgtgccattcaggagaggaaaaaaaggaatttatgctgtacatttcagttcagtgtatgaccaaaagcaatatgtttataagaagatgtttgacatactaattattttatatcatttaaaccatactgtagcaacataatatatggagctaatttgtagaattatttttacgatttccaaacaaatgtactgtactgttatataatttattgtgaggaccttctcatggaagccattaggaaaacaaactagaggtaaatatcacattaatctgtattatcaatttctcatagacactgtgctaatgtgaattttaaatgacctgcatcaagtcttctgatctcagataactcagtacagatagcaattagtcagctgatttgattacaatggagtaaccgacaatatatttatttataaagcacatattcataataacgagaagaattcagaaaaccacttaagcaagacccttctgaaataaaaaatgttgctttttaaatagtttgtcctaaggtgtttaaaacatgtcaaccttatgtaaggaaaaatttcctggtccaaataaagttgaagtttaagaaaaattgatttgagtgttctgtttttgt

SEQ ID NO: 14871 - DNA, 6227 bp, Homo sapiens
  source 1..6227: mol_type = unassigned DNA
ggaaaacggccgggttcctgctgcactaccatgcgccgtgcggcccgtgcgactcgccggacctcgcgggcgtccctgtacggagccctcggccggtcctagcagggattgtccccatttccagctccggagcgggcggctgcgccccgctcgtcgaggagctgcgctcacctcaggggcgggcccccgcctgcgttcgcggcgccaagaagagtattcctttccacttacaactaaataagacctgcttttgctggagctgtgctaggctgagggaattccacactgaattttacaagcgggatggatttctctaaggcagaagactgatttttggaaatatgtatttgggagacagtcacgtcctattgaataccttgtgctggtgctgccatcgaaaaatctggttacactctggggaggactgctaccactgcagaactgaaccacttcggccgtgagatgagtgtccggcctgagcaggcacaccatgaatagatacacaacaatcaggcagctcggggatggaacctacggttccgtcctgctgggaagaagcattgagtctggggagctgatcgctattaaaaaaatgaaaagaaaattttattcctgggaggaatgcatgaaccttcgggaggttaagtctttaaagaagctcaaccatgccaatgtagtcaaattaaaagaagttatcagggaaaatgatcatctttattttatcttcgagtacatgaaggaaaatctttaccagctcattaaagagagaaataagttgtttcctgagtctgctataaggaatatcatgtatcagatattacaaggactcgcatttattcacaaacacggcttctttcatcgagacttaaagcctgagaacctcctctgcatgggaccagaacttgtgaaaattgcagactttggtttggcccgagaaatacgatcaaaacctccatatacagattatgtatctaccagatggtacagggctccagaagtactcctgaggtctaccaactacagctcccccattgacgtctgggcggtgggctgcatcatggcagaagtttacaccctcaggccactcttccctggagccagtgaaattgacacaatattcaaaatttgccaagtgctggggacaccaaaaaagactgactggcctgaaggctatcaactttcaagtgcaatgaacttccgttggccacagtgtgtacccaataacttaaagaccttgattcccaatgctagcagtgaagcagtccagctcctgagagacatgcttcagtgggatcccaagaaacgaccaacagctagtcaggcacttcgatatccttacttccaagttggacacccactaggcagcaccacacaaaaccttcaggattcagaaaaaccacagaaaggcatcctggaaaaggcaggcccacctccttatattaagccagtcccacctgcccagccaccagccaagccacacacacgaatttcttcacgacagcatcaagccagccagccccctctgcatctcacgtacccctacaaagcagaggtctccaggacagatcacccaagccatctccaggaggacaagccaagcccgttgcttttcccatccctccacaacaagcatccacagtcgaaaatcacagctggcctggagcacaaaaatggtgagataaagccaaagagtaggagaaggtggggtcttatttccaggtcaacaaaggattcagatgattgggctgacttggatgacttggatttcagtccatccctcagcaggattgacctgaaaaacaagaaaagacagagtgatgacactctctgcaggtttgagagtgttttggacctgaagccctctgagcctgtgggcacaggaaacagtgcccccacccagacgtcatatcagcggcgagacacgcccaccctgagatctgcagccaagcagcactatttgaagcactctcgatacttgcctgggatcagtataagaaatggcatactctcgaatccaggcaaggaatttattccacctaatccatggtctagttctggcttgtctggaaaatcttcagggacaatgtcagtaatcagcaaagtaaattcagttggttccagctctacaagttctagtggactgactggaaactatgtcccttcctttctgaaaaaagaaatcggttctgctatgcagagggtacacctagcacctattccagacccttcccctggttattcctccctgaaggccatgagacctcatcctgggcgaccattcttccacacccagcctagaagcactcctgggttgataccacggcctccagccgcccagccagtgcatggccggacagactgggcttccaagtacgcatctcggcgatgactgtctgccttggtgatgaatctcttcctagggagaagcaggatactttccctcagctgactggtgttctacctgcaagatgtgcagagggcataaaagcaaatcaacactttatagttattcttctgaactaagacatgtcaatattcttttttaaagtttttttttaaaatattgatttgaatgcagtaggcttttttgtataaaattattttattctaaaactgggtcccattattttcttaaacaacagcattttgtatatatggattatgttttagcattttatacagtcaactttgtaatgaactttttaaaaattaattgattttcctttggggttccagataatattttctacagattttgaaaaatgtaataatattaatgcagtattgcaacaggggtgcaatttaaggctatgtgatagagggttatttactcagtgtgtgcagatatttatgaagtggtgaaatttcaagtgtggctcactaggtacttcaggccttcttggactgttgttagaaaagtgatcctctgcttttcttagtaggtcattggtttgatttttggataccactctgctgttctaaaaggactattatattatataattcactttgttttacttttgttccccagatgaaagaactctaagtaaatacattttaaaaaatttttctgacaccctttaatgtggttgcagatctcagatgaaaccaagcttaattatactatgccattatattctaatttattccatttttgaaatcaagttgtatgtgtaccaataaaagagatttctgcttcaaaaggctctcaacatgaaggttaacacagtcaatcaaacttacattcctgccaagatgcatggccaaaaaactaagtatcaaagcagcagaaggtttttgattatagtaactgagatggaattttgtgcctagctcagttctccagatctggctaggagcagtcaatgactaatgttctgtcctagccaaattctcaggacaatttggggagcagaaagagttatggcagaggttccactcatctacaaagtcacagtcacatgccacatttgatctcctaaccctggtgtagtttctttcaagagtgagaactttatttgttgggcagaggctgttccattgagaggaatgtttacagcagtttcaaaaatgacaaagtcagtttggagacagaaaaagacaaaaggtccagtctcatccatctctatatggtacatttgcctcacttatggttgccttaaaggcaagagggaaggtcaccatcagtgaacgcaatgcaatctcaacagtgtattgattcatattctcctagggctcaaactactctctattggttccaggataatgacaaattgaaccatatgtaagtaatcttttattttttattttttttttgagacagagtctcactctgtcacccaggctggagtgcagtggcgcgatcttagctctctgcaacctctgcctcccaggttcaagcctcctgagtaactgggactacaggcgcccgccaccacgcccagctaattttttgtatttttagtagagacggggtttcactgtgttagccaggacggcctcgatctcctgacctcgtgatccaccctcctccacctcccaaagtactgggattacaggcatgagccactgcacccagccaagtgatcatttttataggttaaaatgataggtgaaatgaatatagacactttcatatggttcaacctaatgacttggtaaattattgccttggtgtattaataatatgttgcattctgaacaaataaccatggcttccaaagggccctaacctaaaatcggagagtaatttatgctttggagaatttgactcaaatatatacttgaccaagcaccatgatccctaggggcatgagaaaagcacataatggatgtggatgtgataggtggtcttttcctgttaacaagctggcagcaaagcttcagaaaatatatatgcaagcacaacttgaagctgaattcatttctgtattatattctcaactcgttatctaaagcatcagaacatgtgttttcagagatgagtcctttactataaggttaatatttattttcattttctgtattatatatgaaaagtaaattaatgtgaaacctggcccagcttgctggaaagcaggttttaaattgtaaatattccttagaggagcaaatggattgtttaataccatagtctcagtaatctagcttatataaggtcattacattttttaactgaaaaacctagttacctgattattgcacattataaaattgtttttctaatactttatagggcccaacttcagaaaatacttcgcttttttctttttatgctttcgtttgtttaccagcaagcaacttccctggggaagccaaacacatattcataaaaaaaatcaagtagctgatgtgcagttgagaaaactagaggactgaaaaaacaaattttaactagcaaatgctgtgaattactcttcctccccttctctgaaatgggtaaaggacaaattgtgtaaaaaaacctatgcactatagaagggaatagtaaccatttcttttgtctctctgtttctgttctgactgagaacctgcagccatttcttgttacatgaaaacaaaatgctacttgttacctctattttttgttactatacaattatgaaatgtaatgtaagacaccaacagaaatgatatacctgtaactgtacctatcaggactatacctcatttacagtcagaaagcttactgggatgtcaggaaatgatacagggttggttctcatttcgtgccgaaatgagacagaaattcagtgacgaaggtgcgttgtaggggtattgatgtgccccaggtagtgccagcagagtagggaaaactgcatttgcataaaaactactcttgacatgattgttcattttacaaaaaaattccattaattaccaagccctcacccagcccatgtgtgataggatttatgtaggaagaaacttgattttcaaataattttttaaatgtatctcttgcctaaaggactatatacatctaataaagtaacactgtgtcatcttctggagttatcaaaaattgtatacaatcaagacaacacaagaattattttatttttgagtgcaaatacaggtactgttggagttgatgggcaccatgctttctcatgaagtagcatttccctaccatcaagccattgttttgtgccattcaggagaggaaaaaaaggaatttatgctgtacatttcagttcagtgtatgaccaaaagcaatatgtttataagaagatgtttgacatactaattattttatatcatttaaaccatactgtagcaacataatatatggagctaatttgtagaattatttttacgatttccaaacaaatgtactgtactgttatataatttattgtgaggaccttctcatggaagccattaggaaaacaaactagaggtaaatatcacattaatctgtattatcaatttctcatagacactgtgctaatgtgaattttaaatgacctgcatcaagtcttctgatctcagataactcagtacagatagcaattagtcagctgatttgattacaatggagtaaccgacaatatatttatttataaagcacatattcataataacgagaagaattcagaaaaccacttaagcaagacccttctgaaataaaaaatgttgctttttaaatagtttgtcctaaggtgtttaaaacatgtcaaccttatgtaaggaaaaatttcctggtccaaataaagttgaagttt

SEQ ID NO: 14872 - DNA, 3384 bp, Homo sapiens
  source 1..3384: mol_type = unassigned DNA
agatcaacaactgtcagctcccagtcagagagaaagggcctcttcagtctgtctcaggagactgggagaaacagcataaaggaccccacaaggaagggagaggtaccctgggtcaggcgcttgtggagagagggcttcgcatgtaaagtgacgtcagggaaaatagaacagaaaaaaagccagggccagcccagaggcacctgagaagaatcagacccacagctcagcccagccctggcacagagaagagacaggcctggcagcacccagggaccccctttcctcagcctccacctgcaggacagcaggagcactgatgcgctgaaggtacgttctggagtctggaagcagcagaactgaaggaagtaaacacgggtgtctgggaagacccctcaagctgcagtaaagcccaggactgaattggccacctgaggccaagggtggcactccaacctcctcctaaaggctggctagagccacaggaaagggccagaagccagagaaagggcaaaggtggacccctgcctccaaacctcctctggagactgacctcctctttcctgtgccttattgtttctccctcttctctttgttcgccactgggcggtgacctcagggatcctggcctaacctggtgattgtgcaggcaactgtgtccgagaagacccttctctggaagattgaaccccaattcagccatggtgactcctttgatgtcaaactggtaagggctgagccgtgggcacaggataccactccttccagctcttctgctgtgacctgcccatggaagtccctgtggacacgaaatcctgtttggatcatctaactggaggctctctgttcttcacctccacgcgccctcttgaccccaggaggttcaggggaggaagtacgccactctccactggcaccctccttggcctacacagagtcacccctgagcccctcaatgtgtgctgaggtgggccctgctctctgcaggggtatggagagaaatagcttggggtgctgtgaggccccgaagaagctgagcctgtccttctccattgaggcgatcctaaagaggcctgccaggaggagtgatatggacagaccagaagggccaggtgaagagggccccggagaagctgcggcctcaggctctgggctagaaaagcctccaaaggaccagccccaggaaggaaggaagagcaagcggagggttcgtaccaccttcaccactgagcagctgcatgagctggagaagatcttccactttacccactacccagacgttcacatccgcagccagctggcagccaggatcaacctcccagaagctcgggtgcagatctggttccagaatcagcgagccaagtggcggaagcaggagaagattggcaacctgggggctccacagcagctgagtgaagccagtgtggccctgcccacaaatctggatgtggctgggcccacgtggacatccactgctctgcgcaggctggctcctcccacgagctgttgtccatcggctcaagatcagctggcctctgcctggttccctgcctggatcaccctcctcccagcgcacccatgggaaacacagcctgtcccaggtcttcccatccatcaaacttgcatccctgtgctatgcatccttccacctccacaccccaaatggggcagcatctgtgctacttcaacatagagattggacatgctctccccaaatgagccactttcctctccaggtgaaggcaggtagcagatgtgccctgggcctctggggaaatcgatttcacaatccaaaaatggcccacagcccaggaagctaccctgaacatgccagttggaaggctgcaccagactcaaaagcaaactaaacaataaaggacagctctcttctctcctggctaaagctgctctcctggttcagaagacaggctggatgagatctcaggccgagctctgaaatagggaggtaatcctccagcacctgtgtttcctctaacttgctgtgtgacctccagccggtcactcaccctctctggacctcatctgtaagaggagccagctggataagatgatttctgaagacgcttccatggtgggcactgaggcacagaggaggccaaggagaggttgtttgttcatgcatgcattcatccgtgacacatgagtacctactgaggactccataaacagaacgggatacagagataaacaatttgggttctgtccacgtttgtcaaaaggtggtgctggcccacctctgaaagcagaacacttgctcaacaaccttgctgttggcccaagtctaacacattctttatgactgtgagcatctcagagtgagagaaaaatgtagaaagttttttaaattctaaacaggatttagtgtctttagttatcttgctggatgggaaagggatgttgtcatttctggcacaaatgaaaagtaggacggaaagctcctttcattcagtttatctttccaggatatatgaaaagggaccagctggaagactagcctcactctgtcctcgaaagcctgagctttcattcaactccctatttccatgcaaagacgctgggcaaaccacatgttctgtctgagcctcagttttcctatccataaaatgaaggtagccaggcctgcctcaaagagcattcaggaggctctgagaggacatgagagtattttgcaaagtgagggcaaggcccagtgtggagtgatattgttattccaagattccactgcaaaagtggctgctttggatgccagcccaggatgagtagttcctgttctcagggaggtcatccgctgagcatcccttctgcacagatgtctctgattcttgtccttgcaggtggaggacagggcctgctcccctaagctgggaagcctggaatgacctcttgcacaagcctaaattccaggaatcttccccaaatcccagatcctctgcaatctacctgcacccctgacccacccaggagttggaccgggagttgggaagcctaggtcttagtcctacactccttctaatttgctgtgtaaccttaccattaatctctctgggtctcagttttctcatctgtattggaggtagcagtgctagctctgccttcaggcatgcaatatgccagaactacagacaacagcccacaggatgcaaaagtgctttgccatcttaaaaatgccagatcactcagagcctatgaatgtggatatcaacaccaggtctctagcaccgctggatgaaaggagaaggctagaggctgagggaggaaagagcagttaacaaacaaaggcagtagctcatcacttgggtagcaggtacccattttaggaccctacactcaaatgtgcaaaataaaatttctatcattttgctataa

SEQ ID NO: 14873 - DNA, 5745 bp, Homo sapiens
  source 1..5745: mol_type = unassigned DNA
agatcaacaactgtcagctcccagtcagagagaaagggcctcttcagtctgtctcaggagactgggagaaacagcataaaggaccccacaaggaagggagaggtaccctgggtcaggcgcttgtggagagagggcttcgcatgtaaagtgacgtcagggaaaatagaacagaaaaaaagccagggccagcccagaggcacctgagaagaatcagacccacagctcagcccagccctggcacagagaagagacaggcctggcagcacccagggaccccctttcctcagcctccacctgcaggacagcaggagcactgatgcgctgaagggatcctggcctaacctggtgattgtgcaggcaactgtgtccgagaagacccttctctggaagattgaaccccaattcagccatggtgactcctttgatgtcaaactggtaagggctgagccgtgggcacaggataccactccttccagctcttctgctgtgacctgcccatggaagtccctgtggacacgaaatcctgtttggatcatctaactggaggctctctgttcttcacctccacgcgccctcttgaccccaggaggttcaggggaggaagtacgccactctccactggcaccctccttggcctacacagagtcacccctgagcccctcaatgtgtgctgaggtgggccctgctctctgcaggggtatggagagaaatagcttggggtgctgtgaggccccgaagaagctgagcctgtccttctccattgaggcgatcctaaagaggcctgccaggaggagtgatatggacagaccagaagggccaggtgaagagggccccggagaagctgcggcctcaggctctgggctagaaaagcctccaaaggaccagccccaggaaggaaggaagagcaagcggagggttcgtaccaccttcaccactgagcagctgcatgagctggagaagatcttccactttacccactacccagacgttcacatccgcagccagctggcagccaggatcaacctcccagaagctcgggtgcagatctggttccagaatcagcgagccaagtggcggaagcaggagaagattggcaacctgggggctccacagcagctgagtgaagccagtgtggccctgcccacaaatctggatgtggctgggcccacgtggacatccactgctctgcgcaggctggctcctcccacgagctgttgtccatcggctcaagatcagctggcctctgcctggttccctgcctggatcaccctcctcccagcgcacccatgggaaacacagcctgtcccaggtcttcccatccatcaaacttgcatccctgtgctatgcatccttccacctccacaccccaaatggggcagcatctgtgctacttcaacatagagattggacatgctctccccaaatgagccactttcctctccaggtgaaggcaggtagcagatgtgccctgggcctctggggaaatcgatttcacaatccaaaaatggcccacagcccaggaagctaccctgaacatgccagttggaaggctgcaccagactcaaaagcaaactaaacaataaaggacagctctcttctctcctggctaaagctgctctcctggttcagaagacaggctggatgagatctcaggccgagctctgaaatagggaggtaatcctccagcacctgtgtttcctctaacttgctgtgtgacctccagccggtcactcaccctctctggacctcatctgtaagaggagccagctggataagatgatttctgaagacgcttccatggtgggcactgaggcacagaggaggccaaggagaggttgtttgttcatgcatgcattcatccgtgacacatgagtacctactgaggactccataaacagaacgggatacagagataaacaatttgggttctgtccacgtttgtcaaaaggtggtgctggcccacctctgaaagcagaacacttgctcaacaaccttgctgttggcccaagtctaacacattctttatgactgtgagcatctcagagtgagagaaaaatgtagaaagttttttaaattctaaacaggatttagtgtctttagttatcttgctggatgggaaagggatgttgtcatttctggcacaaatgaaaagtaggacggaaagctcctttcattcagtttatctttccaggatatatgaaaagggaccagctggaagactagcctcactctgtcctcgaaagcctgagctttcattcaactccctatttccatgcaaagacgctgggcaaaccacatgttctgtctgagcctcagttttcctatccataaaatgaaggtagccaggcctgcctcaaagagcattcaggaggctctgagaggacatgagagtattttgcaaagtgagggcaaggcccagtgtggagtgatattgttattccaagattccactgcaaaagtggctgctttggatgccagcccaggatgagtagttcctgttctcagggaggtcatccgctgagcatcccttctgcacagatgtctctgattcttgtccttgcaggtggaggacagggcctgctcccctaagctgggaagcctggaatgacctcttgcacaagcctaaattccaggaatcttccccaaatcccagatcctctgcaatctacctgcacccctgacccacccaggagttggaccgggagttgggaagcctaggtcttagtcctacactccttctaatttgctgtgtaaccttaccattaatctctctgggtctcagttttctcatctgtattggaggtagcagtgctagctctgccttcaggcatgcaatatgccagaactacagacaacagcccacaggatgcaaaagtgctttgccatcttaaaaatgccagatcactcagagcctatgaatgtggatatcaacaccaggtctctagcaccgctggatgaaaggagaaggctagaggctgagggaggaaagagcagttaacaaacaaaggcagtagctcatcacttgggtagcaggtacccattttaggaccctacactcaaatgtgcaaaataaaatttctatcattttgctataactggatttactttctatgttgtttgcaggaaatgtattctggtaacttctaggttactgatgcctcaggcacttcaggtttaaaggcagtcacttgagatcgttgccctctgttccccttcttcccacaggggtctttgctaggctgaggggcagggttggagaagtgtttatgcaaatgccacctccagcctcccagaggggatgtttgcttcccagctttctcagtctcctactagtgtcttatctagcctggccttgggcatgacccctctgccctagagatgtatcaccccattcaactccctattgggggttcactccacatcctccgctgtagcctctcaccacagttgtgaatcctcgctggcttcctctctttctcatgagcaagaggaaaagctgacaactatcccacacacttctagggccatgggagccctgggccaggcagcaggtctcattcattctagacctcctacagccatttctcatgccctggtgataggaaggtcatggatgagacttgcagatctccaaacttgtaagaggaatggaaaagatgcaggtcccctctgctctggggtcccactcccctttctcagcaacatactccttccccaggctcctcttgaaacaggattttctcaaccatagagattcagatgatcagatgtctcagcttcactactgaggtaaacattgattttgtgaggccacttctttccccccaggaattttctccccaataactatttttattccctttaccttatgtgtgtgggataaaggaatcactttagaactcttgccaggtgtgtgaccttgggcaagtggcatgtcccctctctgtacctgttccctggataacaacaatttcttgcctcttagagtttctgtgacaattaaatgagttaatacattttggcacatggtggacactcaagccatattaagaaaaactcattttcccaaatacaccttctacctctttctacttctgagcttgagcatccattctgatctcaagctctattccaggagttcttaaaccagtctccaggaagtcaaggagctcccaagagactatgcaaaattgtgtgtatctgtgtgtttattttttctagggaaagggttcattgctttcatcagcttttcaaagagctctggggcataaaaaataataataataaagaatctctgtcagacatatctgagtcagatcttgacagcttcatattctagctgtgaggactacagacttgagagaagatgaaggataactattttagaaaggtaaaataaaaaaatattgctatggtttgaatgtgtcccccaaaaaatgtgtgtcagaaacctaatcaccgttgtaacagtgttaagaggtagaacttttaagaggtgattaggccatgagtctctgtccttatgaatggattaatgttgttattaccagaatgtgttccttataaaaggataagttcagaatctctctctctccaccccccaacccccggcaccttctctccccttctctcctccactcctccaccattttccttccaccatggtatgacacaccttgacagcaagaaggccctcaccagatgccagtcccttgttcttggacttcccagcctccagaaccatgagccaataaatttcttttcatatattaattacccaagctgtggtatgctgtaatagcagcacaaaatgaactaaggaaaatagaaaatgaacaaatgcccaagttttatttagctcattaattaatgagagaactgctaagatgtcataaccagctcaaaggtgaacatgcacacatattaaaggaacagacaagcatacaggcaatcaggaatgctgaaatgaattacaaataaagaaaaacaagagtcaatagccatagggaaacaatcaatttcatctccaccaagcatgacttatttgcatttctagtgacaagaatcactttcatttctaaccattctctactcattgaagttgaaaaatagctcaaagataataaagatgcagatattctgaaagaatgtgctagacaaaataccctgtaatctttatgggcccttttcaaaatctttcaaaaatttgtacccgcataaagttactttgtctatctgaatctcactttcctcatccattaaatggggatgaccacctgcctcagaagattgccatgaagattatattagatgatgtgcgtatagtttgtgcgaataaaacactttgagtgtaggaaatctttattgcttttcaagctcctctagaactcaagtttaaaagcccatatctgtaaagtgttttgaactacagtaatatttctttaatatccatccaccttttatagttcaatttcttaaaaggctaacccagaggccaagttgggtggatcacgaggtcaggagatcgagaccatcctggctaacatggtgaaaccccgtctctactaaaaatacaaaaaattagccgggcgtggtggtgggtgcctgtagtctcagctactagggaggctgaggcaggagaatggcataaacccagaaggcggagcttgcagtgagccaagatcatgccactgcactccagcctgcgcgacagagcaagactccatctgaaaaaaaaaaaaaaaa

SEQ ID NO: 14874 - DNA, 1947 bp, Homo sapiens
  source 1..1947: mol_type = unassigned DNA
cgcgactgcgcgcgcagggcctgagcgggcgccggagggaaggggaagcggcggggtagtaacagattatgggcaacagtccttttaattaatctaccgtcatcatggctaatgaggactgtcccaaggctgctgatagtcctttttcatcagataaacatgcccaactcatcttggcccaaatcaataagatgagaaatggacagcatttctgtgatgtgcagctgcaagttggacaggaaagttttaaagctcatcggctggttttggctgccagcagtccttactttgcagctttgttcactggaggaatgaaagagtcctcaaaagatgttgtaccgattctaggaattgaagcaggaatctttcagatacttctagatttcatttacacaggtatagtgaacataggtgtgaataatgtccaggagttgattattgcagcagacatgctacagttgactgaagttgttcatctttgctgtgaatttctgaaaggacaaattgatccactgaactgcattggaatttttcagttctctgagcaaattgcctgccatgatctcttggaattctcagaaaactacattcatgtccatttcttggaggttcatagtggagaagagttcctggcacttacgaaagatcagctgatcaaaattttgcgaagtgaagagcttagcattgaggatgaataccaggtcttcttagctgcaatgcaatggattctgaaagatttgggaaaaagaagaaaacatgtggtggaagtgctagacccaattcgattccctttattacctcctcagagacttttaaagtatatagaaggagtatccgattttaatcttcgtgttgcattgcaaacacttctgaaagagtactgtgaagtatgcaaatctcccaaagagaacaagttttgtagttttctgcagacatctaaggttcgacctcggaagaaagcaagaaagtacctgtatgcagtaggtggatatactcggttgcaggggggtcgctggagtgatagcagagccctcagctgtgtagaacgttttgacacctttagccagtactggaccactgtgtcttcacttcatcaggctcgaagtgggctgggagtaacagttctgggagggatggtctacgctattggaggtgaaaaggattcaatgatttttgattgtactgaatgctatgatccagttactaaacagtggacaactgtagcttcgatgaatcatccccgctgcggcttaggagtgtgtgtgtgttatggggctatctatgctttgggtggatgggttggagctgagatagggaacaccattgaacgatttgatcctgatgaaaataaatgggaagtagttggtaacatggctgtgtcacgctactactttgggtgctgtgaaatgcaaggtttaatttatgtaattgggggcatcagcaatgaaggaatagaacttcgttcttttgaagtctatgatccactttctaagcgttggtctccacttcctccaatgggaaccaggagagcatatcttggtgtggctgcactcaatgactgcatctattctgttggaggatggaatgagacccaagatgctcttcatactgtagaaaaatattcctttgaagaggaaaagtgggttgaagttgcctcaatgaaagtgcctagagcaggcatgtgtgttgtggcagtcaatggtcttctgtatgtttctggaggtcgatcttccagccatgattttttggctccagatactcacagatacgaggttttccgcttgaagtgggagaatatgtgcattcttttcaatgatcacaagactctaacaaaggggatttttaatctttaattttcaagatggttaaaatattgaaatgtttaagtggataactatattattcataaaatgactgagtgaaaactaatatactatgagatgaaaa

SEQ ID NO: 14875 - DNA, 3113 bp, Homo sapiens
  source 1..3113: mol_type = unassigned DNA
gcgactgcgcgcgcagggcctgagcgggcgccggagggaaggggaagcggcggggtagtaacagattatgggcaacagtccttttaattaatctaccgtcatcatggctaatgaggactgtcccaaggctgctgatagtcctttttcatcagataaacatgcccaactcatcttggcccaaatcaataagatgagaaatggacagcatttctgtgatgtgcagctgcaagttggacaggaaagttttaaagctcatcggctggttttggctgccagcagtccttactttgcagctttgttcactggaggaatgaaagagtcctcaaaagatgttgtaccgattctaggaattgaagcaggaatctttcagatacttctagatttcatttacacaggtatagtgaacataggtgtgaataatgtccaggagttgattattgcagcagacatgctacagttgactgaagttgttcatctttgctgtgaatttctgaaaggacaaattgatccactgaactgcattggaatttttcagttctctgagcaaattgcctgccatgatctcttggaattctcagaaaactacattcatgtccatttcttggaggttcatagtggagaagagttcctggcacttacgaaagatcagctgatcaaaattttgcgaagtgaagagcttagcattgaggatgaataccaggtcttcttagctgcaatgcaatggattctgaaagatttgggaaaaagaagaaaacatgtggtggaagtgctagacccaattcgattccctttattacctcctcagagacttttaaagtatatagaaggagtatccgattttaatcttcgtgttgcattgcaaacacttctgaaagagtactgtgaagtatgcaaatctcccaaagagaacaagttttgtagttttctgcagacatctaaggttcgacctcggaagaaagcaagaaagtacctgtatgcagtaggtggatatactcggttgcaggggggtcgctggagtgatagcagagccctcagctgtgtagaacgttttgacacctttagccagtactggaccactgtgtcttcacttcatcaggctcgaagtgggctgggagtaacagttctgggagggatggtctacgctattggaggtgaaaaggattcaatgatttttgattgtactgaatgctatgatccagttactaaacagtggacaactgtagcttcgatgaatcatccccgctgcggcttaggagtgtgtgtgtgttatggggctatctatgctttgggtggatgggttggagctgagatagggaacaccattgaacgatttgatcctgatgaaaataaatgggaagtagttggtaacatggctgtgtcacgctactactttgggtgctgtgaaatgcaaggtttaatttatgtaattgggggcatcagcaatgaaggaatagaacttcgttcttttgaagtctatgatccactttctaagcgttggtctccacttcctccaatgggaaccaggagagcatatcttggtgtggctgcactcaatgactgcatctattctgttggaggatggaatgagacccaagatgctcttcatactgtagaaaaatattcctttgaagaggaaaagtgggttgaagttgcctcaatgaaagtgcctagagcaggcatgtgtgttgtggcagtcaatggtcttctgtatgtttctggaggtcgatcttccagccatgattttttggctccaggtaccttggactcagttgaagtttataaccctcattcagatacatggacagaaattggtaacatgatcaccagtcgttgtgaagggggcgttgctgtgctatgaaatataaagcataacagagcacaaggaacattttgaaaatgcaggacctgaccttttgcaaagcaaacatagatttggtgataagaccctctgattctgtgagttttccatgtatttggtagataaatgactaacgaggctgggcgcagtggcctcatgcctataatcccagcactttggaaggctgaggcagaaggatcacttgagcccaggaatttgaggttgtagtaagctacgatcatgccactgcactccactctgggcaacagaatgagatcctgtctcttaaagaaaaaaaataaactcaagaatgatttttctaaaaatatgagtgagaatggatatggaatatatcccaattaataaagagctcacacagatttgccaggtttactaataatagaaatgccatttatgctgtagaattctccagtttaagtgtagacaactcctattttacaaatttgtagaaattatttactagaagcttcctggcaaatagtccctttagctacttctccagtgcagtataaattgtaacataaaactttatgtgatataggaatagtgtcaatgacacagtttaaagacctctatattcacaattatatccagagcataattttccatggccatagtttgagccacagagaaagccaatgaaatagattcctacttttatttaatgccaagagttttcactagccccaaactttttattggcagcagatatcctaggaggggtgtttgggaaatatctagctattttaatagatagatacctttttgcttgatgataagtttttgcttgctcatattttttgtcttgatcctgagaatgcaagtaaggaattaataggaggttcttagtgaccagatgttgtaatgggctatacagtccagcaggcagtatgcacctagaaatttctcccttttttaggctgggcatggtggctcacacctgtaatcccagcactttgagaggccgaggtgagacgggaagatggcttgaactcaggagttcgagactagcctgggcaacgtgatgagactccgtctctaccaaaaaatatataaaaattagccgggcgttgtggcttgtacctgtggtcccatctgcttgggaggctgaggttgcaggatcacttgagcccaggaggtcaaggctgcagtgagccaagattgtgccactgcacaccggcctgggtgacagcatgagaacctgtctcaaaaaaaaaaaaaaaaaaagaaaaaa

SEQ ID NO: 14876 - DNA, 4151 bp, Homo sapiens
  source 1..4151: mol_type = unassigned DNA
ttttctggctttccctttcggacatgcgcgctcggagcaaggcgccctcgcactcagcttaccgcgcatgtacgttgccaggggtaacgcaggtagccaaagtggcttgtggagtggcgaccgttagtgaggcggttgctgagacagacgctgaggcgggtaggaggagcccgagccgtaagggaagccgtgatgagggccgtgttgacgtggagagataaagccgagcactgtataaatgacatcgcatttaagcctgatggaactcaactgattttggctgccggaagcagattactggtttatgacacctctgatggcaccttacttcagcccctcaagggacacaaagacactgtgtactgtgtggcatatgcgaaggatggcaagcgctttgcttctggatcagctgacaaaagcgttattatctggacatcaaaactggaaggcattctgaagtacacatcttggtctgtgatgtcttcattgcacctccatcttccatttctgggcctccacaaaacagtaagagtaacagccacagataaagcacctaaaggccaaggtgggaggattgattgcttgaggccaagcgttcaaaaccaacctggccaaaagcacaatgatgctatacaatgtgtctcctacaatcctattactcatcaactggcatcttgttcctccagtgactttgggttgtggtctcctgaacagaagtctgtctccaaacacaaatcaagcagcaagatcatctgctgcagctggacaaatgatggtcagtacctggcgctggggatgttcaatgggatcatcagcatacggaacaaaaatggcgaggagaaagtaaagatcgagcggccggggggctccctctcgccaatatggtccatctgctggaacccttcaagccgatgggagagtttctggatgaacagagagaatgaggatgccgaggatgtcattgtcaacagatatattcaggaaatcccttccactctgaagtcagcagtgtacagtagtcagggtagtgaggcagaggaggaagaaccagaggaagaggacgacagtcccagggacgacaacttagaggaacgtaatgacatcctggctgtggctgactggggacagaaagtttccttctaccagctgagtggaaaacagattggaaaggatcgggcactgaactttgacccctgctgcatcagctactttactaaaggcgagtacattttgctggggggttcagacaagcaagtatctcttttcaccaaggatggagtgcggcttgggactgttggggagcagaactcctgggtgtggacgtgtcaagcgaaaccggattccaactatgtggtggtcggctgccaggacggcaccatttccttctaccagcttattttcagcacagtccatgggctttacaaggaccgctatgcctacagggatagcatgactgacgtcattgtgcagcacctgatcactgagcagaaagttcggattaaatgcaaagagcttgtcaagaagattgccatctacagaaatcgattggctatccaactgccagagaaaatcctcatctatgagttgtattcagaggacttatcagacatgcattaccgggtaaaggagaagattatcaagaagtttgagtgcaacctcctggtggtgtgtgccaatcacatcatcctgtgccaggagaaacggctgcagtgcctgtccttcagcggagtgaaggagcgggagtggcagatggagtctctcattcgttacatcaaggtgatcggtggccctcctggaagagaaggcctcttagtggggctgaagaatggacagatcctgaagatcttcgtggacaatctctttgctatcgtcctgctgaagcaggccacagctgtgcgctgcttggacatgagtgcctcccgtaagaagctggccgtggtagatgaaaatgacacttgcctggtgtatgacatcgacaccaaggagctgctttttcaggaaccaaacgccaacagtgtagcttggaacacccagtgtgaggacatgctctgcttctcgggaggaggctacctcaacatcaaagccagcaccttccctgtgcaccggcagaagctgcagggctttgtggtcggctacaatggctccaagatcttctgcctccatgtcttctccatttctgccgtggaggtgccgcagtccgctcccatgtaccagtacctggataggaaactgttcaaggaagcctaccagattgcttgcttgggtgtcacagacactgattggcgtgaactggccatggaagcgctagaaggtttagattttgaaacagcaaagaaggccttcatcagagtacaagacctccgatatttagagctcatcagcagcattgaggagaggaagaagcggggagagaccaacaatgacctgtttctggcagatgtgttttcctaccaggggaagttccatgaggccgccaaactgtacaagaggagtgggcacgagaacctcgcgcttgaaatgtacaccgacctctgcatgtttgagtatgccaaggatttccttggatctggagaccccaaagaaacaaagatgctaatcaccaaacaggctgactgggccagaaatatcaaggagcccaaagccgccgtggagatgtacatctcagcaggagagcacgtcaaggccatcgagatctgtggtgaccatggctgggttgacatgttgatcgacatcgcccgcaaactggacaaggctgagcgcgagcccctgctgctgtgcgctacctacctcaagaagctggacagccctggctatgctgctgagacctacctgaagatgggtgacctcaagtccctggtgcagctgcacgtggagacccagcgctgggatgaggcctttgctttgggtgagaagcatcctgagtttaaggatgacatctacatgccgtatgctcagtggctagcagagaacgatcgctttgaggaagcccagaaagcgttccacaaggctgggcgacagagagaagcggtccaggtgctggagcagctcacaaacaatgccgtggcggagagcaggtttaatgatgctgcctattattactggatgctgtccatgcagtgcctcgatatagctcaagatcctgcccagaaggacacaatgcttggcaagttctaccacttccagcgtttggcagagctgtaccatggttaccatgccatccatcgccacacggaagatccgttcagtgtccatcgtcctgaaactcttttcaacatctccaggttcctgctgcacagcctgcccaaggacaccccctcgggcatctctaaagtgaaaatactcttcaccttggccaagcagagcaaggccctcggtgcctacaggctggcccggcacgcctatgacaagctgcgtggcctgtacatccctgccagattccaaaagtccattgagctgggtaccctgaccatccgcgccaagcccttccacgacagtgaggagttggtgcccttgtgctaccgctgctccaccaacaacccgctgctcaacaacctgggcaacgtctgcatcaactgccgccagcccttcatcttctccgcctcttcctacgacgtgctacacctggttgagttctacctggaggaagggatcactgatgaagaagccatctccctcatcgacctggaggtgctgagacccaagcgggatgacagacagctagagattgcaaacaacagctcccagattctgcggctagtggagaccaaggactccatcggagatgaggacccgttcacagctaagctgagctttgagcaaggtggctcagagttcgtgccagtggtggtgagccggctggtgctgcgctccatgagccgccgggatgtcctcatcaagcgatggcccccacccctgaggtggcaatacttccgctcactgctgcctgacgcctccattaccatgtgcccctcctgcttccagatgttccattctgaggactatgagttgctggtgcttcagcatggctgctgcccctactgccgcaggtgcaaggatgaccctggcccatgaccagcatcctggggacggcctgcaccctctgcccgccttggggtctgctgggctgtgaaggagaataaagagttaaactg

SEQ ID NO: 14877 - DNA, 3841 bp, Homo sapiens
  source 1..3841: mol_type = unassigned DNA
attgcttttgctgcttttctggctttccctttcggacatgcgcgctcggagcaaggcgccctcgcactcagcttaccgcgcatgtacgttgccaggggtaacgcaggtagccaaagtggcttgtggagtggcgaccgttagtgaggcggttgctgagacagacgctgaggcgggtaggaggagcccgagccgtaagggaagccgtgatgagggccgtgttgacgtggagagataaagccgagcactgtataaatgacatcgcatttaagcctgatggaactcaactgattttggctgccggaagcagattactggtttatgacacctctgatggcaccttacttcagcccctcaagggacacaaagacactgtgtactgtgtggcatatgcgaaggatggcaagcgctttgcttctggatcagctgacaaaagcgttattatctggacatcaaaactggaaggcattctgaagtacacgcacaatgatgctatacaatgtgtctcctacaatcctattactcatcaactggcatcttgttcctccagtgactttgggttgtggtctcctgaacagaagtctgtctccaaacacaaatcaagcagcaagatcatctgctgcagctggacaaatgatggtcagtacctggcgctggggatgttcaatgggatcatcagcatacggaacaaaaatggcgaggagaaagtaaagatcgagcggccggggggctccctctcgccaatatggtccatctgctggaacccttcaagagaggaacgtaatgacatcctggctgtggctgactggggacagaaagtttccttctaccagctgagtggaaaacagattggaaaggatcgggcactgaactttgacccctgctgcatcagctactttactaaaggcgagtacattttgctggggggttcagacaagcaagtatctcttttcaccaaggatggagtgcggcttgggactgttggggagcagaactcctgggtgtggacgtgtcaagcgaaaccggattccaactatgtggtggtcggctgccaggacggcaccatttccttctaccagcttattttcagcacagtccatgggctttacaaggaccgctatgcctacagggatagcatgactgacgtcattgtgcagcacctgatcactgagcagaaagttcggattaaatgcaaagagcttgtcaagaagattgccatctacagaaatcgattggctatccaactgccagagaaaatcctcatctatgagttgtattcagaggacttatcagacatgcattaccgggtaaaggagaagattatcaagaagtttgagtgcaacctcctggtggtgtgtgccaatcacatcatcctgtgccaggagaaacggctgcagtgcctgtccttcagcggagtgaaggagcgggagtggcagatggagtctctcattcgttacatcaaggtgatcggtggccctcctggaagagaaggcctcttagtggggctgaagaatggacagatcctgaagatcttcgtggacaatctctttgctatcgtcctgctgaagcaggccacagctgtgcgctgcttggacatgagtgcctcccgtaagaagctggccgtggtagatgaaaatgacacttgcctggtgtatgacatcgacaccaaggagctgctttttcaggaaccaaacgccaacagtgtagcttggaacacccagtgtgaggacatgctctgcttctcgggaggaggctacctcaacatcaaagccagcaccttccctgtgcaccggcagaagctgcagggctttgtggtcggctacaatggctccaagatcttctgcctccatgtcttctccatttctgccgtggaggtgccgcagtccgctcccatgtaccagtacctggataggaaactgttcaaggaagcctaccagattgcttgcttgggtgtcacagacactgattggcgtgaactggccatggaagcgctagaaggtttagattttgaaacagcaaagaaggccttcatcagagtacaagacctccgatatttagagctcatcagcagcattgaggagaggaagaagcggggagagaccaacaatgacctgtttctggcagatgtgttttcctaccaggggaagttccatgaggccgccaaactgtacaagaggagtgggcacgagaacctcgcgcttgaaatgtacaccgacctctgcatgtttgagtatgccaaggatttccttggatctggagaccccaaagaaacaaagatgctaatcaccaaacaggctgactgggccagaaatatcaaggagcccaaagccgccgtggagatgtacatctcagcaggagagcacgtcaaggccatcgagatctgtggtgaccatggctgggttgacatgttgatcgacatcgcccgcaaactggacaaggctgagcgcgagcccctgctgctgtgcgctacctacctcaagaagctggacagccctggctatgctgctgagacctacctgaagatgggtgacctcaagtccctggtgcagctgcacgtggagacccagcgctgggatgaggcctttgctttgggtgagaagcatcctgagtttaaggatgacatctacatgccgtatgctcagtggctagcagagaacgatcgctttgaggaagcccagaaagcgttccacaaggctgggcgacagagagaagcggtccaggtgctggagcagctcacaaacaatgccgtggcggagagcaggtttaatgatgctgcctattattactggatgctgtccatgcagtgcctcgatatagctcaagatcctgcccagaaggacacaatgcttggcaagttctaccacttccagcgtttggcagagctgtaccatggttaccatgccatccatcgccacacggaagatccgttcagtgtccatcgtcctgaaactcttttcaacatctccaggttcctgctgcacagcctgcccaaggacaccccctcgggcatctctaaagtgaaaatactcttcaccttggccaagcagagcaaggccctcggtgcctacaggctggcccggcacgcctatgacaagctgcgtggcctgtacatccctgccagattccaaaagtccattgagctgggtaccctgaccatccgcgccaagcccttccacgacagtgaggagttggtgcccttgtgctaccgctgctccaccaacaacccgctgctcaacaacctgggcaacgtctgcatcaactgccgccagcccttcatcttctccgcctcttcctacgacgtgctacacctggttgagttctacctggaggaagggatcactgatgaagaagccatctccctcatcgacctggaggtgctgagacccaagcgggatgacagacagctagagattgcaaacaacagctcccagattctgcggctagtggagaccaaggactccatcggagatgaggacccgttcacagctaagctgagctttgagcaaggtggctcagagttcgtgccagtggtggtgagccggctggtgctgcgctccatgagccgccgggatgtcctcatcaagcgatggcccccacccctgaggtggcaatacttccgctcactgctgcctgacgcctccattaccatgtgcccctcctgcttccagatgttccattctgaggactatgagttgctggtgcttcagcatggctgctgcccctactgccgcaggtgcaaggatgaccctggcccatgaccagcatcctggggacggcctgcaccctctgcccgccttggggtctgctgggctgtgaaggagaataaagagttaaactgtcagaa

SEQ ID NO: 14878 - DNA, 3877 bp, Homo sapiens
  source 1..3877: mol_type = unassigned DNA
ggcgaccgttagtgaggcggttgctgagacagacgctgaggcgggtaggaggagcccgagccgtaagggaagccgtgatgagggccgtgttgacgtggagagataaagccgagcactgtataaatgacatcgcatttaagcctgatggaactcaactgattttggctgccggaagcagattactggtttatgacacctctgatggcaccttacttcagcccctcaagggacacaaagacactgtgtactgtgtggcatatgcgaaggatggcaagcgctttgcttctggatcagctgacaaaagcgttattatctggacatcaaaactggaaggcattctgaagtacacgcacaatgatgctatacaatgtgtctcctacaatcctattactcatcaactggcatcttgttcctccagtgactttgggttgtggtctcctgaacagaagtctgtctccaaacacaaatcaagcagcaagatcatctgctgcagctggacaaatgatggtcagtacctggcgctggggatgttcaatgggatcatcagcatacggaacaaaaatggcgaggagaaagtaaagatcgagcggccggggggctccctctcgccaatatggtccatctgctggaacccttcaagccgatgggagagtttctggatgaacagagagaatgaggatgccgaggatgtcattgtcaacagatatattcaggaaatcccttccactctgaagtcagcagtgtacagtagtcagggtagtgaggcagaggaggaagaaccagaggaagaggacgacagtcccagggacgacaacttagaggaacgtaatgacatcctggctgtggctgactggggacagaaagtttccttctaccagctgagtggaaaacagattggaaaggatcgggcactgaactttgacccctgctgcatcagctactttactaaaggcgagtacattttgctggggggttcagacaagcaagtatctcttttcaccaaggatggagtgcggcttgggactgttggggagcagaactcctgggtgtggacgtgtcaagcgaaaccggattccaactatgtggtggtcggctgccaggacggcaccatttccttctaccagcttattttcagcacagtccatgggctttacaaggaccgctatgcctacagggatagcatgactgacgtcattgtgcagcacctgatcactgagcagaaagttcggattaaatgcaaagagcttgtcaagaagattgccatctacagaaatcgattggctatccaactgccagagaaaatcctcatctatgagttgtattcagaggacttatcagacatgcattaccgggtaaaggagaagattatcaagaagtttgagtgcaacctcctggtggtgtgtgccaatcacatcatcctgtgccaggagaaacggctgcagtgcctgtccttcagcggagtgaaggagcgggagtggcagatggagtctctcattcgttacatcaaggtgatcggtggccctcctggaagagaaggcctcttagtggggctgaagaatggacagatcctgaagatcttcgtggacaatctctttgctatcgtcctgctgaagcaggccacagctgtgcgctgcttggacatgagtgcctcccgtaagaagctggccgtggtagatgaaaatgacacttgcctggtgtatgacatcgacaccaaggagctgctttttcaggaaccaaacgccaacagtgtagcttggaacacccagtgtgaggacatgctctgcttctcgggaggaggctacctcaacatcaaagccagcaccttccctgtgcaccggcagaagctgcagggctttgtggtcggctacaatggctccaagatcttctgcctccatgtcttctccatttctgccgtggaggtgccgcagtccgctcccatgtaccagtacctggataggaaactgttcaaggaagcctaccagattgcttgcttgggtgtcacagacactgattggcgtgaactggccatggaagcgctagaaggtttagattttgaaacagcaaagaaggccttcatcagagtacaagacctccgatatttagagctcatcagcagcattgaggagaggaagaagcggggagagaccaacaatgacctgtttctggcagatgtgttttcctaccaggggaagttccatgaggccgccaaactgtacaagaggagtgggcacgagaacctcgcgcttgaaatgtacaccgacctctgcatgtttgagtatgccaaggatttccttggatctggagaccccaaagaaacaaagatgctaatcaccaaacaggctgactgggccagaaatatcaaggagcccaaagccgccgtggagatgtacatctcagcaggagagcacgtcaaggccatcgagatctgtggtgaccatggctgggttgacatgttgatcgacatcgcccgcaaactggacaaggctgagcgcgagcccctgctgctgtgcgctacctacctcaagaagctggacagccctggctatgctgctgagacctacctgaagatgggtgacctcaagtccctggtgcagctgcacgtggagacccagcgctgggatgaggcctttgctttgggtgagaagcatcctgagtttaaggatgacatctacatgccgtatgctcagtggctagcagagaacgatcgctttgaggaagcccagaaagcgttccacaaggctgggcgacagagagaagcggtccaggtgctggagcagctcacaaacaatgccgtggcggagagcaggtttaatgatgctgcctattattactggatgctgtccatgcagtgcctcgatatagctcaagatcctgcccagaaggacacaatgcttggcaagttctaccacttccagcgtttggcagagctgtaccatggttaccatgccatccatcgccacacggaagatccgttcagtgtccatcgtcctgaaactcttttcaacatctccaggttcctgctgcacagcctgcccaaggacaccccctcgggcatctctaaagtgaaaatactcttcaccttggccaagcagagcaaggccctcggtgcctacaggctggcccggcacgcctatgacaagctgcgtggcctgtacatccctgccagattccaaaagtccattgagctgggtaccctgaccatccgcgccaagcccttccacgacagtgaggagttggtgcccttgtgctaccgctgctccaccaacaacccgctgctcaacaacctgggcaacgtctgcatcaactgccgccagcccttcatcttctccgcctcttcctacgacgtgctacacctggttgagttctacctggaggaagggatcactgatgaagaagccatctccctcatcgacctggaggtgctgagacccaagcgggatgacagacagctagagattgcaaacaacagctcccagattctgcggctagtggagaccaaggactccatcggagatgaggacccgttcacagctaagctgagctttgagcaaggtggctcagagttcgtgccagtggtggtgagccggctggtgctgcgctccatgagccgccgggatgtcctcatcaagcgatggcccccacccctgaggtggcaatacttccgctcactgctgcctgacgcctccattaccatgtgcccctcctgcttccagatgttccattctgaggactatgagttgctggtgcttcagcatggctgctgcccctactgccgcaggtgcaaggatgaccctggcccatgaccagcatcctggggacggcctgcaccctctgcccgccttggggtctgctgggctgtgaaggagaataaagagtt

SEQ ID NO: 14879 - DNA, 3569 bp, Homo sapiens
  source 1..3569: mol_type = unassigned DNA
cttgtggagtggcgaccgttagtgaggcggttgctgagacagacgctgaggcgggtaggaggagcccgagccgtaagggaagccgtgatgagggccgtgttgacgtggagagataaagccgagcactgtataaatgacatcgcatttaagcctgatggaactcaactgattttggctgccggaagcagattactggtttatgacacctctgatggcaccttacttcagcccctcaagggacacaaagacactgtgtactgtgtggcatatgcgaaggatgggttgtggtctcctgaacagaagtctgtctccaaacacaaatcaagcagcaagatcatctgctgcagctggacaaatgatggtcagtacctggcgctggggatgttcaatgggatcatcagcatacggaacaaaaatggcgaggagaaagtaaagatcgagcggccggggggctccctctcgccaatatggtccatctgctggaacccttcaagagaggaacgtaatgacatcctggctgtggctgactggggacagaaagtttccttctaccagctgagtggaaaacagattggaaaggatcgggcactgaactttgacccctgctgcatcagctactttactaaaggcgagtacattttgctggggggttcagacaagcaagtatctcttttcaccaaggatggagtgcggcttgggactgttggggagcagaactcctgggtgtggacgtgtcaagcgaaaccggattccaactatgtggtggtcggctgccaggacggcaccatttccttctaccagcttattttcagcacagtccatgggctttacaaggaccgctatgcctacagggatagcatgactgacgtcattgtgcagcacctgatcactgagcagaaagttcggattaaatgcaaagagcttgtcaagaagattgccatctacagaaatcgattggctatccaactgccagagaaaatcctcatctatgagttgtattcagaggacttatcagacatgcattaccgggtaaaggagaagattatcaagaagtttgagtgcaacctcctggtggtgtgtgccaatcacatcatcctgtgccaggagaaacggctgcagtgcctgtccttcagcggagtgaaggagcgggagtggcagatggagtctctcattcgttacatcaaggtgatcggtggccctcctggaagagaaggcctcttagtggggctgaagaatggacagatcctgaagatcttcgtggacaatctctttgctatcgtcctgctgaagcaggccacagctgtgcgctgcttggacatgagtgcctcccgtaagaagctggccgtggtagatgaaaatgacacttgcctggtgtatgacatcgacaccaaggagctgctttttcaggaaccaaacgccaacagtgtagcttggaacacccagtgtgaggacatgctctgcttctcgggaggaggctacctcaacatcaaagccagcaccttccctgtgcaccggcagaagctgcagggctttgtggtcggctacaatggctccaagatcttctgcctccatgtcttctccatttctgccgtggaggtgccgcagtccgctcccatgtaccagtacctggataggaaactgttcaaggaagcctaccagattgcttgcttgggtgtcacagacactgattggcgtgaactggccatggaagcgctagaaggtttagattttgaaacagcaaagaaggccttcatcagagtacaagacctccgatatttagagctcatcagcagcattgaggagaggaagaagcggggagagaccaacaatgacctgtttctggcagatgtgttttcctaccaggggaagttccatgaggccgccaaactgtacaagaggagtgggcacgagaacctcgcgcttgaaatgtacaccgacctctgcatgtttgagtatgccaaggatttccttggatctggagaccccaaagaaacaaagatgctaatcaccaaacaggctgactgggccagaaatatcaaggagcccaaagccgccgtggagatgtacatctcagcaggagagcacgtcaaggccatcgagatctgtggtgaccatggctgggttgacatgttgatcgacatcgcccgcaaactggacaaggctgagcgcgagcccctgctgctgtgcgctacctacctcaagaagctggacagccctggctatgctgctgagacctacctgaagatgggtgacctcaagtccctggtgcagctgcacgtggagacccagcgctgggatgaggcctttgctttgggtgagaagcatcctgagtttaaggatgacatctacatgccgtatgctcagtggctagcagagaacgatcgctttgaggaagcccagaaagcgttccacaaggctgggcgacagagagaagcggtccaggtgctggagcagctcacaaacaatgccgtggcggagagcaggtttaatgatgctgcctattattactggatgctgtccatgcagtgcctcgatatagctcaagcagatcctgcccagaaggacacaatgcttggcaagttctaccacttccagcgtttggcagagctgtaccatggttaccatgccatccatcgccacacggaagatccgttcagtgtccatcgtcctgaaactcttttcaacatctccaggttcctgctgcacagcctgcccaaggacaccccctcgggcatctctaaagtgaaaatactcttcaccttggccaagcagagcaaggccctcggtgcctacaggctggcccggcacgcctatgacaagctgcgtggcctgtacatccctgccagattccaaaagtccattgagctgggtaccctgaccatccgcgccaagcccttccacgacagtgaggagttggtgcccttgtgctaccgctgctccaccaacaacccgctgctcaacaacctgggcaacgtctgcatcaactgccgccagcccttcatcttctccgcctcttcctacgacgtgctacacctggttgagttctacctggaggaagggatcactgatgaagaagccatctccctcatcgacctggaggtgctgagacccaagcgggatgacagacagctagagattgcaaacaacagctcccagattctgcggctagtggagaccaaggactccatcggagatgaggacccgttcacagctaagctgagctttgagcaaggtggctcagagttcgtgccagtggtggtgagccggctggtgctgcgctccatgagccgccgggatgtcctcatcaagcgatggcccccacccctgaggtggcaatacttccgctcactgctgcctgacgcctccattaccatgtgcccctcctgcttccagatgttccattctgaggactatgagttgctggtgcttcagcatggctgctgcccctactgccgcaggtgcaaggatgaccctggcccatgaccagcatcctggggacggcctgcaccctctgcccgccttggggtctgctgggctgtgaaggagaataaagagttaaactgtcagaa

SEQ ID NO: 14880 - DNA, 4057 bp, Homo sapiens
  source 1..4057: mol_type = unassigned DNA
agccaaagtggcttgtggagtggcgaccgttagtgaggcggttgctgagacagacgctgaggcgggtaggaggagcccgagccgtaagggaagccgtgatgagggccgtgttgacgtggagagataaagccgagcactgtataaatgacatcgcatttaagcctgatggaactcaactgattttggctgccggaagcagattactggtttatgacacctctgatggcaccttacttcagcccctcaagggacacaaagacactgtgtactgtgtggcatatgcgaaggatggaaatgaaagctcttcagtagcttgtttgggtcatgcagctggtcagtgagatctctaggaattctgacccagagactctgagcccaaagcttatgcttttcatcaccatcacctgctacctaccaggatgagggaggagtgatggaaatagcaagcgctttgcttctggatcagctgacaaaagcgttattatctggacatcaaaactggaaggcattctgaagtacacgcacaatgatgctatacaatgtgtctcctacaatcctattactcatcaactggcatcttgttcctccagtgactttgggttgtggtctcctgaacagaagtctgtctccaaacacaaatcaagcagcaagatcatctgctgcagctggacaaatgatggtcagtacctggcgctggggatgttcaatgggatcatcagcatacggaacaaaaatggcgaggagaaagtaaagatcgagcggccggggggctccctctcgccaatatggtccatctgctggaacccttcaagccgatgggagagtttctggatgaacagagagaatgaggatgccgaggatgtcattgtcaacagatatattcaggaaatcccttccactctgaagtcagcagtgtacagtagtcagggtagtgaggcagaggaggaagaaccagaggaagaggacgacagtcccagggacgacaacttagaggaacgtaatgacatcctggctgtggctgactggggacagaaagtttccttctaccagctgagtggaaaacagattggaaaggatcgggcactgaactttgacccctgctgcatcagctactttactaaaggcgagtacattttgctggggggttcagacaagcaagtatctcttttcaccaaggatggagtgcggcttgggactgttggggagcagaactcctgggtgtggacgtgtcaagcgaaaccggattccaactatgtggtggtcggctgccaggacggcaccatttccttctaccagcttattttcagcacagtccatgggctttacaaggaccgctatgcctacagggatagcatgactgacgtcattgtgcagcacctgatcactgagcagaaagttcggattaaatgcaaagagcttgtcaagaagattgccatctacagaaatcgattggctatccaactgccagagaaaatcctcatctatgagttgtattcagaggacttatcagacatgcattaccgggtaaaggagaagattatcaagaagtttgagtgcaacctcctggtggtgtgtgccaatcacatcatcctgtgccaggagaaacggctgcagtgcctgtccttcagcggagtgaaggagcgggagtggcagatggagtctctcattcgttacatcaaggtgatcggtggccctcctggaagagaaggcctcttagtggggctgaagaatggacagatcctgaagatcttcgtggacaatctctttgctatcgtcctgctgaagcaggccacagctgtgcgctgcttggacatgagtgcctcccgtaagaagctggccgtggtagatgaaaatgacacttgcctggtgtatgacatcgacaccaaggagctgctttttcaggaaccaaacgccaacagtgtagcttggaacacccagtgtgaggacatgctctgcttctcgggaggaggctacctcaacatcaaagccagcaccttccctgtgcaccggcagaagctgcagggctttgtggtcggctacaatggctccaagatcttctgcctccatgtcttctccatttctgccgtggaggtgccgcagtccgctcccatgtaccagtacctggataggaaactgttcaaggaagcctaccagattgcttgcttgggtgtcacagacactgattggcgtgaactggccatggaagcgctagaaggtttagattttgaaacagcaaagaaggccttcatcagagtacaagacctccgatatttagagctcatcagcagcattgaggagaggaagaagcggggagagaccaacaatgacctgtttctggcagatgtgttttcctaccaggggaagttccatgaggccgccaaactgtacaagaggagtgggcacgagaacctcgcgcttgaaatgtacaccgacctctgcatgtttgagtatgccaaggatttccttggatctggagaccccaaagaaacaaagatgctaatcaccaaacaggctgactgggccagaaatatcaaggagcccaaagccgccgtggagatgtacatctcagcaggagagcacgtcaaggccatcgagatctgtggtgaccatggctgggttgacatgttgatcgacatcgcccgcaaactggacaaggctgagcgcgagcccctgctgctgtgcgctacctacctcaagaagctggacagccctggctatgctgctgagacctacctgaagatgggtgacctcaagtccctggtgcagctgcacgtggagacccagcgctgggatgaggcctttgctttgggtgagaagcatcctgagtttaaggatgacatctacatgccgtatgctcagtggctagcagagaacgatcgctttgaggaagcccagaaagcgttccacaaggctgggcgacagagagaagcggtccaggtgctggagcagctcacaaacaatgccgtggcggagagcaggtttaatgatgctgcctattattactggatgctgtccatgcagtgcctcgatatagctcaagatcctgcccagaaggacacaatgcttggcaagttctaccacttccagcgtttggcagagctgtaccatggttaccatgccatccatcgccacacggaagatccgttcagtgtccatcgtcctgaaactcttttcaacatctccaggttcctgctgcacagcctgcccaaggacaccccctcgggcatctctaaagtgaaaatactcttcaccttggccaagcagagcaaggccctcggtgcctacaggctggcccggcacgcctatgacaagctgcgtggcctgtacatccctgccagattccaaaagtccattgagctgggtaccctgaccatccgcgccaagcccttccacgacagtgaggagttggtgcccttgtgctaccgctgctccaccaacaacccgctgctcaacaacctgggcaacgtctgcatcaactgccgccagcccttcatcttctccgcctcttcctacgacgtgctacacctggttgagttctacctggaggaagggatcactgatgaagaagccatctccctcatcgacctggaggtgctgagacccaagcgggatgacagacagctagagattgcaaacaacagctcccagattctgcggctagtggagaccaaggactccatcggagatgaggacccgttcacagctaagctgagctttgagcaaggtggctcagagttcgtgccagtggtggtgagccggctggtgctgcgctccatgagccgccgggatgtcctcatcaagcgatggcccccacccctgaggtggcaatacttccgctcactgctgcctgacgcctccattaccatgtgcccctcctgcttccagatgttccattctgaggactatgagttgctggtgcttcagcatggctgctgcccctactgccgcaggtgcaaggatgaccctggcccatgaccagcatcctggggacggcctgcaccctctgcccgccttggggtctgctgggctgtgaaggagaataaagagttaaactgtc

SEQ ID NO: 14881 - DNA, 3568 bp, Homo sapiens
  source 1..3568: mol_type = unassigned DNA
aagccgtgatgagggccgtgttgacgtggagagataaagccgagcactgtataaatgacatcgcatttaagcctgatggaactcaactgattttggctgccggaagcagattactggtttatgacacctctgatggcaccttacttcagcccctcaagggacacaaagacactgtgtactgtgtggcatatgcgaaggatggcacaatgatgctatacaatgtgtctcctacaatcctattactcatcaactggcatcttgttcctccagtgactttgggttgtggtctcctgaacagaagtctgtctccaaacacaaatcaagcagcaagatcatctgctgcagctggacaaatgatggtcagtacctggcgctggggatgttcaatgggatcatcagcatacggaacaaaaatggcgaggagaaagtaaagatcgagcggccggggggctccctctcgccaatatggtccatctgctggaacccttcaagagaggaacgtaatgacatcctggctgtggctgactggggacagaaagtttccttctaccagctgagtggaaaacagattggaaaggatcgggcactgaactttgacccctgctgcatcagctactttactaaaggcgagtacattttgctggggggttcagacaagcaagtatctcttttcaccaaggatggagtgcggcttgggactgttggggagcagaactcctgggtgtggacgtgtcaagcgaaaccggattccaactatgtggtggtcggctgccaggacggcaccatttccttctaccagcttattttcagcacagtccatgggctttacaaggaccgctatgcctacagggatagcatgactgacgtcattgtgcagcacctgatcactgagcagaaagttcggattaaatgcaaagagcttgtcaagaagattgccatctacagaaatcgattggctatccaactgccagagaaaatcctcatctatgagttgtattcagaggacttatcagacatgcattaccgggtaaaggagaagattatcaagaagtttgagtgcaacctcctggtggtgtgtgccaatcacatcatcctgtgccaggagaaacggctgcagtgcctgtccttcagcggagtgaaggagcgggagtggcagatggagtctctcattcgttacatcaaggtgatcggtggccctcctggaagagaaggcctcttagtggggctgaagaatggacagatcctgaagatcttcgtggacaatctctttgctatcgtcctgctgaagcaggccacagctgtgcgctgcttggacatgagtgcctcccgtaagaagctggccgtggtagatgaaaatgacacttgcctggtgtatgacatcgacaccaaggagctgctttttcaggaaccaaacgccaacagtgtagcttggaacacccagtgtgaggacatgctctgcttctcgggaggaggctacctcaacatcaaagccagcaccttccctgtgcaccggcagaagctgcagggctttgtggtcggctacaatggctccaagatcttctgcctccatgtcttctccatttctgccgtggaggtgccgcagtccgctcccatgtaccagtacctggataggaaactgttcaaggaagcctaccagattgcttgcttgggtgtcacagacactgattggcgtgaactggccatggaagcgctagaaggtttagattttgaaacagcaaagaaggccttcatcagagtacaagacctccgatatttagagctcatcagcagcattgaggagaggaagaagcggggagagaccaacaatgacctgtttctggcagatgtgttttcctaccaggggaagttccatgaggccgccaaactgtacaagaggagtgggcacgagaacctcgcgcttgaaatgtacaccgacctctgcatgtttgagtatgccaaggatttccttggatctggagaccccaaagaaacaaagatgctaatcaccaaacaggctgactgggccagaaatatcaaggagcccaaagccgccgtggagatgtacatctcagcaggagagcacgtcaaggccatcgagatctgtggtgaccatggctgggttgacatgttgatcgacatcgcccgcaaactggacaaggctgagcgcgagcccctgctgctgtgcgctacctacctcaagaagctggacagccctggctatgctgctgagacctacctgaagatgggtgacctcaagtccctggtgcagctgcacgtggagacccagcgctgggatgaggcctttgctttgggtgagaagcatcctgagtttaaggatgacatctacatgccgtatgctcagtggctagcagagaacgatcgctttgaggaagcccagaaagcgttccacaaggctgggcgacagagagaagcggtccaggtgctggagcagctcacaaacaatgccgtggcggagagcaggtttaatgatgctgcctattattactggatgctgtccatgcagtgcctcgatatagctcaagatcctgcccagaaggacacaatgcttggcaagttctaccacttccagcgtttggcagagctgtaccatggttaccatgccatccatcgccacacggaagatccgttcagtgtccatcgtcctgaaactcttttcaacatctccaggttcctgctgcacagcctgcccaaggacaccccctcgggcatctctaaagtgaaaatactcttcaccttggccaagcagagcaaggccctcggtgcctacaggctggcccggcacgcctatgacaagctgcgtggcctgtacatccctgccagattccaaaagtccattgagctgggtaccctgaccatccgcgccaagcccttccacgacagtgaggagttggtgcccttgtgctaccgctgctccaccaacaacccgctgctcaacaacctgggcaacgtctgcatcaactgccgccagcccttcatcttctccgcctcttcctacgacgtgctacacctggttgagttctacctggaggaagggatcactgatgaagaagccatctccctcatcgacctggaggtgctgagacccaagcgggatgacagacagctagagattgcaaacaacagctcccagattctgcggctagtggagaccaaggactccatcggagatgaggacccgttcacagctaagctgagctttgagcaaggtggctcagagttcgtgccagtggtggtgagccggctggtgctgcgctccatgagccgccgggatgtcctcatcaagcgatggcccccacccctgaggtggcaatacttccgctcactgctgcctgacgcctccattaccatgtgcccctcctgcttccagatgttccattctgaggactatgagttgctggtgcttcagcatggctgctgcccctactgccgcaggtgcaaggatgaccctggcccatgaccagcatcctggggacggcctgcaccctctgcccgccttggggtctgctgggctgtgaaggagaataaagagttaaactgtcagaatgtg

SEQ ID NO: 14882 - DNA, 3361 bp, Homo sapiens
  source 1..3361: mol_type = unassigned DNA
agccgtaagggaagccgtgatgagggccgtgttgacgtggagagataaagccgagcactgtataaatgacatcgcatttaagcctgatggaactcaactgattttggctgccggaagcagattactggtttatgacacctctgatggcaccttacttcagcccctcaagggacacaaagacactgtgtactgtgtggcatatgcgaaggatgggttgtggtctcctgaacagaagtctgtctccaaacacaaatcaagcagcaagatcatctgctgcagagaggaacgtaatgacatcctggctgtggctgactggggacagaaagtttccttctaccagctgagtggaaaacagattggaaaggatcgggcactgaactttgacccctgctgcatcagctactttactaaaggcgagtacattttgctggggggttcagacaagcaagtatctcttttcaccaaggatggagtgcggcttgggactgttggggagcagaactcctgggtgtggacgtgtcaagcgaaaccggattccaactatgtggtggtcggctgccaggacggcaccatttccttctaccagcttattttcagcacagtccatgggctttacaaggaccgctatgcctacagggatagcatgactgacgtcattgtgcagcacctgatcactgagcagaaagttcggattaaatgcaaagagcttgtcaagaagattgccatctacagaaatcgattggctatccaactgccagagaaaatcctcatctatgagttgtattcagaggacttatcagacatgcattaccgggtaaaggagaagattatcaagaagtttgagtgcaacctcctggtggtgtgtgccaatcacatcatcctgtgccaggagaaacggctgcagtgcctgtccttcagcggagtgaaggagcgggagtggcagatggagtctctcattcgttacatcaaggtgatcggtggccctcctggaagagaaggcctcttagtggggctgaagaatggacagatcctgaagatcttcgtggacaatctctttgctatcgtcctgctgaagcaggccacagctgtgcgctgcttggacatgagtgcctcccgtaagaagctggccgtggtagatgaaaatgacacttgcctggtgtatgacatcgacaccaaggagctgctttttcaggaaccaaacgccaacagtgtagcttggaacacccagtgtgaggacatgctctgcttctcgggaggaggctacctcaacatcaaagccagcaccttccctgtgcaccggcagaagctgcagggctttgtggtcggctacaatggctccaagatcttctgcctccatgtcttctccatttctgccgtggaggtgccgcagtccgctcccatgtaccagtacctggataggaaactgttcaaggaagcctaccagattgcttgcttgggtgtcacagacactgattggcgtgaactggccatggaagcgctagaaggtttagattttgaaacagcaaagaaggccttcatcagagtacaagacctccgatatttagagctcatcagcagcattgaggagaggaagaagcggggagagaccaacaatgacctgtttctggcagatgtgttttcctaccaggggaagttccatgaggccgccaaactgtacaagaggagtgggcacgagaacctcgcgcttgaaatgtacaccgacctctgcatgtttgagtatgccaaggatttccttggatctggagaccccaaagaaacaaagatgctaatcaccaaacaggctgactgggccagaaatatcaaggagcccaaagccgccgtggagatgtacatctcagcaggagagcacgtcaaggccatcgagatctgtggtgaccatggctgggttgacatgttgatcgacatcgcccgcaaactggacaaggctgagcgcgagcccctgctgctgtgcgctacctacctcaagaagctggacagccctggctatgctgctgagacctacctgaagatgggtgacctcaagtccctggtgcagctgcacgtggagacccagcgctgggatgaggcctttgctttgggtgagaagcatcctgagtttaaggatgacatctacatgccgtatgctcagtggctagcagagaacgatcgctttgaggaagcccagaaagcgttccacaaggctgggcgacagagagaagcggtccaggtgctggagcagctcacaaacaatgccgtggcggagagcaggtttaatgatgctgcctattattactggatgctgtccatgcagtgcctcgatatagctcaagcagatcctgcccagaaggacacaatgcttggcaagttctaccacttccagcgtttggcagagctgtaccatggttaccatgccatccatcgccacacggaagatccgttcagtgtccatcgtcctgaaactcttttcaacatctccaggttcctgctgcacagcctgcccaaggacaccccctcgggcatctctaaagtcaggaaaatactcttcaccttggccaagcagagcaaggccctcggtgcctacaggctggcccggcacgcctatgacaagctgcgtggcctgtacatccctgccagattccaaaagtccattgagctgggtaccctgaccatccgcgccaagcccttccacgacagtgaggagttggtgcccttgtgctaccgctgctccaccaacaacccgctgctcaacaacctgggcaacgtctgcatcaactgccgccagcccttcatcttctccgcctcttcctacgacgtgctacacctggttgagttctacctggaggaagggatcactgatgaagaagccatctccctcatcgacctggaggtgctgagacccaagcgggatgacagacagctagagattgcaaacaacagctcccagattctgcggctagtggagaccaaggactccatcggagatgaggacccgttcacagctaagctgagctttgagcaaggtggctcagagttcgtgccagtggtggtgagccggctggtgctgcgctccatgagccgccgggatgtcctcatcaagcgatggcccccacccctgaggtggcaatacttccgctcactgctgcctgacgcctccattaccatgtgcccctcctgcttccagatgttccattctgaggactatgagttgctggtgcttcagcatggctgctgcccctactgccgcaggtgcaaggatgaccctggcccatgaccagcatcctggggacggcctgcaccctctgcccgccttggggtctgctgggctgtgaaggagaataaagagttaaactgtcagaatgtg

SEQ ID NO: 14883 - DNA, 3742 bp, Homo sapiens
  source 1..3742: mol_type = unassigned DNA
aacgcaggtagccaaagtggcttgtggagtggcgaccgttagtgaggcggttgctgagacagacgctgaggcgggtaggaggagcccgagccgtaagggaagccgtgatgagggccgtgttgacgtggagagataaagccgagcactgtataaatgacatcgcatttaagcctgatggaactcaactgattttggctgccggaagcagattactggtttatgacacctctgatggcaccttacttcagcccctcaagggacacaaagacactgtgtactgtgtggcatatgcgaaggatggcaagcgctttgcttctggatcagctgacaaaagcgttattatctggacatcaaaactggaaggcattctgaagtacacgcacaatgatgctatacaatgtgtctcctacaatcctattactcatcaactggcatcttgttcctccagtgactttgggttgtggtctcctgaacagaagtctgtctccaaacacaaatcaagcagcaagatcatctgctgcagctggacaaatgatggtcagtacctggcgctggggatgttcaatgggatcatcagcatacggaacaaaaatggcgaggagaaagtaaagatcgagcggccggggggctccctctcgccaatatggtccatctgctggaacccttcaagagaggaacgtaatgacatcctggctgtggctgactggggacagaaagtttccttctaccagctgagtggaaaacagattggaaaggatcgggcactgaactttgacccctgctgcatcagctactttactaaaggcgagtacattttgctggggggttcagacaagcaagtatctcttttcaccaaggatggagtgcggcttgggactgttggggagcagaactcctgggtgtggacgtgtcaagcgaaaccggattccaactatgtggtggtcggctgccaggacggcaccatttccttctaccagcttattttcagcacagtccatgggctttacaaggaccgctatgcctacagggatagcatgactgacgtcattgtgcagcacctgatcactgagcagaaagttcggattaaatgcaaagagcttgtcaagaagattgccatctacagaaatcgattggctatccaactgccagagaaaatcctcatctatgagttgtattcagaggacttatcagacatgcattaccgggtaaaggagaagattatcaagaagtttgagtgcaacctcctggtggtgtgtgccaatcacatcatcctgtgccaggagaaacggctgcagtgcctgtccttcagcggagtgaaggagcgggagtggcagatggagtctctcattcgttacatcaaggtgatcggtggccctcctggaagagaaggcctcttagtggggctgaagaatggacagatcctgaagatcttcgtggacaatctctttgctatcgtcctgctgaagcaggccacagctgtgcgctgcttggacatgagtgcctcccgtaagaagctggccgtggtagatgaaaatgacacttgcctggtgtatgacatcgacaccaaggagctgctttttcaggaaccaaacgccaacagtgtagcttggaacacccagtgtgaggacatgctctgcttctcgggaggaggctacctcaacatcaaagccagcaccttccctgtgcaccggcagaagctgcagggctttgtggtcggctacaatggctccaagatcttctgcctccatgtcttctccatttctgccgtggaggtgccgcagtccgctcccatgtaccagtacctggataggaaactgttcaaggaagcctaccagattgcttgcttgggtgtcacagacactgattggcgtgaactggccatggaagcgctagaaggtttagattttgaaacagcaaagaaggccttcatcagagtacaagacctccgatatttagagctcatcagcagcattgaggagaggaagaagcggggagagaccaacaatgacctgtttctggcagatgtgttttcctaccaggggaagttccatgaggccgccaaactgtacaagaggagtgggcacgagaacctcgcgcttgaaatgtacaccgacctctgcatgtttgagtatgccaaggatttccttggatctggagaccccaaagaaacaaagatgctaatcaccaaacaggctgactgggccagaaatatcaaggagcccaaagccgccgtggagatgtacatctcagcaggagagcacgtcaaggccatcgagatctgtggtgaccatggctgggttgacatgttgatcgacatcgcccgcaaactggacaaggctgagcgcgagcccctgctgctgtgcgctacctacctcaagaagctggacagccctggctatgctgctgagacctacctgaagatgggtgacctcaagtccctggtgcagctgcacgtggagacccagcgctgggatgaggcctttgctttgggtgagaagcatcctgagtttaaggatgacatctacatgccgtatgctcagtggctagcagagaacgatcgctttgaggaagcccagaaagcgttccacaaggctgggcgacagagagaagcggtccaggtgctggagcagctcacaaacaatgccgtggcggagagcaggtttaatgatgctgcctattattactggatgctgtccatgcagtgcctcgatatagctcaagatcctgcccagaaggacacaatgcttggcaagttctaccacttccagcgtttggcagagctgtaccatggttaccatgccatccatcgccacacggaagatccgttcagtgtccatcgtcctgaaactcttttcaacatctccaggttcctgctgcacagcctgcccaaggacaccccctcgggcatctctaaagtctgtgaaaatactcttcaccttggccaagcagagcaaggccctcggtgcctacaggctggcccggcacgcctatgacaagctgcgtggcctgtacatccctgccagattccaaaagtccattgagctgggtaccctgaccatccgcgccaagcccttccacgacagtgaggagttggtgcccttgtgctaccgctgctccaccaacaacccgctgctcaacaacctgggcaacgtctgcatcaactgccgccagcccttcatcttctccgcctcttcctacgacgtgctacacctggttgagttctacctggaggaagggatcactgatgaagaagccatctccctcatcgacctggaggtgctgagacccaagcgggatgacagacagctagagattgcaaacaacagctcccagattctgcggctagtggagaccaaggactccatcggagatgaggacccgttcacagctaagctgagctttgagcaaggtggctcagagttcgtgccagtggtggtgagccggctggtgctgcgctccatgagccgccgggatgtcctcatcaagcgatggcccccacccctgaggtggcaatacttccgctcactgctgcctgacgcctccattaccatgtgcccctcctgcttccagatgttccattctgaggactatgagttgctggtgcttcagcatggctgctgcccctactgccgcaggtgcaaggatgaccctggcccatgaccagcatcctggggacggcctgcaccctctgcccgccttggggtctgctgggctgtgaaggagaataaagagttaaactgtc

SEQ ID NO: 14884 - DNA, 3541 bp, Homo sapiens
  source 1..3541: mol_type = unassigned DNA
aaagtggcttgtggagtggcgaccgttagtgaggcggttgctgagacagacgctgaggcgggtaggaggagcccgagccgtaagggaagccgtgatgagggccgtgttgacgtggagagataaagccgagcactgtataaatgacatcgcatttaagcctgatggaactcaactgattttggctgccggaagcagattactggtttatgacacctctgatggcaccttacttcagcccctcaagggacacaaagacactgtgtactgtgtggcatatgcgaaggatgtattgtgcattgaagggttgtggtctcctgaacagaagtctgtctccaaacacaaatcaagcagcaagatcatctgctgcagctggacaaatgatggtcagtacctggcgctggggatgttcaatgggatcatcagcatacggaacaaaaatggcgaggagaaagtaaagatcgagcggccggggggctccctctcgccaatatggtccatctgctggaacccttcaagagaggaacgtaatgacatcctggctgtggctgactggggacagaaagtttccttctaccagctgagtggaaaacagattggaaaggatcgggcactgaactttgacccctgctgcatcagctactttactaaaggcgagtacattttgctggggggttcagacaagcaagtatctcttttcaccaaggatggagtgcggcttgggactgttggggagcagaactcctgggtgtggacgtgtcaagcgaaaccggattccaactatgtggtggtcggctgccaggacggcaccatttccttctaccagcttattttcagcacagtccatgggctttacaaggaccgctatgcctacagggatagcatgactgacgtcattgtgcagcacctgatcactgagcagaaagttcggattaaatgcaaagagcttgtcaagaagattgccatctacagaaatcgattggctatccaactgccagagaaaatcctcatctatgagttgtattcagaggacttatcagacatgcattaccgggtaaaggagaagattatcaagaagtttgagtgcaacctcctggtggtgtgtgccaatcacatcatcctgtgccaggagaaacggctgcagtgcctgtccttcagcggagtgaaggagcgggagtggcagatggagtctctcattcgttacatcaaggtgatcggtggccctcctggaagagaaggcctcttagtggggctgaagaatggacagatcctgaagatcttcgtggacaatctctttgctatcgtcctgctgaagcaggccacagctgtgcgctgcttggacatgagtgcctcccgtaagaagctggccgtggtagatgaaaatgacacttgcctggtgtatgacatcgacaccaaggagctgctttttcaggaaccaaacgccaacagtgtagcttggaacacccagtgtgaggacatgctctgcttctcgggaggaggctacctcaacatcaaagccagcaccttccctgtgcaccggcagaagctgcagggctttgtggtcggctacaatggctccaagatcttctgcctccatgtcttctccatttctgccgtggaggtgccgcagtccgctcccatgtaccagtacctggataggaaactgttcaaggaagcctaccagattgcttgcttgggtgtcacagacactgattggcgtgaactggccatggaagcgctagaaggtttagattttgaaacagcaaagaaggagaggaagaagcggggagagaccaacaatgacctgtttctggcagatgtgttttcctaccaggggaagttccatgaggccgccaaactgtacaagaggagtgggcacgagaacctcgcgcttgaaatgtacaccgacctctgcatgtttgagtatgccaaggatttccttggatctggagaccccaaagaaacaaagatgctaatcaccaaacaggctgactgggccagaaatatcaaggagcccaaagccgccgtggagatgtacatctcagcaggagagcacgtcaaggccatcgagatctgtggtgaccatggctgggttgacatgttgatcgacatcgcccgcaaactggacaaggctgagcgcgagcccctgctgctgtgcgctacctacctcaagaagctggacagccctggctatgctgctgagacctacctgaagatgggtgacctcaagtccctggtgcagctgcacgtggagacccagcgctgggatgaggcctttgctttgggtgagaagcatcctgagtttaaggatgacatctacatgccgtatgctcagtggctagcagagaacgatcgctttgaggaagcccagaaagcgttccacaaggctgggcgacagagagaagcggtccaggtgctggagcagctcacaaacaatgccgtggcggagagcaggtttaatgatgctgcctattattactggatgctgtccatgcagtgcctcgatatagctcaagcagatcctgcccagaaggacacaatgcttggcaagttctaccacttccagcgtttggcagagctgtaccatggttaccatgccatccatcgccacacggaagatccgttcagtgtccatcgtcctgaaactcttttcaacatctccaggttcctgctgcacagcctgcccaaggacaccccctcgggcatctctaaagtgaaaatactcttcaccttggccaagcagagcaaggccctcggtgcctacaggctggcccggcacgcctatgacaagctgcgtggcctgtacatccctgccagattccaaaagtccattgagctgggtaccctgaccatccgcgccaagcccttccacgacagtgaggagttggtgcccttgtgctaccgctgctccaccaacaacccgctgctcaacaacctgggcaacgtctgcatcaactgccgccagcccttcatcttctccgcctcttcctacgacgtgctacacctggttgagttctacctggaggaagggatcactgatgaagaagccatctccctcatcgacctggaggtgctgagacccaagcgggatgacagacagctagagattgcaaacaacagctcccagattctgcggctagtggagaccaaggactccatcggagatgaggacccgttcacagctaagctgagctttgagcaaggtggctcagagttcgtgccagtggtggtgagccggctggtgctgcgctccatgagccgccgggatgtcctcatcaagcgatggcccccacccctgaggtggcaatacttccgctcactgctgcctgacgcctccattaccatgtgcccctcctgcttccagatgttccattctgaggactatgagttgctggtgcttcagcatggctgctgcccctactgccgcaggtgcaaggatgaccctggcccatgaccagcatcctggggacggcctgcaccctctgcccgccttggggtctgctgggctgtgaaggagaataaagagttaaactgtcagaatgtg

SEQ ID NO: 14885 - DNA, 5415 bp, Homo sapiens
  source 1..5415: mol_type = unassigned DNA
gtcgcataagcgtcagtgcctgtcgctgcggctgcgtggcgggttgtccaggtaaccacgggagttgtcgctgtctaggagcatctgaaagacaggtgtgcgtcatgcacttgaagcacctgaggaccctgctgagccctcaggatggagctgcaaaggtgacctgcatggcttggtcccagaacaatgccaaatttgctgtctgcacagtggaccgagtggtcttgctgtatgatgaacatggagaacggagagataaattctccaccaaaccagctgacatgaagtatggcaggaagagctatatggtgaagggcatggctttttctcctgattccactaaaattgccataggacagactgacaacatcatctatgtctacaagattggagaagattggggtgacaagaaagtcatctgcaacaagttcatccagacgagtgctgtcacttgtctgcaatggccggcagaatacatcattgtctttggactggctgaagggaaggttcgtttagcaaacaccaaaactaataaatcatctaccatctatgggacagagtcttacgtggtgtccctgacaacaaattgctctgggaaaggaattctctctggtcatgcagatggtaccatcgttaggtatttctttgatgatgaaggctctggagagtcacaggggaagttggttaaccacccgtgtccaccctatgccttggcatgggcaaccaatagcatcgtggctgcaggctgtgatcggaaaattgtagcctatggaaaagaaggtcacatgctacaaacttttgattatagccgtgaccctcaggagcgggagttcaccacagctgtatcaagtcctgggggccagtctgttgtgctaggaagttatgacaggcttcgggtgttcaactggatccctcgaagaagcatctgggaagaggcaaagcccaaggagattaccaatttatacaccatcactgccttggcctggaagcgggatggctcacggctctgtgtgggcacactatgtggtggggtggaacagtttgactgctgcctccgaaggagtatttacaagaacaagtttgagttgacgtatgtgggacctagccaggtgattgtgaagaacctgtcatcaggaacccgagtggtgctcaagtcacactatggctatgaggtggaagaggtgaaaatcctaggaaaggaacgttacttggtggctcacacatcagaaacactgctgctgggggacctgaacactaatcggcttagtgagatagcctggcaaggatctggtggcaatgagaagtatttctttgaaaatgagaatgtatgcatgatcttcaatgccggagagctaaccctggtggaatatgggaataatgacaccctgggttctgtacgcactgaattcatgaacccccacctcatcagtgttcgtattaatgagaggtgtcagcgaggaacagaagataataagaaattggcttatcttattgatattaagactattgctatagtggatctgattggtggctacaacattggcaccgtcagccatgagagccgtgtggattggctggaacttaatgagactggacacaagctcctcttcagggaccggaaacttcgtttgcatctgtatgatattgaaagctgctctaagacaatgatcctcaacttctgctcctatatgcagtgggtcccaggaagtgacgtgctggtagctcagaaccgaaacagtctgtgtgtatggtacaacattgaggcacctgagagagtcaccatgttcactattaggggtgatgttataggtctggagcggggcgggggaaagaccgaggtgatggtgatggaaggtgtgactactgttgcctacacattggatgagggcctcatcgagtttggaacagccattgatgatggcaactacatccgggcaacagccttcttagagactctggaaatgaccccagaaacagaggcaatgtggaaaaccttgagtaaactggcactagaggcaaggcaactacacattgcggagaggtgcttttctgctttgggccaagtagcaaaagctcgattcctgcatgagaccaatgagattgcagatcaagtatcccgggaatatggcggagaaggaacagacttttatcaggtccgagcacgtctagccatgctggaaaagaactacaaactggctgaaatgatctttttggaacagaatgctgtggaggaggccatgggcatgtaccaggagctacaccgttgggatgagtgtatcgctgtggctgaagccaaggggcacccagccctggagaagctacgtcgtagttactaccagtggctgatggacacacagcaagaggagcgagcaggtgaactacaggagagccaaggggatgggctagcagccatcagcctctacctcaaagctgggctccctgccaaagctgctcggctggtgctgacccgagaggaactgctagccaacacagagctggtagaacacatcactgcagcccttatcaagggggaactctacgaaagggcaggtgatctctttgagaagattcacaatccacagaaggccctggagtgctaccgtaaaggcaacgcattcatgaaagcggtagagctggctcgattggccttcccagtggaggtggtgaaactagaggaggcatggggggaccacctggtgcagcagaagcagcttgatgcagccattaatcactacatcgaagccaggtgctccattaaggcaattgaggccgccctgggtgcccgccagtggaagaaggcaatttatatattagatctacaggaccggaacactgcatccaaatactatcctctcgtggcccaacactatgcatccctgcaggagtatgagattgctgaggagctctatactaagggagatcggacaaaagatgccatagacatgtacacccaggctggtcgttgggaacaagcccacaagctggcgatgaaatgcatgagaccagaagatgtgtcagtgctatacatcactcaggcccaggaaatggagaagcagggcaagtaccgtgaggctgaaaggctatatgtgacagtacaagagcctgatcttgccatcaccatgtacaaaaagcacaagttgtatgatgacatgatccgcctggtagggaagcaccatccagatctcctcagtgatacacacctacatctgggcaaggagctggaggctgaaggccgactacaggaggctgagtaccactacctcgaggcccaggaatggaaggcaacagtgaacatgtaccgggccagtgggctttgggaagaggcctacagggtggccagaactcaaggaggggctaatgcccacaaacacgtggcctatctgtgggcaaagagcctgggaggagaggctgcagttagactgcttaataagctgggactcctggaagctgctgttgaccacgctgcagacaattgctcctttgaatttgcgtttgaactctctcggctggccctcaagcacaaaacccccgaggttcatctcaaatatgctatgttcctggaggatgagggtaaattcgaagaggctgaagctgaattcatcagagctggtaaacccaaggaggcagtcctcatgtttgtccataaccaggattgggaggcagctcagcgtgtggctgaggctcacgaccctgacagtgtcgccgaggtgcttgtgggacaggcccggggggccttggaggagaaggactttcagaaagcagaagggctgctgctccgggcccagagaccaggcctggccctcaattattataaggaggctggattatggagtgacgctctgcgcatctgcaaggactatgtgcccagccagctggaggctctgcaggaagaatatgagcgggaagctactaagaagggggccaggggtgtggagggatttgtggaacaagctcgacactgggagcaggctggagagtacagccgtgccgtggactgctacctcaaagtgcgagactctggaaacagcggcctggcggagaagtgctggatgaaggcagctgaactctccatcaagtttctgcctccccaacgtaatatggaagtcgttctggctgtaggaccccagctgattggaattggaaagcacagtgcagctgcagagctctatctgaatctggaccttgtcaaggaagcaatcgatgctttcatcgagggtgaggagtggaacaaggcgaagcgtgtagctaaggagttagatcccaggtatgaagactatgtggaccagcattataaagagttcctcaagaatcagggcaaagtggactcgctggtgggtgtggatgtgatagctgctttggacctgtatgtggagcagggccagtgggacaagtgcattgaaacagctaccaagcagaactacaagattctgcacaagtatgtggctttgtatgcaactcacttgatccgggagggtagctctgcccaggcattggccctgtatgtacagcacggagcccctgctaacccacagaacttcaatatctacaaaaggatcttcactgacatggtgagctctcctggaaccaactgtgccgaggcctatcatagctgggctgatcttcgagatgtcctcttcaacctgtgtgaaaacctggtgaagtccagtgaggcaaactctccagcccatgaggagttcaagacgatgctgctgatcgctcattactatgccacgcgctctgcagcccagagtgtcaaacagctggaaaccgtggctgccaggctttctgtttcactcttgcgtcacacccagctactacctgtagacaaagccttctatgaagcaggcattgctgccaaggcagttggctgggataacatggcattcatcttcctcaatcgctttttggacctgaccgatgcaatcgaggaagggactctagatggccttgaccactctgattttcaggatacagacattccctttgaggtgccactcccagctaagcagcatgtaccggaggctgagagagaagaggttcgagactgggtgcttacagtctccatggaccagcggctggagcaggttctgcctcgggatgagcgtggcgcctacgaggcctccctagtggcagcgagcactggtgttcgagccctgccctgccttattacaggataccccattctgaggaacaaaattgaatttaagcggccagggaaggctgctaacaaggacaactggaataaattccttatggccatcaagacctcccacagcccagtgtgccaggacgtgctgaaattcatcagtcagtggtgtggagggctccccagcaccagcttttcctttcagtagttggtagagctgaggaagagttagggcctctccctcattaaagttttataaataattgaga

SEQ ID NO: 14886 - DNA, 1982 bp, Homo sapiens
  source 1..1982: mol_type = unassigned DNA
acgtgtgaccttgcgacgcgtgttgcgctccggtcgcataagcgtcagtgcctgtcgctgcggctgcgtggcgggttgtccaggtaaccacgggagttgtcgctgtctaggagcatctgaaagacaggtgtgcgtcatgcacttgaagcacctgaggaccctgctgagccctcagcccaaactcctttgcctggcttcaaagacttcctgagctggcctgtttttcctgccttaccccgtctattctactatttataaggatggagctgcaaaggtgacctgcatggcttggtcccagaacaatgccaaatttgctgtctgcacagtggaccgagtggtcttgctgtatgatgaacatggagaacggagagataaattctccaccaaaccagctgacatgaagtatggcaggaagagctatatggtgaagggcatggctttttctcctgattccactaaaattgccataggacagactgacaacatcatctatgtctacaagattggagaagattggggtgacaagaaagtcatctgcaacaagttcatccagacgagtgctgtcacttgtctgcaatggccggcagaatacatcattgtctttggactggctgaagggaaggttcgtttagcaaacaccaaaactaataaatcatctaccatctatgggacagagtcttacgtggtgtccctgacaacaaattgctctgggaaaggaattctctctggtcatgcagatggtaccatcgttaggtatttctttgatgatgaaggctctggagagtcacaggggaagttggttaaccacccgtgtccaccctatgccttggcatgggcaaccaatagcatcgtggctgcaggctgtgatcggaaaattgtagcctatggaaaagaaggtcacatgctacaaacttttgattatagccgtgaccctcaggagcgggagttcaccacagctgtatcaagtcctgggggccagtctgttgtgctaggaagttatgacaggcttcgggtgttcaactggatccctcgaagaagcatctgggaagaggcaaagcccaaggagattaccaatttatacaccatcactgccttggcctggaagcgggatggctcacggctctgtgtgggcacactatgtggtggggtggaacagtttgactgctgcctccgaaggagtatttacaagaacaagtttgagttgacgtatgtgggacctagccaggtgattgtgaagaacctgtcatcaggaacccgagtggtgctcaagtcacactatggctatgaggtggaagaggtgaaaatcctaggaaaggaacgttacttggtggctcacacatcagaaacactgctgctgggggacctgaacactaatcggcttagtgagatagcctggcaaggatctggtggcaatgagaagtatttctttgaaaatgagaatgtatgcatgatcttcaatgccggagagctaaccctggtggaatatgggaataatgacaccctgggttctgtacgcactgaattcatgaacccccacctcatcagtgttcgtattaatgagaggtgtcagcgaggaacagaagataataagaaattggcttatcttattgatattaagactattgctatagtggatctgattggtggctacaacattggcaccgtcagccatgagagccgtgtggattggctggaacttaatgagactggacacaagctcctcttcagggaccggaaacttcgtgtgagaagagctactaaggccttaggcattggctggcccacagagggtgtgagacaagctgccaccagggactgagggaggcaggatggagcacattgtctttgctgtgtcatcaacatggcagaaggcacagaagaatcaacattctctgtagctgataccaaaactgatagcaaaacccatcctttattacctctttttttttttttttggagacagtgtctcactctgtcaccca

SEQ ID NO: 14887 - DNA, 820 bp, Homo sapiens
  source 1..820: mol_type = unassigned DNA
gtatccgtggcagcggccgtggcaggctggctgggtaccggctgtcgctgacccaggagaagctgcctgtctacatcagcctgggctgcagcgcgctgccgccgcggggccggcagctgaactatgtgctcttcagggcgggcaccgtgttgcattcatctttgtacccccagcatctagcagtgttggcatgtagtaggcactcaagaaatgtgtgttgaatgaacgatgcctgtgacaagcaagcggactttattctttcctgacccttgctcctatgacacacctcctcctgactgccactgtcactccttcagagcagaactcctctagggaacctggatgggaaacagccatggccaaggacatcctgggtgaagcagggctacactttgatgaactgaacaagctgagggtgttggacccagaggttacccagcagaccatagagctgaaggaagagtgcaaagactttgtggacaaaattggccagtttcagaaaatagttggtggtttaattgagcttgttgatcaacttgcaaaagaagcagaaaatgaaaagatgaaggtaagatcagcatgtcttccgcctacatcttggcctgggaccctagttcactaccctctcatccctcttccctcttgatttatttagaggggtagagggctgggtgggtgaatttttatttaagattttaataacttctggtccacttaacctactgaacttttgccaatctttatttcctttaatctttattttttttttttttttgagacagagtcttgctgtgtcacccaggctggagtgcactggtgc

SEQ ID NO: 14888 - DNA, 974 bp, Homo sapiens
  source 1..974: mol_type = unassigned DNA
ggtaaacaggctctgtatccgtggcagcggccgtggcaggctggctgggtaccggctgtcgctgacccaggagaagctgcctgtctacatcagcctgggctgcagcgcgctgccgccgcggggccggcagccatggccaaggacatcctgggtgaagcagggctacactttgatgaactgaacaagctgagggtgttggacccagaggttacccagcagaccatagagctgaaggaagagtgcaaagactttgtggacaaaattggccagtttcagaaaatagttggtggtttaattgagcttgttgatcaacttgcaaaagaagcagaaaatgaaaagatgaagagtcttgctgtgtcacccaggctggagtgcactggtgcaatctcggctcactgcaagctctgcctctcagattcaagcgattctcccacctcaccctcccgagtaggtgggactacaggccatcggtgctcggaacttgctcaaatctatagcaaagcagagagaagctcaacagcagcaacttcaagccctaatagcagaaaagaaaatgcagctagaaaggtatcgggttgaatatgaagctttgtgtaaagtagaagcagaacaaaatgaatttattgaccaatttatttttcagaaatgaactgaaaatttcgcttttatagtaggaaggcaaaacaaaaaaaagcctctcaaaaccaaaaaaacctctgtagcattccagcggcttgaccaatgacctatgtcacaagaggtggcgtgtaaggaatgcagccccctgaagacagcactacaagtctgggggagccagttttaacatcagtgcacagctgctgctggtggccctgcagtgtacgttctcacctcttatgcttagttggaactaagcagtttgtaaactttcatccttttttttgtaaattcacaaagctttggaaggagaagcaataaatttttgttttcaaatg

SEQ ID NO: 14889 - DNA, 832 bp, Homo sapiens
  source 1..832: mol_type = unassigned DNA
cgtggcagcggccgtggcaggctggctgggtaccggctgtcgctgacccaggagaagctgcctgtctacatcagcctgggctgcagcgcgctgccgccgcggggccggcagccatggccaaggacatcctgggtgaagcagggctacactttgatgaactgaacaagctgagggtgttggacccagaggttacccagcagaccatagagctgaaggaagagtgcaaagactttgtggacaaaattggccagtttcagaaaatagttggtggtttaattgagcttgttgatcaacttgcaaaagaagcagaaaatgaaaagatgaaggccatcggtgctcggaacttgctcaaatctatagcaaagcagagagaagctcaacagcagcaacttcaagccctaatagcagaaaagaaaatgcagctagaaaggtatcgggttgaatatgaagctttgtgtaaagtagaagcagaacaaaatgaatttattgaccaatttatttttcagaaatgaactgaaaatttcgcttttatagtaggaaggcaaaacaaaaaaaagcctctcaaaaccaaaaaaacctctgtagcattccagcggcttgaccaatgacctatgtcacaagaggtggcgtgtaaggaatgcagccccctgaagacagcactacaagtctgggggagccagttttaacatcagtgcacagctgctgctggtggccctgcagtgtacgttctcacctcttatgcttagttggaactaagcagtttgtaaactttcatccttttttttgtaaattcacaaagctttggaaggagaagcaataaatttttgttttc

SEQ ID NO: 14890 - DNA, 611 bp, Homo sapiens
  source 1..611: mol_type = unassigned DNA
gacatcctgggtgaagcagggctacactttgatgaactgaacaagctgagggtgttggacccagaggttacccagcagaccatagagctgaaggaagagtgcaaagactttgtggacaaaattggccagtttcagaaaatagttggtggtttaattgagcttgttgatcaacttgcaaaagaagcagaaaatgaaaagatgaaggtatcgggttgaatatgaagctttgtgtaaagtagaagcagaacaaaatgaatttattgaccaatttatttttcagaaatgaactgaaaatttcgcttttatagtaggaaggcaaaacaaaaaaaagcctctcaaaaccaaaaaaacctctgtagcattccagcggcttgaccaatgacctatgtcacaagaggtggcgtgtaaggaatgcagccccctgaagacagcactacaagtctgggggagccagttttaacatcagtgcacagctgctgctggtggccctgcagtgtacgttctcacctcttatgcttagttggaactaagcagtttgtaaactttcatccttttttttgtaaattcacaaagctttggaaggagaagcaataaatttttgttttcaaatg

SEQ ID NO: 14891 - DNA, 787 bp, Homo sapiens
  source 1..787: mol_type = unassigned DNA
ccgtggcaggctggctgggtaccggctgtcgctgacccaggagaagctgcctgtctacatcagcctgggctgcagcgcgctgccgccgcggggccggcagagcagaactcctctagggaacctggatgggaaacagccatggccaaggacatcctgggtgaagcagggctacactttgatgaactgaacaagctgagggtgttggacccagaggttacccagcagaccatagagctgaaggaagagtgcaaagactttgtggacaaaattggccagtttcagaaaatagttggtggtttaattgagcttgttgatcaacttgcaaaagaagcagaaaatgaaaagatgaaggccatcggtgctcggaacttgctcaaatctatagcaaagcagagagaagctcaacagcagcaacttcaagccctaatagcagaaaagaaaatgcagctagaaagaaatgaactgaaaatttcgcttttatagtaggaaggcaaaacaaaaaaaagcctctcaaaaccaaaaaaacctctgtagcattccagcggcttgaccaatgacctatgtcacaagaggtggcgtgtaaggaatgcagccccctgaagacagcactacaagtctgggggagccagttttaacatcagtgcacagctgctgctggtggccctgcagtgtacgttctcacctcttatgcttagttggaactaagcagtttgtaaactttcatccttttttttgtaaattcacaaagctttggaaggagaagcaataaatttttgttttcaaatgg

SEQ ID NO: 14892 - DNA, 1071 bp, Homo sapiens
  source 1..1071: mol_type = unassigned DNA
gtggcagcggccgtggcaggctggctgggtaccggctgtcgctgacccaggagaagctgcctgtctacatcagcctgggctgcagcgcgctgccgccgcggggccggcagctgaactatgtgctcttcagggcgggcaccgtgttgcattcatctttgtacccccagcatctagcagtgttggcatgtagtaggcactcaagaaatgtgtgttgaatgaacgatgcctgtgacaagcaagcggactttattctttcctgacccttgctcctatgacacacctcctcctgactgccactgtcactccttcagagcagaactcctctagggaacctggatgggaaacagccatggccaaggacatcctgggtgaagcagggctacactttgatgaactgaacaagctgagggtgttggacccagaggttacccagcagaccatagagctgaaggaagagtgcaaagactttgtggacaaaattggccagtttcagaaaatagttggtggtttaattgagcttgttgatcaacttgcaaaagaagcagaaaatgaaaagatgaaggccatcggtgctcggaacttgctcaaatctatagcaaagcagagagaagctcaacagcagcaacttcaagccctaatagcagaaaagaaaatgcagctagaaaggtatcgggttgaatatgaagctttgtgtaaagtagaagcagaacaaaatgaatttattgaccaatttatttttcagaaatgaactgaaaatttcgcttttatagtaggaaggcaaaacaaaaaaaagcctctcaaaaccaaaaaaacctctgtagcattccagcggcttgaccaatgacctatgtcacaagaggtggcgtgtaaggaatgcagccccctgaagacagcactacaagtctgggggagccagttttaacatcagtgcacagctgctgctggtggccctgcagtgtacgttctcacctcttatgcttagttggaactaagcagtttgtaaactttcatccttttttttgtaaattcacaaagctttggaaggagaagcaataaatttttgttttcaaa

SEQ ID NO: 14893 - DNA, 852 bp, Homo sapiens
  source 1..852: mol_type = unassigned DNA
ccgtggcaggctggctgggtaccggctgtcgctgacccaggagaagctgcctgtctacatcagcctgggctgcagcgcgctgccgccgcggggccggcagagcagaactcctctagggaacctggatgggaaacagccatggccaaggacatcctgggtgaagcagggctacactttgatgaactgaacaagctgagggtgttggacccagaggttacccagcagaccatagagctgaaggaagagtgcaaagactttgtggacaaaattggccagtttcagaaaatagttggtggtttaattgagcttgttgatcaacttgcaaaagaagcagaaaatgaaaagatgaaggccatcggtgctcggaacttgctcaaatctatagcaaagcagagagaagctcaacagcagcaacttcaagccctaatagcagaaaagaaaatgcagctagaaaggtatcgggttgaatatgaagctttgtgtaaagtagaagcagaacaaaatgaatttattgaccaatttatttttcagaaatgaactgaaaatttcgcttttatagtaggaaggcaaaacaaaaaaaagcctctcaaaaccaaaaaaacctctgtagcattccagcggcttgaccaatgacctatgtcacaagaggtggcgtgtaaggaatgcagccccctgaagacagcactacaagtctgggggagccagttttaacatcagtgcacagctgctgctggtggccctgcagtgtacgttctcacctcttatgcttagttggaactaagcagtttgtaaactttcatccttttttttgtaaattcacaaagctttggaaggagaagcaataaatttttg

SEQ ID NO: 14894 - DNA, 816 bp, Homo sapiens
  source 1..816: mol_type = unassigned DNA
cggagatggaggatttgctcgacttggacgaggagcttcgctacagcttggctacctccagggccaagatgggtcgccgagctcaacaggagtcagcgcaggccgagaatcacctcaatggcaagaattcctctttgactctgactggagagacttcctctgctaaattacctcgctgccgacagggaggctgggcaggtgattccgtgaaggcttcgaacggtacccaaacaggcaaacaacagctggatctgaacgcatgctatcacaaaacgcatcacagagatttggggctggcttcattggaagaggcagatattcctatcattccggatctggaggaagtacaggaagaagactttgttttgcaggtggcagcccctcccagcatccagataaagcgggtgatgacctaccgtgacctggacaatgacctcatgaagtactcagccattcagacactggatggggagatcgacctgaaactcctcaccaaagtgctcgcgccggagcacgaagtccgggaggatgatgtcggctgggactgggaccatctgttcactgaggtgtcctcagaggtcctcactgagtgggacccactgcagacggagaaggaggaccctgcggggcaggccaggcacacctgagcccgtcacccatgctctagacatgaagaaatgcaatgagcttaaagctaaagaagcttgtaagcagctccgaatttttacctggaatattttgtaataaaaatatttatattcagtcaaccacattggataattcaattgcaataaattgcttattctgtgccatctc

SEQ ID NO: 14895 - DNA, 833 bp, Homo sapiens
  source 1..833: mol_type = unassigned DNA
ggtttccaggaagtgacgtcaggcggccgcggagatggaggatttgctcgacttggacgaggagcttcgctacagcttggctacctccagggccaagatgggtcgccgagctcaacaggagtcagcgcaggccgagaatcacctcaatggcaagaattcctctttgactctgactggagagacttcctctgctaaattacctcgctgccgacagggaggctgggcaggtgattccgtgaaggcttcgaagtttaggaggaaggcttctgaagaaatagaagatttccgcctcagaccacagagcctgaatggatcagattatggaggagatattcctatcattccggatctggaggaagtacaggaagaagactttgttttgcaggtggcagcccctcccagcatccagataaagcgggtgatgacctaccgtgacctggacaatgacctcatgaagtactcagccattcagacactggatggggagatcgacctgaaactcctcaccaaagtgctcgcgccggagcacgaagtccgggaggatgatgtcggctgggactgggaccatctgttcactgaggtgtcctcagaggtcctcactgagtgggacccactgcagacggagaaggaggaccctgcggggcaggccaggcacacctgagcccgtcacccatgctctagacatgaagaaatgcaatgagcttaaagctaaagaagcttgtaagcagctccgaatttttacctggaatattttgtaataaaaatatttatattcagtcaaccacattggataattcaattgcaataaattgcttattctgtgccatctcctc

SEQ ID NO: 14896 - DNA, 848 bp, Homo sapiens
  source 1..848: mol_type = unassigned DNA
gagatggaggatttgctcgacttggacgaggagcttcgctacagcttggctacctccagggccaagatgggtcgccgagctcaacaggagtcagcgcaggccgagaatcacctcaatggcaagaattcctctttgactctgactggagagacttcctctgctaaattacctcgctgccgacagggaggctgggcaggtgattccgtgaaggcttcgaagtttaggaggaaggcttctgaagaaatagaagagtacgtttccagtattcttattcttatggtatcctatgttgatcttggtcaacagtgcagtcttggtggtcatgatctgttccacctatgttgaacactgtgttagaagtctggggctagaattattgatgcctgctgaatccaaggtttggttaatcccgcttcctcaactgaaggtctggaccctggcattgatgcccatgtcctatctcccactgtgtggttttagaattatatgtccaggtatcagggtactggcccatgccttctgcattattgatatagatgggcagaagcaataccagcttctaagccttgccttctcataagacttatatcagaaaagaaagaagttttctagataaaggtgctgtgaaggtagggccacccagtttcctactcccaggggcggaagctgcattcatgtcatagcctctgtgatgctgtcctctggaatagtgcatcgcacagcctgtgcaaccacacacggcacacccagtggcctaattaggtttgactaagttgacagagaaaaacaggttcagggacattttcatctaggagaaagaatggatacaataaacatttgggatgttc

SEQ ID NO: 14897 - DNA, 3203 bp, Homo sapiens
  source 1..3203: mol_type = unassigned DNA
atgaggggcggggctgcttcccgaccaccatttccacagaggcagggcaagaagagggccacaggtgacgtcattcaggaaagccgccctgattggagggaaggaggcggagtctagtttccctggtgacggattgtccggtggtcgcctggtaaccggtcgtggctgtactggcggcggcagggctggcggcttaggccgcagaggtctgtgggcctgagcccacgctggactctgtccgttctgcgatgactgctgctctggccgtcgtcacgacgtcgggtttggaagatggggtgcctaggtcccgtggcgaagggaccggggaagtggtcttggagcgggggcccggcgcggcctaccacatgttcgtggtgatggaggacttggtggagaagctgaagctgctccgctacgaggaggagttcctccggaagagcaacctgaaggccccgtccagacactattttgcactgcctaccaaccctggcgaacagttctacatgttttgtactcttgctgcttggttgattaataaagcgggacgtccctttgagcagcctcaagaatatgatgaccctaatgcaacaatatctaacatactatccgagcttcggtcatttggaagaactgcagattttcctccttcaaaattaaagtcaggttatggagaacatgtatgctatgttcttgattgcttcgctgaagaagcattgaaatatattggtttcacctggaaaaggccaatatacccagtagaagaattagaagaagaaagcgttgcagaagatgatgcagaattaacattaaataaagtggatgaagaatttgtggaagaagagacagataatgaagaaaactttattgatctcaacgttttaaaggcccagacatatcacttggatatgaacgagactgccaaacaagaagatattttggaatccacaacagatgctgcagaatggagcctagaagtggaacgtgtactaccgcaactgaaagtcacgattaggactgacaataaggattggagaatccatgttgaccaaatgcaccagcacagaagtggaattgaatctgctctaaaggagaccaagggatttttggacaaactccataatgaaattactaggactttggaaaagatcagcagccgagaaaagtacatcaacaatcagcttgagaatttggttcaagaatatcgtgcagctcaagcccagctgagtgaggcaaaggagcgataccagcagggaaatggaggagtgacggaaagaaccagactcctctctgaggttatggaagaattagaaaaggtaaaacaagaaatggaagaaaagggcagcagcatgactgatggtgctcctttggtgaagattaaacagagcttaacaaaactgaagcaagaaactgtagagatggacattagaattggcattgtggaacacacactactccaatcaaagctgaaggagaagtccaacatgactaggaacatgcatgccacagttattccagaaccagcaacaggcttttattaaaacatactggttttcatgtttctgattagttgggttttttatatcaaactatatttcatgttgcatagatttcaaaacataattttatgttcaatgggtatttttttacatatacatactcacatattatatcatggtgattatgatggttaaagcctttacactgaatgtaatgtttaataaagaaattacaaattctcactttctaagaagctttcactaatcattacctatgttaaagctcccacctggtggctcatttttcatagcattccttgtgtaagccaaggtatatgacctgcgttttctgcagatgctgctgctgtcacaacatgaactgctgacacagtcctttaccttgctccacctctgcagtgatcataagtgctttgtgcccagaggccactgaagatggtaggcaggattctttccaagaacccaaactgcctttgcctcagctttatggttacctaaaattgccactttttttaggttaaaaaaaacttcagtatcctcattaacatttgaagttggtttcttatgaatatttcgtggctaaaatgattttatagggaatctatcttctaggatctaagccactaaataaaaggataaatgaatgatgataagtcagtcactcatgtttgactctgttcttagaatgaagagaaggtgcatatgcatgtctcaatttctacctttttctgtggtatcggctatactagggaaccattttgtagaagaaggaacgatgacaggtcgcatgaagatcagcctctagtactgatgatctttacttatgcatcttcctgagcaactttctaggctaggatttctaaattggtgaaaaaagcagcattagagtgccagaattagcactggggaaaactggccaggggaacacaaagcaggagacagcctgcgttaattttttttttttaataattttcaaaagcagtggtagaaaatttgataagaatgctttatgtttaggacaacaaaaataattttaaaaagttattttttaccctaatacttttctccactgaatattattatttttttcttagctttttctttctagatgtattccccaacatgctcacatacacagatctttccctttccttactagacctctctttagtttaagataagtttagacaggagaaagtgtatgtaaactacctgaaaggatgacaatcaatacaatgacaaatatgccagtttatttaatttgtttaaaaaaaaaaaggcagaaaacccaccatgggaaaataagcattttttaaaatctgaagttgctcttttcctgtgtggtctttgggaggagtctaatacaaaaactgaaaacctttggtcctgggaatttattttcatggctgttgtcatggctgagtagttttttgatgaattcaatcaatgcagagaacgcttttagataaatcagaactctccttaaaatgcatttcaatcagaagcaaagtacacccattatttatgcagacatgtaaaaaatctaaaaattcttgcaatgagtagtataagccacctatttttacttccttctctgaaatattccagttaactcagcttgggttctgtgctcctcctctcttcctatagaacactgtgcataccttgaataaagagcttattatacta

SEQ ID NO: 14898 - DNA, 4306 bp, Homo sapiens
  source 1..4306: mol_type = unassigned DNA
gcgcatgcgcgaactcctggcgggacctacgcggtagaagtttctactaagtgaaaaggaagagcgagggattcttttctctgtggtctacagcagcagcactattattaaaaatatttggaaagacaacctggcaagttttgaaaaagatttttttaaaaacggtagggttccgctcacagtgggaggcggggctcagtggtccagaaacgcctcttcagaagagggcgggctcgccgagaggcggggtctcgggcccactcggatgacgtgccgcgtagaagtatcgcgggaagaggaagggagcgtaactcttagaagtcactatggtgacggggaggtaccaggtatttgagagcaatcgccaccgctttcctggaacttgagtaaatacaatcaagtggcatcttaaatttttgctggaagtggagtcatgagactaaagatatctcttttaaaagaaccaaagcatcaagaattagtaagctgtgtgggctggactactgctgaagagctgtattcatgtagtgatgatcaccagatagtgaagtggaacttgttaaccagtgaaacaactcaaatagtaaagcttcctgatgatatttaccctattgattttcactggtttccaaaaagtttgggtgtaaagaaacaaacccaggcagaaagctttgtcctcacaagttctgatggtaaatttcatctgatttccaagttaggaagagtggaaaaaagtgtagaagctcactgtggagcagtacttgcaggaagatggaattatgaaggaacagcattagttacagttggagaagatggacaaataaaaatttggtcaaagactgggatgcttagatcaactttagctcagcaaggaacaccagtgtattcagtagcgtggggccctgattcagaaaaggttctttatacagcaggcaagcagctaatcattaaacctcttcaaccaaatgctaaagttttgcagtggaaagctcatgatggcattattttaaaagtagattggaactcggtcaatgatcttattttatctgctggtgaagactgtaaatataaggtatgggatagttacggccgcccactgtacaattcacaacctcatgagcatcccattacttcagttgcctgggctccagatggagaattatttgctgttggatcgtttcatactttacgcttgtgtgataaaactgggtggtcatatgcattagaaaaacccaacactggcagcatatttaatattgcatggtctatcgatggcactcagattgctggagcctgtggaaatggacatgtcgtttttgcacatgtggtggaacaacattgggagtggaaaaattttcaagtaacattaacgaaaagaagagccatgcaggttcgtaatgttcttaatgatgcagtggatttactggaattccgtgatagagtcattaaagcatctttgaactatgcacacttagttgtttcaacgtctcttcaatgttacgtgttctccacgaagaactggaacacaccaattatatttgatctcaaagaaggaactgttagtttgattctgcaggcagaaagacattttcttcttgtagatggtagtagtatctatttatattcatatgaagggcgctttatttcatctccaaaatttcctggaatgagaacagatattctgaatgcacagactgtgtctttgagtaatgataccatagcaataagagacaaagctgatgaaaaaataatcttcctctttgaggcatcaaccggaaagccgttaggtgatggaaagtttctttctcataagaatgaaatcttggaaattgctctggatcaaaaaggacttaccaatgatagaaaaattgctttcattgataaaaatagagatctctgtatcacttctgtgaaacgatttgggaaggaagaacaaattatcaagcttggaacaatggtgcatactttggcatggaacgatacatgcaatatcctttgtggacttcaagatactcgatttatagtgtggtattaccccaatacagtttatgtggacagagacattttgcctaaaacattatatgaaagggatgcaagtgaatttagtaaaaatccccatattgtgagttttgttggaaatcaagtaactattagaagagctgatggctccctggttcacatcagcataacaccatatcctgctattctccatgaatatgtaagcagttcaaaatgggaagatgctgtgagactttgtcgctttgttaaggagcaaaccatgtgggcttgtctagctgctatggcagttgctaatcgagatatgactactgcagaaatagcctatgcagcaattggtgaaattgataaggttcagtacatcaattctataaaaaatcttccatctaaagaatcaaaaatggcccacatactactgtttagtgggaacatacaggaggctgaaatagtacttcttcaggctggccttgtttatcaagcaatccagatcaatattaatctctacaactgggaaagggcactggaattggctgtaaaatacaaaacacatgttgatacagttcttgcttaccgtcaaaagtttttggagacatttggtaaacaggaaactaataaacgatacttgcattatgcagaaggtctccaaatagattgggagaaaatcaaagccaaaattgagatggaaattacaaaagaaagagagcaatcatcaagcagccaatccagcaagagtataggtttaaagccctaaatgccatgcgtatctttaagaaattttatcttttgaaacacgttctgattaaccaagggtaagcatgttttggttgctaaagaaaaaagcataatctttaaccgagtataagtacttgctgtgtatttagtgtaaaagtacatgcagaaagatgaaacacaaagtaattgatgtatttctatcttttatattttttagtccaataattagcaaaatattactatgtacttaagagatacctgtgtagtgtcgattatatgtcagttttttgcccattacttcatccctaaatcttcagcatgaacaaatattaatgtcgataataaaacattggactctttgaaatgtatgttaccattaatttctatttgacctctaaattgtaaaatgcctccaaaagtttatttatagaacaaaaatacatgaggatggatttgtacaaatgtataaaatgccactatttatacaccaagttcatagcagcattactggaatagcaaaagatggaaacagctcaagtgtctatcatgaatggataaacaaatgtgctataatacatacaatggaatattatttagctttaaaaaggaatgaaattctgataaatactacctcaggataaaccttgaaaacactatgctaagtgaaataagccagacacaaaaggccaaatatgatgccacttttatgaggtaccagcataggcaagttcacagaaacagaaaggagaatagtggttgccagggactgcagggaggaggaaatggggggtggggttattgtttaacgagtacatagtttctgtttgggatgaacaaattctggaaatggatagcgatgatggttgctcaacattttgaatgttaatgccactaaattgtacccataaaaatggttaaaatggtaaattttgttatgtatattttatcataatttaaaaaatatatctagaatgggcaagaaggattctcctcattcctctcttgacttgagaatgatcagtcaataggccctgaagtctgaatttgtgaaaatttccttgggtgacaaacttgtttgattactctatttagtgtatcccaaagttattaccacataatcttttaaacaataaaacaaataccccttagaaagtcttctgcaaacccatttctgaaaatggtacattatagggtgggtatagatgcatagatatgggattatgtatgatatatatatatatacacacacacacaaagggatagagagattacctctcttaacccccattttaattactatgtctaggttttttaaataaaaatcttttctttttaacatgtttcttttcttttccggaatattggaatattctgttcttgatccagatgaaatctgattgagcagtgtacttacaagttgtactgtgtatgtgtttcctatattgttatatttcaataagaagcttaaaatgtttaaaaataaatggttaaaaggttttatgttatgtatattttaccacaataaatgcaaaaaataaaaagtctgtgttctaaacaa

SEQ ID NO: 14899 - DNA, 542 bp, Homo sapiens
  source 1..542: mol_type = unassigned DNA
attgtcgctcctgcgcatgcgcgaactcctggcgggacctacgcggtagaagtttctactaagtgaaaaggaagagcgagggattcttttctctgtggtctacagcagcagcactattattaaaaatatttggaaagacaacctgctcatcagccatcattaatgttagtgtattttatgtgtggcccaagacaattcttcctccaatgtggcctagggaagccgaaagattggacacccctgataaagtaaacggccatactgtttgctgtggctaagcctttgagtccgtgcctggaaatgtaaatacaatcaagtggcatcttaaatttttgctggaagtggagtcatgagactaaagatatctcttttaaaagaaccaaagcatcaagaattagtaagctgtgtgggctggactactgctgaagagctgtattcatgtagtgatgatcaccagatagtgaagtggaacttgttaaccagtgaaacaactcaaatagtaaagcttcctgatgatatttaccctattgattttcactggt

SEQ ID NO: 14900 - DNA, 4044 bp, Homo sapiens
  source 1..4044: mol_type = unassigned DNA
tgcaggtctgtgaaagaataggtaaataaattgaaagtaagggctgagaaatttttgtagcaatttgacattgttataatgtccaatttttctaatattttatttttattgtatcttacgaaatatccatatgcaatggattcgaaataaagaaaaatctggtccttcatcagaactaggaaagcactgatttaaacatttggtcagacattttaaattgaattagtaagctgtgtgggctggactactgctgaagagctgtattcatgtagtgatgatcaccagatagtgaagtggaacttgttaaccagtgaaacaactcaaatagtaaagcttcctgatgatatttaccctattgattttcactggtttccaaaaagtttgggtgtaaagaaacaaacccaggcagaaagctttgtcctcacaagttctgatggtaaatttcatctgatttccaagttaggaagagtggaaaaaagtgtagaagctcactgtggagcagtacttgcaggaagatggaattatgaaggaacagcattagttacagttggagaagatggacaaataaaaatttggtcaaagactgggatgcttagatcaactttagctcagcaaggaacaccagtgtattcagtagcgtggggccctgattcagaaaaggttctttatacagcaggcaagcagctaatcattaaacctcttcaaccaaatgctaaagttttgcagtggaaagctcatgatggcattattttaaaagtagattggaactcggtcaatgatcttattttatctgctggtgaagactgtaaatataaggtatgggatagttacggccgcccactgtacaattcacaacctcatgagcatcccattacttcagttgcctgggctccagatggagaattatttgctgttggatcgtttcatactttacgcttgtgtgataaaactgggtggtcatatgcattagaaaaacccaacactggcagcatatttaatattgcatggtctatcgatggcactcagattgctggagcctgtggaaatggacatgtcgtttttgcacatgtggtggaacaacattgggagtggaaaaattttcaagtaacattaacgaaaagaagagccatgcaggttcgtaatgttcttaatgatgcagtggatttactggaattccgtgatagagtcattaaagcatctttgaactatgcacacttagttgtttcaacgtctcttcaatgttacgtgttctccacgaagaactggaacacaccaattatatttgatctcaaagaaggaactgttagtttgattctgcaggcagaaagacattttcttcttgtagatggtagtagtatctatttatattcatatgaagggcgctttatttcatctccaaaatttcctggaatgagaacagatattctgaatgcacagactgtgtctttgagtaatgataccatagcaataagagacaaagctgatgaaaaaataatcttcctctttgaggcatcaaccggaaagccgttaggtgatggaaagtttctttctcataagaatgaaatcttggaaattgctctggatcaaaaaggacttaccaatgatagaaaaattgctttcattgataaaaatagagatctctgtatcacttctgtgaaacgatttgggaaggaagaacaaattatcaagcttggaacaatggtgcatactttggcatggaacgatacatgcaatatcctttgtggacttcaagatactcgatttatagtgtggtattaccccaatacagtttatgtggacagagacattttgcctaaaacattatatgaaagggatgcaagtgaatttagtaaaaatccccatattgtgagttttgttggaaatcaagtaactattagaagagctgatggctccctggttcacatcagcataacaccatatcctgctattctccatgaatatgtaagcagttcaaaatgggaagatgctgtgagactttgtcgctttgttaaggagcaaaccatgtgggcttgtctagctgctatggcagttgctaatcgagatatgactactgcagaaatagcctatgcagcaattggtgaaattgataaggttcagtacatcaattctataaaaaatcttccatctaaagaatcaaaaatggcccacatactactgtttagtgggaacatacaggaggctgaaatagtacttcttcaggctggccttgtttatcaagcaatccagatcaatattaatctctacaactgggaaagggcactggaattggctgtaaaatacaaaacacatgttgatacagttcttgcttaccgtcaaaagtttttggagacatttggtaaacaggaaactaataaacgatacttgcattatgcagaaggtctccaaatagattgggagaaaatcaaagccaaaattgagatggaaattacaaaagaaagagagcaatcatcaagcagccaatccagcaagagtataggtttaaagccctaaatgccatgcgtatctttaagaaattttatcttttgaaacacgttctgattaaccaagggtaagcatgttttggttgctaaagaaaaaagcataatctttaaccgagtataagtacttgctgtgtatttagtgtaaaagtacatgcagaaagatgaaacacaaagtaattgatgtatttctatcttttatattttttagtccaataattagcaaaatattactatgtacttaagagatacctgtgtagtgtcgattatatgtcagttttttgcccattacttcatccctaaatcttcagcatgaacaaatattaatgtcgataataaaacattggactctttgaaatgtatgttaccattaatttctatttgacctctaaattgtaaaatgcctccaaaagtttatttatagaacaaaaatacatgaggatggatttgtacaaatgtataaaatgccactatttatacaccaagttcatagcagcattactggaatagcaaaagatggaaacagctcaagtgtctatcatgaatggataaacaaatgtgctataatacatacaatggaatattatttagctttaaaaaggaatgaaattctgataaatactacctcaggataaaccttgaaaacactatgctaagtgaaataagccagacacaaaaggccaaatatgatgccacttttatgaggtaccagcataggcaagttcacagaaacagaaaggagaatagtggttgccagggactgcagggaggaggaaatggggggtggggttattgtttaacgagtacatagtttctgtttgggatgaacaaattctggaaatggatagcgatgatggttgctcaacattttgaatgttaatgccactaaattgtacccataaaaatggttaaaatggtaaattttgttatgtatattttatcataatttaaaaaatatatctagaatgggcaagaaggattctcctcattcctctcttgacttgagaatgatcagtcaataggccctgaagtctgaatttgtgaaaatttccttgggtgacaaacttgtttgattactctatttagtgtatcccaaagttattaccacataatcttttaaacaataaaacaaataccccttagaaagtcttctgcaaacccatttctgaaaatggtacattatagggtgggtatagatgcatagatatgggattatgtatgatatatatatatatacacacacacacaaagggatagagagattacctctcttaacccccattttaattactatgtctaggttttttaaataaaaatcttttctttttaacatgtttcttttcttttccggaatattggaatattctgttcttgatccagatgaaatctgattgagcagtgtacttacaagttgtactgtgtatgtgtttcctatattgttatatttcaataagaagcttaaaatgtttaaaaataaatggttaaaaggttttatgttatgtatattttaccacaataaatgcaaaaaataaaaagtctgtgttct

SEQ ID NO: 14901 - DNA, 610 bp, Homo sapiens
  source 1..610: mol_type = unassigned DNA
atcgcgggaagaggaagggagcgtaactcttagaagtcactatggtgacggggaggtaccaggtatttgagagcaatcgccaccgctttcctggaacttgaggctggagtgcagtggtgtgatctcggtttactgcaacctccacctcctgagttccagcgattctcctgcctcagcctcctgagtagctgggattacagtaaatacaatcaagtggcatcttaaatttttgctggaagtggagtcatgagactaaagatatctcttttaaaagaaccaaagcatcaagaattagtaagctgtgtgggctggactactgctgaagagctgtattcatgtagtgatgatcaccagatagtgaagtggaacttgttaaccagtgaaacaactcaaatagtaaagcttcctgatgatatttaccctattgattttcactggtttccaaaaagtttgggtgtaaagaaacaaacccaggcagaaagctttgtcctcacaagttctgatggtaaatttcatctgatttccaagttaggaagagtggaaaaaagtgtagaagctcactgtggagcagtacttgcaggaagatggaattatgaaggaacagcattag

SEQ ID NO: 14902 - DNA, 3073 bp, Homo sapiens
  source 1..3073: mol_type = unassigned DNA
actcggatgacgtgccgcgtagaagtatcgcgggaagaggaagggagcgtaactcttagaagtcactatggtgacggggaggtaccaggtatttgagagcaatcgccaccgctttcctggaacttgagtaaatacaatcaagtggcatcttaaatttttgctggaagtggagtcatgagactaaagatatctcttttaaaagaaccaaagcatatccttttaatgcttataaatcttattggattttcttaattatagtattgttaaaagtttctctattttatatcctagttgaagaatagattttttttttcattcctttagtggctgtttacctaaattgttttaaagtatttaagatcatgtgttaaaaatctggtccttcatcagaactaggaaagcactgatttaaacatttggtcagacattttaaattgaattagtaagctgtgtgggctggactactgctgaagagctgtattcatgtagtgatgatcaccagatagtgaagtggaacttgttaaccagtgaaacaactcaaatagtaaagcttcctgatgatatttaccctattgattttcactggtttccaaaaagtttgggtgtaaagaaacaaacccaggcagaaagctttgtcctcacaagttctgatggtaaatttcatctgatttccaagttaggaagagtggaaaaaagtgtagaagctcactgtggagcagtacttgcaggaagatggaattatgaaggaacagcattagttacagttggagaagatggacaaataaaaatttggtcaaagactgggatgcttagatcaactttagctcagcaaggaacaccagtgtattcagtagcgtggggccctgattcagaaaaggttctttatacagcaggcaagcagctaatcattaaacctcttcaaccaaatgctaaagttttgcagtggaaagctcatgatggcattattttaaaagtagattggaactcggtcaatgatcttattttatctgctggtgaagactgtaaatataaggtatgggatagttacggccgcccactgtacaattcacaacctcatgagcatcccattacttcagttgcctgggctccagatggagaattatttgctgttggatcgtttcatactttacgcttgtgtgataaaactgggtggtcatatgcattagaaaaacccaacactggcagcatatttaatattgcatggtctatcgatggcactcagattgctggagcctgtggaaatggacatgtcgtttttgcacatgtggtggaacaacattgggagtggaaaaattttcaagtaacattaacgaaaagaagagccatgcaggttcgtaatgttcttaatgatgcagtggatttactggaattccgtgatagagtcattaaagcatctttgaactatgcacacttagttgtttcaacgtctcttcaatgttacgtgttctccacgaagaactggaacacaccaattatatttgatctcaaagaaggaactgttagtttgattctgcaggcagaaagacattttcttcttgtagatggtagtagtatctatttatattcatatgaagggcgctttatttcatctccaaaatttcctggaatgagaacagatattctgaatgcacagactgtgtctttgagtaatgataccatagcaataagagacaaagctgatgaaaaaataatcttcctctttgaggcatcaaccggaaagccgttaggtgatggaaagtttctttctcataagaatgaaatcttggaaattgctctggatcaaaaaggacttaccaatgatagaaaaattgctttcattgataaaaatagagatctctgtatcacttctgtgaaacgatttgggaaggaagaacaaattatcaagcttggaacaatggtgcatactttggcatggaacgatacatgcaatatcctttgtggacttcaagatactcgatttatagtgtggtattaccccaatacagtttatgtggacagagacattttgcctaaaacattatatgaaagggatgcaagtgaatttagtaaaaatccccatattgtgagttttgttggaaatcaagtaactattagaagagctgatggctccctggttcacatcagcataacaccatatcctgctattctccatgaatatgtaagcagttcaaaatgggaagatgctgtgagactttgtcgctttgttaaggagcaaaccatgtgggcttgtctagctgctatggcagttgctaatcgagatatgactactgcagaaatagcctatgcagcaattggtgaaattgataaggttcagtacatcaattctataaaaaatcttccatctaaagaatcaaaaatggcccacatactactgtttagtgggaacatacaggaggctgaaatagtacttcttcaggctggccttgtttatcaagcaatccagatcaatattaatctctacaactgggaaagggcactggaattggctgtaaaatacaaaacacatgttgatacagttcttgcttaccgtcaaaagtttttggagacatttggtaaacaggaaactaataaacgatacttgcattatgcagaaggtctccaaatagattgggagaaaatcaaagccaaaattgagatggaaattacaaaagaaagagagcaatcatcaagcagccaatccagcaagagtataggtttaaagccctaaatgccatgcgtatctttaagaaattttatcttttgaaacacgttctgattaaccaagggtaagcatgttttggttgctaaagaaaaaagcataatctttaaccgagtataagtacttgctgtgtatttagtgtaaaagtacatgcagaaagatgaaacacaaagtaattgatgtatttctatcttttatattttttagtccaataattagcaaaatattactatgtacttaagagatacctgtgtagtgtcgattatatgtcagttttttgcccattacttcatccctaaatcttcagcatgaacaaatattaatgtcgataataaaacattggactctttgaaa

SEQ ID NO: 14903 - DNA, 719 bp, Homo sapiens
  source 1..719: mol_type = unassigned DNA
tgcgcatgcgcgaactcctggcgggacctacgcggtagaagtttctactaagtgaaaaggaagagcgagggattcttttctctgtggtctacagcagcagcactattattaaaaatatttggaaagacaacctgtaaatacaatcaagtggcatcttaaatttttgctggaagtggagtcatgagactaaagatatctcttttaaaagaaccaaagcatcaagaattagtaagctgtgtgggctggactactgctgaagagctgtattcatgtagtgatgatcaccagatagtgaagtggaacttgttaaccagtgaaacaactcaaatagtaaagcttcctgatgatatttaccctattgattttcactggtttccaaaaagtttgggtgtaaagaaacaaacccaggcagaaagctttgtcctcacaagttctgatggtaaatttcatctgatttccaagttaggaagagtggaaaaaagtgtagaagctcactgtggagcagtacttgcaggaagatggaattatgaaggaacagcattagttacagttggagaagatggacaaataaaaatttggtcaaagactgggatgcttagatcaactttagctcagcaaggaacaccagtgtattcagtagcgtggggccctgattcagaaaaggttctttatacagcaggcaagcagctaatcattaaacctcttcaaccaaatgctaa

SEQ ID NO: 14904 - DNA, 1297 bp, Homo sapiens
  source 1..1297: mol_type = unassigned DNA
catggcggccttagcaagctatagctgcgagatttgaattactccactcgtagctattgcattcctgacgatggcctctgtggcttcgtgcgattcgcgtccgagctcagacgagctccctggagacccctcttcacaagaagaagatgaggactatgattttgaagatcgggtcagcgactcgggttcatattcctcagcgagtagcgattatgatgatcttgagcctgaatggctggacagtgtgcagaaaaatggagagctgttttatttggaattgagtgaggatgaagaagaaagcctccttcctgagacaccaactgtgaaccatgtcaggttcagtgaaaatgagattatcattgaagatgactacaaagaaagaaaaaagtatgaacccaaactcaagcagtttaccaaaattttaagaaggaaaagacttttacccaagcgctgcaataaaaaaaatagcaatgacaatggaccagtatccattctaaagcatcagtccaatcagaagacaggagtcattgtccaacagcgatacaaagatgtgaatgtttatgtaaaccccaaaaagctaactgttatcaaagccaaagagcagctcaagcttctggaagtgctggttggaattattcatcagaccaagtggagctggagaagaaccggaaagcagggtgatggagagaggcttgtggttcatggcctgctgccagggggatctgctatgaagagcggtcaggtactcattggtgatgtccttgttgctgtgaatgatgtcgatgttactactgaaaacatcgagagagttctgtcttgcattcctggacctatgcaggtgaaactgacatttgaaaatgcatatgatgtgaaaagggagacgtcccatccaagacagaaaaagacacagtccaacacaagtgatttagtcaagcttctctggggagaagaggttgaaggtatccagcagagtggcctaaacactcctcatatcattatgtatctcacactacagctcgactcagaaacctcaaaggaagagcaggaaattctttatcattatccaatgtctgaagcatctcagaaacttaaaagtgtgagagggatttttctcacactctgtgacatgctggaaaacgtaactgggacacaagttactagttcatccctccttttaaatggaaaacaaattcatgtggcttattggaaagaatctgacaagttgttgctaattggcctgcctgctgaagaaattgagttaccaagctcagcccacactcatggggagaggaattaa

SEQ ID NO: 14905 - DNA, 3141 bp, Homo sapiens
  source 1..3141: mol_type = unassigned DNA
acatggcctctgccccttcccaagcagaggcaacatggcggccttagcaagctatagctgcgagatttgaattactccactcgtagctattgcattcctgacgatggcctctgtggcttcgtgcgattcgcgtccgagctcagacgagctccctggagacccctcttcacaagaagaagatgaggactatgattttgaagatcgggtcagcgactcgggttcatattcctcagcgagtagcgattatgatgatcttgagcctgaatggctggacagtgtgcagaaaaatggagagctgttttatttggaattgagtgaggatgaagaagaaagcctccttcctgagacaccaactgtgaaccatgtcaggttcagtgaaaatgagattatcattgaagatgactacaaagaaagaaaaaagtatgaacccaaactcaagcagtttaccaaaattttaagaaggaaaagacttttacccaagcgctgcaataaaaaaaatagcaatgacaatggaccagtatccattctaaagcatcagtccaatcagaagacaggagtcattgtccaacagcgatacaaagatgtgaatgtttatgtaaaccccaaaaagctaactgttatcaaagccaaagagcagctcaagcttctggaagtgctggttggaattattcatcagaccaagtggagctggagaagaaccggaaagcagggtgatggagagaggcttgtggttcatggcctgctgccagggggatctgctatgaagagcggtcaggtactcattggtgatgtccttgttgctgtgaatgatgtcgatgttactactgaaaacatcgagagagttctgtcttgcattcctggacctatgcaggtgaaactgacatttgaaaatgcatatgatgtgaaaagggagacgtcccatccaagacagaaaaagacacagtccaacacaagtgatttagtcaagcttctctggggagaagaggttgaaggtatccagcagagtggcctaaacactcctcatatcattatgtatctcacactacagctcgactcagaaacctcaaaggaagagcaggaaattctttatcattatccaatgtctgaagcatctcagaaacttaaaagtgtgagagggatttttctcacactctgtgacatgctggaaaacgtaactgggacacaagttactagttcatccctccttttaaatggaaaacaaattcatgtggcttattggaaagaatctgacaagttgttgctaattggcctgcctgctgaagaagttcctcttcctcgtctaaggaacatgatagaaaatgtcatccaaaccttaaaatttatgtatggttctttagatagtgccttttgccagattgagaatgttcctcgtttggatcatttttttaacttgttctttcaaagagcacttcagcctgcgaaactgcattccagcgccagtcccagtgctcagcagtacgatgcttccagtgcagtacttttagacaacctccctggagtccggtggctcacacttccactggaaatcaagatggaattagacatggcattaagtgacttggaggctgcagattttgcagaactgtccgaggattactatgacatgaggcggctgtatacaattttggggtcttctctattttacaagggttatttgatatgcagtcatttgcccaaggatgatcttattgatattgccgtatactgtcgccactattgcctgctgcctttagcagcaaaacaaagaattggtcagttgatcatatggagagaagtgtttcctcagcatcacctccgacctttggcagactcaagcactgaagtctttccggaacctgaaggaagatattttttgctagttgttggcttgaaacattatatgctatgtgtactattagaagctggaggttgcgcatccaaagctattgggagtcctggaccagactgtgtatatgtggatcaagtcaaaacaactcttcaccagctggatggagtagattctcgcatagatgaacggctagcatcttctccagtcccctgtttgtcttgtgctgactggttccttactggatcacgtgaaaaaacagatagcttgaccacttcgcctattctcagtaggctacaaggtacttccaaagtagcaacttctccaacatgcagaagaacgctttttggtgactattccttaaagacacgcaagcctagtccttcctgtagtagtggaggatctgacaatggttgtgaaggtggagaagatgatggctttagcccccatactacaccggatgcagtacggaagcaaagagaatctcagggctctgatggtttagaagaaagtgggaccttgcttaaggtcactaaaaagaagtctactcttccaaatccatttcatttgggaaacttgaaaaaggaccttccagaaaaagaattagaaatatataacacagtgaaactgacatctggtcctgagaacacacttttccactacgttgccttagaaacagtgcaaggaatctttattactcctacccttgaagaggtggcacagctaagtggctctatccaccctcagctaataaagaatttccatcagtgttgtctttccattcgtgcagttttccaacagacattggtggaagagaaaaagaaaggactaaatagtggagaccattcagattctgcaaagtcagtgtcttctcttaaccctgttaaagaacatggtgtgttgtttgaatgttcacctggaaactggactgatcagaaaaaagcaccaccagttatggcttactgggtagtagggagactttttcttcatccaaaacctcaagaactttatgtctgttttcatgactcagtcacagaaattgccattgaaatagcttttaaattgttctttgggttaaccttgtagctgtgctttcttgatgcgtagaaacacgtgcatggaggatcaaacactgtcagaattgctgaaatcaatacacaaagagataaagtttagcttctttttactattcaatattgaacataatattgttaaatattgagatgaaatgctgttggatttgatacattaaatcttaatgtaatattgtaagacttttgagaatatacttgatt

SEQ ID NO: 14906 - DNA, 2968 bp, Homo sapiens
  source 1..2968: mol_type = unassigned DNA
cttttgaggggctcggctagcttcagcgccgtggggtctgacctggctggatatagtgtaccggcccggcaggaggggcggcccggtccgggttgcgcctcctggagccgcccccgggacgtcagtcctggaggaggcgagggttgctccggttgctaagaagactatgaacaagtcagagaacctgctgtttgctggttcatcattagcatcacaagtccatgctgctgccgttaatggagataagggtgctctacagaggctcatcgtaggaaactctgctcttaaagacaaagaagatcagtttgggagaacaccacttatgtattgcgtgttggctgacagattggattgtgcagatgctcttctgaaggcaggagcagatgtgaataaaactgaccatagccagagaacagccctccatcttgcagcccagaagggaaattatcgtttcatgaaactcttacttacacgcagagcaaactggatgcaaaaggatctggaagagatgactcctttgcacttgaccacccggcacaggagccctaagtgtttggcacttctgctgaagtttatggcaccaggagaagtggatacacaggataaaaacaagcaaacagctctgcattggagtgcctactacaataaccctgagcatgtgaagctgctcatcaagcatgattctaacattgggattcctgatgttgaaggcaagatcccacttcactgggcagccaaccataaagatccaagtgctgttcacacagtgagatgcattctggatgctgctccaacagagtctttactgaactggcaagactacgagggtcgaactcctcttcactttgcagttgctgatgggaatgtgaccgtggttgatgtcttgacctcatatgaaagctgcaatataacgtcttatgataacttatttcgaaccccactgcactgggcagctttattaggccatgcacagattgtccatctccttttagaaagaaataagtctggaactatcccatctgacagccaaggagccacacctttgcactatgctgctcagagtaactttgctgaaacggttaaagtgtttttaaaacatccttcagtgaaagatgattcagacctggaaggaagaacatcctttatgtgggcagctggcaaaggcagtgatgatgtccttagaactatgctgagcttaaaatcggacatagatattaacatggctgacaaatatggaggtacagctttgcatgctgctgctctttctggccatgtcagcaccgtgaagttattactggaaaataatgctcaagtagatgctactgatgttatgaaacatactccacttttccgagcctgtgagatgggacacaaagatgtgattcagacactcattaaaggtggagcaagggtagatctagttgaccaagatggacattctcttctacattgggcagcactgggaggaaatgctgatgtttgccagatattaatagaaaataagatcaatccaaatgtccaggattatgcaggaagaacccctttgcagtgtgcagcatatggaggctatatcaactgcatggcagttctcatggaaaacaatgcagaccctaacattcaagacaaagagggaagaacagctttgcattggtcctgcaacaatggataccttgatgccattaaattactgctagactttgctgctttccctaatcagatggaaaacaatgaagagagatacacaccccttgattatgctttgcttggtgagcgccatgaagtgatccagttcatgttggagcacggtgccctgtccatcgcagccatacaagacatcgccgccttcaaaatccaagctgtctacaaagggtacaaggtcagaaaagccttccgagacaggaaaaatctcctcatgaagcatgaacagttgagaaaagatgctgctgccaaaaagcgagaggaagaaaacaaacgaaaagaggcagaacagcaaaaaggaaggcggagcccagattcctgcagaccccaggcccttccctgtctgcctagcacccaggatgtgcccagcaggcagagccgggcccccagcaagcagcctcctgctggcaacgtggcccaaggccctgagccaagagacagcagaggatctccaggagggtctctaggcggagccctccagaaggagcagcatgtttcctcagatttgcagggaacaaactccagaaggccaaatgaaacagccagagaacattctaaaggccaatctgcttgtgtccacttcagacccaatgaaggcagtgatggaagcaggcatccaggagttccctctgttgagaagtccagagagctccgactgcagataattcagagagaacgaaggaggaaggagctgtttcgcaaaaagaacaaggcagcagcagtcatccagcgcgcctggcgaagctaccagctcaggaagcacctgtcccaccttcggcatatgaagcagcttggagctggagatgtggacagatggaggcaagagtctacagcattgctcctccaggtttggaggaaggaactggaactaaaattcccccaaaccactgcagtaagcaaggcccccaagagtccatccaagggcacctcaggcacaaagtccaccaagcactcagtgcttaagcaaatctatggttgttctcacgaagggaaaatacatcatcctacaagatctgtaaaagcctcttctgtgctgcgtctcaactcagtgagcaacctacagtgtatacatctccttgagaacagtggaagatcaaagaacttttcttataacctgcaatcagctactcagccaaaaaacaaaacaaaaccttgactgcctatggaggaagactgtgttcgggggagctggcatagctagtgcagagttcagattttctgctgataatcttttacaccttgggaaaactttaatatccgtacctgaagg

SEQ ID NO: 14907 - DNA, 3709 bp, Homo sapiens
  source 1..3709: mol_type = unassigned DNA
gccgaaagcctcgggcggccttttgaggggctcggctagcttcagcgccgtggggtctgacctggctggatatagtgtaccggcccggcaggaggggcggcccggtccgggttgcgcctcctggagccgcccccgggacgtcagtcctggaggaggcgagggttgctccggttgctaagaagactatgaacaagtcagagaacctgctgtttgctggttcatcattagcatcacaagtccatgctgctgccgttaatggagataagggtgctctacagaggctcatcgtaggaaactctgctcttaaagacaaagaagatcagtttgggagaacaccacttatgtattgcgtgttggctgacagattggattgtgcagatgctcttctgaaggcaggagcagatgtgaataaaactgaccatagccagagaacagccctccatcttgcagcccagaagggaaattatcgtttcatgaaactcttacttacacgcagagcaaactggatgcaaaaggatctggaagagatgactcctttgcacttgaccacccggcacaggagccctaagtgtttggcacttctgctgaagtttatggcaccaggagaagtggatacacaggataaaaacaagcaaacagctctgcattggagtgcctactacaataaccctgagcatgtgaagctgctcatcaagcatgattctaacattgggattcctgatgttgaaggcaagatcccacttcactgggcagccaaccataaagatccaagtgctgttcacacagtgagatgcattctggatgctgctccaacagagtctttactgaactggcaagactacgagggtcgaactcctcttcactttgcagttgctgatgggaatgtgaccgtggttgatgtcttgacctcatatgaaagctgcaatataacgtcttatgataacttatttcgaaccccactgcactgggcagctttattaggccatgcacagattgtccatctccttttagaaagaaataagtctggaactatcccatctgacagccaaggagccacacctttgcactatgctgctcagagtaactttgctgaaacggttaaagtgtttttaaaacatccttcagtgaaagatgattcagacctggaaggaagaacatcctttatgtgggcagctggcaaaggcagtgatgatgtccttagaactatgctgagcttaaaatcggacatagatattaacatggctgacaaatatggaggtacagctttgcatgctgctgctctttctggccatgtcagcaccgtgaagttattactggaaaataatgctcaagtagatgctactgatgttatgaaacatactccacttttccgagcctgtgagatgggacacaaagatgtgattcagacactcattaaaggtggagcaagggtagatctagttgaccaagatggacattctcttctacattgggcagcactgggaggaaatgctgatgtttgccagatattaatagaaaataagatcaatccaaatgtccaggattatgcaggaagaacccctttgcagtgtgcagcatatggaggctatatcaactgcatggcagttctcatggaaaacaatgcagaccctaacattcaagacaaagagggaagaacagctttgcattggtcctgcaacaatggataccttgatgccattaaattactgctagactttgctgctttccctaatcagatggaaaacaatgaagagagatacacaccccttgattatgctttgcttggtgagcgccatgaagtgatccagttcatgttggagcacggtgccctgtccatcgcagccatacaagacatcgccgccttcaaaatccaagctgtctacaaagggtacaaggtcagaaaagccttccgagacaggaaaaatctcctcatgaagcatgaacagttgagaaaagatgctgctgccaaaaagcgagaggaagaaaacaaacgaaaagaggcagaacagcaaaaaggaaggcggagcccagattcctgcagaccccaggcccttccctgtctgcctagcacccaggatgtgcccagcaggcagagccgggcccccagcaagcagcctcctgctggcaacgtggcccaaggccctgagccaagagacagcagaggatctccaggagggtctctaggcggagccctccagaaggagcagcatgtttcctcagatttgcagggaacaaactccagaaggccaaatgaaacagccagagaacattctaaaggccaatctgcttgtgtccacttcagacccaatgaaggcagtgatggaagcaggcatccaggagttccctctgttgagaagtccagaggtgagacagctggcgatgagcggtgtgcaaaggggaaaggcttcgtgaagcagccctcctgtatcagggtggctgggcctgatgagaaaggagaggactccaggcgggcagctgcaagccttccaccgcacgatagccactggaagcccagcaggcggcatgacacagaacccaaggccaaatgtgccccccagaaaaggcgcactcaagagctcagaggaggaaggtgctctccggctggttctagccgccctggcagtgcccggggggaggcggtccatgctgggcagaatcctccccaccatcgtacaccaagaaacaaagtgacacaagccaagctcacaggagggctctattcacatttgccacagagcacagaggagttgaggtcaggagctaggaggctggagacatctaccctgtccgaggactttcaggtatctaaggagactgatccagcacctggtcccctctctgggcagagtgtgaatattgaccttctccccgtagagctccgactgcagataattcagagagaacgaaggaggaaggagctgtttcgcaaaaagaacaaggcagcagcagtcatccagcgcgcctggcgaagctaccagctcaggaagcacctgtcccaccttcggcatatgaagcagcttggagctggagatgtggacagatggaggcaagagtctacagcattgctcctccaggtttggaggaaggaactggaactaaaattcccccaaaccactgcagtaagcaaggcccccaagagtccatccaagggcacctcaggcacaaagtccaccaagcactcagtgcttaagcaaatctatggttgttctcacgaagggaaaatacatcatcctacaagatctgtaaaagcctcttctgtgctgcgtctcaactcagtgagcaacctacagtgtatacatctccttgagaacagtggaagatcaaagaacttttcttataacctgcaatcagctactcagccaaaaaacaaaacaaaaccttgactgcctatggaggaagactgtgttcgggggagctggcatagctagtgcagagttcagattttctgctgataatcttttacaccttgggaaaactttaatatccgtacctgaaggctgattcacctaaaaatgtgttaactgaaagaaaatgtcagaatgtttcctttctgctcttacacagcattgttttgtcaatcaacacagcctgcactgaaaggacctgcatagactatgtctgtgcaaagtgcctgagtgtctgctttcacctcagtctgtacagttggaaatgagaattcataattaacagcaaaatctaaggaaaacta

SEQ ID NO: 14908 - DNA, 1654 bp, Homo sapiens
  source 1..1654: mol_type = unassigned DNA
cggctagcttcagcgccgtggggtctgacctggctggatatagtgtaccggcccggcaggaggggcggcccggtccgggttgcgcctcctggagccgcccccgggacgtcagtcctggaggaggcgagggttgctccggttgctaagaagactatgaacaagtcagagaacctgctgtttgctggttcatcattagcatcacaagtccatgctgctgccgttaatggagataagggtgctctacagaggctcatcgtaggaaactctgctcttaaagacaaagaagatcagtttgggagaacaccacttatgtattgcgtgttggctgacagattggattgtgcagatgctcttctgaaggcaggagcagatgtgaataaaactgaccatagccagagaacagccctccatcttgcagcccagaaggcattgagaacaatcagcacaggcaggatctaagagactacaatcattcaaagaagagaaacacgtaaagtgagtaccacattcatcctggccttttcctttatgacattttccaaactggaatgcaaaagaatacaaccctaacaggaagcagcagccttaccaggctgaagaaactgaggcagagtttggagataatagtggctggaacttgaaagtcaaaatcctggagaggagggaattgcagagaaagaatgcaagaatctggatacaaattcctcacaagtttttaacagattcctaaactgtgcttgtatagggtggtgctctaagaaacctagtattaaacaacagctgggagactagacagctgagtagagattattttaaattatcctatattttcttttatgtttaaatctcttaatatataacacattgatttttgtatggggatccattctcattttaaagcatatggataactaattttcccaacacaacctagttcattaatttttggccatttagtatctgctctctgtcagttccaggcttttgtactacgaactccctatgcatttctgtttttttaaatgagggatcctgaatactagggagcctttgggaaatttgaaaataaaagttacatgatcagtgtattttagggggactaatatggcaactaaagctactttggaagagaaagagtggagatacatagattgctattatagttcaggccaatagagaggaattgggtttaagagatacattatggaggcagaagtgttcattcaacaagcgtttgttaaatatctactatgtaatcatgattatacaactagagagaatatgaaaaaaatgaattacgtatgttagcttatagatggatgctctcagtacccatccctattaatcgtcatttccctttgtttagtgaaccttctgatatattggatatcaaatatcctttccaagtattgtctgtcccacttaattctggtatccatgaatgcagaagtgtgctatttatgtaatcatgaacactcatgtatatgtgtataccttcattcattcaacatgtgttaaaactattatgtaacaggcatcatgttaggccttggaacacaaaggtgaacaacatgattcctgctcttaagttgcttacaaagatcatggatgaagatattaaatgataattaaagctgattgatctaccttgtaa

SEQ ID NO: 14909 - DNA, 3655 bp, Homo sapiens
  source 1..3655: mol_type = unassigned DNA
aaagcctcgggcggccttttgaggggctcggctagcttcagcgccgtggggtctgacctggctggatatagtgtaccggcccggcaggaggggcggcccggtccgggttgcgcctcctggagccgcccccgggacgtcagtcctggaggaggcgagggttgctccggttgctaagaagactatgaacaagtcagagaacctgctgtttgctggttcatcattagcatcacaagtccatgctgctgccgttaatggagataagggtgctctacagaggctcatcgtaggaaactctgctcttaaagacaaagaagatcagtttgggagaacaccacttatgtattgcgtgttggctgacagattggattgtgcagatgctcttctgaaggcaggagcagatgtgaataaaactgaccatagccagagaacagccctccatcttgcagcccagaagttttcaaggtacgctgtttccatgttactgatttacaaaaaggagaaagaatacctctgaaacttttcaggaacacttataccagggaaattatcgtttcatgaaactcttacttacacgcagagcaaactggatgcaaaaggatctggaagagatgactcctttgcacttgaccacccggcacaggagccctaagtgtttggcacttctgctgaagtttatggcaccaggagaagtggatacacaggataaaaacaagcaaacagctctgcattggagtgcctactacaataaccctgagcatgtgaagctgctcatcaagcatgattctaacattgggattcctgatgttgaaggcaagatcccacttcactgggcagccaaccataaagatccaagtgctgttcacacagtgagatgcattctggatgctgctccaacagagtctttactgaactggcaagactacgagggtcgaactcctcttcactttgcagttgctgatgggaatgtgaccgtggttgatgtcttgacctcatatgaaagctgcaatataacgtcttatgataacttatttcgaaccccactgcactgggcagctttattaggccatgcacagattgtccatctccttttagaaagaaataagtctggaactatcccatctgacagccaaggagccacacctttgcactatgctgctcagagtaactttgctgaaacggttaaagtgtttttaaaacatccttcagtgaaagatgattcagacctggaaggaagaacatcctttatgtgggcagctggcaaaggcagtgatgatgtccttagaactatgctgagcttaaaatcggacatagatattaacatggctgacaaatatggaggtacagctttgcatgctgctgctctttctggccatgtcagcaccgtgaagttattactggaaaataatgctcaagtagatgctactgatgttatgaaacatactccacttttccgagcctgtgagatgggacacaaagatgtgattcagacactcattaaaggtggagcaagggtagatctagttgaccaagatggacattctcttctacattgggcagcactgggaggaaatgctgatgtttgccagatattaatagaaaataagatcaatccaaatgtccaggattatgcaggaagaacccctttgcagtgtgcagcatatggaggctatatcaactgcatggcagttctcatggaaaacaatgcagaccctaacattcaagacaaagagggaagaacagctttgcattggtcctgcaacaatggataccttgatgccattaaattactgctagactttgctgctttccctaatcagatggaaaacaatgaagagagatacacaccccttgattatgctttgcttggtgagcgccatgaagtgatccagttcatgttggagcacggtgccctgtccatcgcagccatacaagacatcgccgccttcaaaatccaagctgtctacaaagggtacaaggtcagaaaagccttccgagacaggaaaaatctcctcatgaagcatgaacagttgagaaaagatgctgctgccaaaaagcgagaggaagaaaacaaacgaaaagaggcagaacagcaaaaaggaaggcggagcccagattcctgcagaccccaggcccttccctgtctgcctagcacccaggatgtgcccagcaggcagagccgggcccccagcaagcagcctcctgctggcaacgtggcccaaggccctgagccaagagacagcagaggatctccaggagggtctctaggcggagccctccagaaggagcagcatgtttcctcagatttgcagggaacaaactccagaaggccaaatgaaacagccagagaacattctaaaggccaatctgcttgtgtccacttcagacccaatgaaggcagtgatggaagcaggcatccaggagttccctctgttgagaagtccagaggtgagacagctggcgatgagcggtgtgcaaaggggaaaggcttcgtgaagcagccctcctgtatcagggtggctgggcctgatgagaaaggagaggactccaggcgggcagctgcaagccttccaccgcacgatagccactggaagcccagcaggcggcatgacacagaacccaaggccaaatgtgccccccagaaaaggcgcactcaagagctcagaggaggaaggtgctctccggctggttctagccgccctggcagtgcccggggggaggcggtccatgctgggcagaatcctccccaccatcgtacaccaagaaacaaagtgacacaagccaagctcacaggagggctctattcacatttgccacagagcacagaggagttgaggtcaggagctaggaggctggagacatctaccctgtccgaggactttcaggtatctaaggagactgatccagcacctggtcccctctctgggcagagtgtgaatattgaccttctccccgtagagctccgactgcagataattcagagagaacgaaggaggaaggagctgtttcgcaaaaagaacaaggcagcagcagtcatccagcgcgcctggcgaagctaccagctcaggaagcacctgtcccaccttcggcatatgaagcagcttggagctggagatgtggacagatggaggcaagagtctacagcattgctcctccaggtttggaggaaggaactggaactaaaattcccccaaaccactgcagtaagcaaggcccccaagagtccatccaagggcacctcaggcacaaagtccaccaagcactcagtgcttaagcaaatctatggttgttctcacgaagggaaaatacatcatcctacaagatctgtaaaagcctcttctgtgctgcgtctcaactcaggtaaggcagccactgcaaagcagatggtggggaagaacatggggaagcattttcctttgtttcatccccaaagacagaagacattagaacagatatggccagggttttccaatggtcatttgatttcatgggattattactgtagccaacatctgtctccctaagaggcaaattattttcacaactaaaagctattattgttaacattaactccaacagaaataaatggtagctattattgatcacttttacacattttttcacacaaaggaaataaatgaaaatactgtcactcttc

SEQ ID NO: 14910 - DNA, 4648 bp, Homo sapiens
  source 1..4648: mol_type = unassigned DNA
cgccccgcgcccgccaggagccaccgtccgagccttgcggagcgcggcagtgggcgccggctgcccgcagcccctgacccggccccggacggagcgccggccgcaccaccgccctctggccgttgcctcaccggctcggcaagatgtcggtgaaggagggcgcacagcgcaagtgggcagcgctgaaggagaagctggggccacaggattcggaccccacggaggccaacctggagagcgcggaccccgagctgtgcatccggctgctccagatgccctctgtggtcaactactccggcctgcgcaagcgcctggagggcagcgacggcggctggatggtgcagttcctggagcagagcggcctggacctgctgctggaggcgctggcgcggctgtcgggccgcggcgttgcacgtatctccgacgccctgctgcagctcacctgcgtcagctgcgtgcgcgccgtcatgaactcgcggcagggcatcgagtacatcctcagcaaccagggctacgtgcgccagctctcccaggccctggacacatccaacgtgatggtgaagaagcaggtgtttgagctactggctgccctgtgcatctactctcccgagggccacgtgctgaccctggacgccctggaccactacaagacggtgtgcagccagcagtaccgcttcagcattgtcatgaacgagctctccggcagcgacaacgtgccctacgtggtcaccctgcttagcgtgatcaacgccgtcatcttgggccccgaggacctgcgcgcgcgcacccagctgcggaacgagtttatcgggctgcagctgctggacgtcctggctcgcctgcgagacctggaggatgccgacctgctgatccagctggaggctttcgaggaggctaaggccgaggacgaggaggagctgctgcgagtctctggcggggtcgacatgagcagccaccaggaggtctttgcctccctgttccacaaggtgagctgctccccggtgtctgcccagctcctgtcggtgctgcagggcctcctgcacctggagcccaccctccgctccagccagctgctctgggaggccctggagagcctcgtgaaccgggccgtgctcctggccagcgatgcccaggaatgcaccctggaggaagtggttgagcggctcctgtctgtcaaggggcgacccagaccgagccccctggtcaaggcccataaaagcgtccaggccaacctagaccagagccagaggggcagctccccgcaaaacactacaacccccaagcccagcgtggagggccagcagccagcagcagctgctgcctgcgagcccgtggaccacgcccagagtgagagcatcctgaaagtttcgcagcccagagccctggagcagcaggcgtccaccccacccccacccccacccccacccctgctccctggttccagtgccgagccccctccccctcccccaccaccccccctgcccagtgtgggggctaaggccctcccaacagcacccccgcccccacccctgccaggcctgggggccatggcccccccagcacctcctctaccaccacccctgccaggctcctgtgagttcctgcccccaccacctccaccactcccgggcttgggatgcccgcccccacccccacccctgctgcctggtatgggctggggccctcctccacccccacctccactactgccctgcacctgcagcccccccgtggcgggaggcatggaggaggtcatcgtggcccaggtggaccatggcttgggctcagcatgggtccccagccatcggcgggtgaacccacccacactgcgcatgaagaagctgaactggcagaagctgccatccaacgtggcacgtgagcacaactctatgtgggcgtccctgagcagccccgacgccgaggctgtggagcccgacttctccagcatcgagcgactattctccttccctgcagccaagcccaaggagcccaccatggtggccccccgggccaggaaggagcccaaggagatcactttcctcgatgccaagaagagcctgaacctcaacatcttcctgaagcaatttaagtgctccaacgaggaggtcgctgctatgatccgggctggagataccaccaagtttgatgtggaggttctcaaacaactccttaagctccttcccgagaagcacgagattgaaaacctgcgggcattcacagaggagcgagccaagctggccagcgccgaccacttctacctcctcctgctggccattccctgctaccagctgcgaatcgagtgcatgctgctgtgtgagggcgcggccgccgtgctggacatggtgcggcccaaggcccagctggtgctggctgcctgcgaaagcctgctcaccagccgccagctgcccatcttctgccagctgatcctgagaattgggaacttcctcaactacggcagccacaccggtgacgccgacggcttcaagatcagcacattgctgaagctcacggagaccaagtcccagcagaaccgcgtgacgctgctgcaccacgtgctggaggaagcggaaaagagccaccccgacctcctgcagctgccccgggacctggaacagccctcgcaagcagcagggatcaacctggagatcatccgctcagaggccagctccaacctgaagaagcttctggagaccgagcggaaggtgtctgcctccgtggccgaggtccaggagcagtacaccgagcgcctccaggccagcatctcggccttccgggcactggatgagctgtttgaggccatcgagcagaagcaacgggagctggccgactacctgtgtgaggacgcccagcagctgtccctggaggacacgttcagcaccatgaaggctttccgggaccttttcctccgcgccctgaaggagaacaaggaccggaaggagcaggcggcgaaggcagagaggaggaagcagcagctggcggaggaggaggcgcggcggcctcggggagaggacgggaagcctgtcaggaaggggcccgggaagcaggaggaggtgtgtgtcatcgatgccctgctggctgacatcaggaagggcttccagctgcggaagacagcccggggccgcggggacaccgacgggggcagcaaggcagcctccatggatcccccaagagccacagagcctgtggccaccagtaaccctgcaggagatcccgtgggcagcacgcgctgtcccgcctctgagcccggccttgatgctacaacagccagcgagtcccggggctgggaccttgtagacgccgtgacccccggccctcagcccaccctggagcagttggaggagggtggtccacggcccctggagaggcgttcttcctggtatgtggatgccagcgatgtcctaaccactgaggatccccagtgcccccagcccttggagggggcctggccggtgactctgggagatgctcaggccctgaagcccctcaagttctccagcaaccagccccctgcagccggaagttcaaggcaagatgccaaggatcccacgtccttgctgggcgtcctccaggccgaggccgacagcacaagtgaggggctggaggacgctgtccacagccgtggtgccagaccccctgcagcaggcccaggtggggatgaggacgaggacgaggaggacacggccccagagtccgcactggacacatccctggacaagtccttctccgaggatgcggtgaccgactcctcggggtcgggcacactccccagggcccggggccgggcctcaaaggggaccgggaagcgaaggaagaagcgtccctccaggagccaggaaggcctcaggcccaggcccaaggccaagtgagagagcccaggccacaggacatgctgccattctgccaagagaggctcttctgggggccaggctgggactgggccccggaaaccaaaactccgtgccttacccagccggggccctcctggagccttcttggggtgttgtggctgggaacccgacaggcaccagtgccctgccaggcctggtgccctcctggaccgcctgcacgtgccagcctcccacctgcttcctaaaggcaaccctggcccacacccgcatgcgcccggtgcagcctgccaagggccagtcggggggtgctgcgtcctgccagtgtccaccacagctctgcctgcccttcagcccagcaaggtttaatcaaaatgcaatgctttgcaagtctttactgcttggaggtggctgagttgggggccctgggcaggggtaagctggcaggcagtgccatggcaggccagggtcccctcccatggggtctggcccccgttccagcatgtccagcccctgaagttggagtggggggcggtctgcctttgctgccactgccaggcctctgccctgcagctgaaacttggccatcacatcaacagaaaacccctcccagtgccagctgcccagcgtgggcaggccctggggacaatacaggtccacctgaggggctgcagggtgacacccagcagccgctgccccctcactgcccacccagcgagggcagcctacccgagcctgccccctgccaggtgtgtgccctgaggctggcggctggatgcgtggccaataaaaagcagacctag

SEQ ID NO: 14911 - DNA, 4672 bp, Homo sapiens
  source 1..4672: mol_type = unassigned DNA
gccttgcggagcgcggcagtgggcgccggctgcccgcagcccctgacccggccccggacggagcgccggccgcaccaccgccctctggccgttgcctcaccggctcggcaagatgtcggtgaaggagggcgcacagcgcaagtgggcagcgctgaaggagaagctggggccacaggattcggaccccacggaggccaacctggagagcgcggaccccgagctgtgcatccggctgctccagatgccctctgtggtcaactactccggcctgcgcaagcgcctggagggcagcgacggcggctggatggtgcagttcctggagcagagcggcctggacctgctgctggaggcgctggcgcggctgtcgggccgcggcgttgcacgtatctccgacgccctgctgcagctcacctgcgtcagctgcgtgcgcgccgtcatgaactcgcggcagggcatcgagtacatcctcagcaaccagggctacgtgcgccagctctcccaggccctggacacatccaacgtgatggtgaagaagcaggtgtttgagctactggctgccctgtgcatctactctcccgagggccacgtgctgaccctggacgccctggaccactacaagacggtgtgcagccagcagtaccgcttcagcattgtcatgaacgagctctccggcagcgacaacgtgccctacgtggtcaccctgcttagcgtgatcaacgccgtcatcttgggccccgaggacctgcgcgcgcgcacccagctgcggaacgagtttatcgggctgcagctgctggacgtcctggctcgcctgcgagacctggaggatgccgacctgctgatccagctggaggctttcgaggaggctaaggccgaggacgaggaggagctgctgcgagtctctggcggggtcgacatgagcagccaccaggaggtctttgcctccctgttccacaaggtgagctgctccccggtgtctgcccagctcctgtcggtgctgcagggcctcctgcacctggagcccaccctccgctccagccagctgctctgggaggccctggagagcctcgtgaaccgggccgtgctcctggccagcgatgcccaggaatgcaccctggaggaagtggttgagcggctcctgtctgtcaaggggcgacccagaccgagccccctggtcaaggcccataaaagcgtccaggccaacctagaccagagccagaggggcagctccccgcaaaacactacaacccccaagcccagcgtggagggccagcagccagcagcagctgctgcctgcgagcccgtggaccacgcccagagtgagagcatcctgaaagtttcgcagcccagagccctggagcagcaggcgtccaccccacccccacccccacccccacccctgctccctggttccagtgccgagccccctccccctcccccaccaccccccctgcccagtgtgggggctaaggccctcccaacagcacccccgcccccacccctgccaggcctgggggccatggcccccccagcacctcctctaccaccacccctgccaggctcctgtgagttcctgcccccaccacctccaccactcccgggcttgggatgcccgcccccacccccacccctgctgcctggtatgggctggggccctcctccacccccacctccactactgccctgcacctgcagcccccccgtggcgggaggcatggaggaggtcatcgtggcccaggtggaccatggcttgggctcagcatgggtccccagccatcggcgggtgaacccacccacactgcgcatgaagaagctgaactggcagaagctgccatccaacgtggcacgtgagcacaactctatgtgggcgtccctgagcagccccgacgccgaggctgtggagcccgacttctccagcatcgagcgactattctccttccctgcagccaagcccaaggagcccaccatggtggccccccgggccaggaaggagcccaaggagatcactttcctcgatgccaagaagagcctgaacctcaacatcttcctgaagcaatttaagtgctccaacgaggaggtcgctgctatgatccgggctggagataccaccaagtttgatgtggaggttctcaaacaactccttaagctccttcccgagaagcacgagattgaaaacctgcgggcattcacagaggagcgagccaagctggccagcgccgaccacttctacctcctcctgctggccattccctgctaccagctgcgaatcgagtgcatgctgctgtgtgagggcgcggccgccgtgctggacatggtgcggcccaaggcccagctggtgctggctgcctgcgaaagcctgctcaccagccgccagctgcccatcttctgccagctgatcctgagaattgggaacttcctcaactacggcagccacaccggtgacgccgacggcttcaagatcagcacattgctgaagctcacggagaccaagtcccagcagaaccgcgtgacgctgctgcaccacgtgctggaggaagcggaaaagagccaccccgacctcctgcagctgccccgggacctggaacagccctcgcaagcagcagggatcaacctggagatcatccgctcagaggccagctccaacctgaagaagcttctggagaccgagcggaaggtgtctgcctccgtggccgaggtccaggagcagtacaccgagcgcctccaggccagcatctcggccttccgggcactggatgagctgtttgaggccatcgagcagaagcaacgggagctggccgactacctgtgtgaggacgcccagcagctgtccctggaggacacgttcagcaccatgaaggctttccgggaccttttcctccgcgccctgaaggagaacaaggaccggaaggagcaggcggcgaaggcagagaggaggaagcagcagctggcggaggaggaggcgcggcggcctcggggagaggacgggaagcctgtcaggaaggggcccgggaagcaggaggaggtgtgtgtcatcgatgccctgctggctgacatcaggaagggcttccagctgcggaagacagcccggggccgcggggacaccgacgggggcagcaaggcagcctccatggatcccccaagagccacagagcctgtggccaccagtaaccctgcaggagatcccgtgggcagcacgcgctgtcccgcctctgagcccggccttgatgctacaacagccagcgagtcccggggctgggaccttgtagacgccgtgacccccggccctcagcccaccctggagcagttggaggagggtggtccacggcccctggagaggcgttcttcctggtatgtggatgccagcgatgtcctaaccactgaggatccccagtgcccccagcccttggagggggcctggccggtgactctgggagatgctcaggccctgaagcccctcaagttctccagcaaccagccccctgcagccggaagttcaaggcaagatgccaaggatcccacgtccttgctgggcgtcctccaggccgaggccgacagcacaagtgaggggctggaggacgctgtccacagccgtggtgccagaccccctgcagcaggcccaggtggggatgaggacgaggacgaggaggacacggccccagagtccgcactggacacatccctggacaagtccttctccgaggatgcggtgaccgactcctcggggtcgggcacactccccagggcccggggccgggcctcaaaggggaccgggaagcgaaggaagaagcgtccctccaggagccaggaagaggttccccctgattctgatgataataaaacaaagaaactgtgtgtgatccagtaaggcctcaggcccaggcccaaggccaagtgagagagcccaggccacaggacatgctgccattctgccaagagaggctcttctgggggccaggctgggactgggccccggaaaccaaaactccgtgccttacccagccggggccctcctggagccttcttggggtgttgtggctgggaacccgacaggcaccagtgccctgccaggcctggtgccctcctggaccgcctgcacgtgccagcctcccacctgcttcctaaaggcaaccctggcccacacccgcatgcgcccggtgcagcctgccaagggccagtcggggggtgctgcgtcctgccagtgtccaccacagctctgcctgcccttcagcccagcaaggtttaatcaaaatgcaatgctttgcaagtctttactgcttggaggtggctgagttgggggccctgggcaggggtaagctggcaggcagtgccatggcaggccagggtcccctcccatggggtctggcccccgttccagcatgtccagcccctgaagttggagtggggggcggtctgcctttgctgccactgccaggcctctgccctgcagctgaaacttggccatcacatcaacagaaaacccctcccagtgccagctgcccagcgtgggcaggccctggggacaatacaggtccacctgaggggctgcagggtgacacccagcagccgctgccccctcactgcccacccagcgagggcagcctacccgagcctgccccctgccaggtgtgtgccctgaggctggcggctggatgcgtggccaataaaaagcagacct

SEQ ID NO: 14912 - DNA, 1689 bp, Homo sapiens
  source 1..1689: mol_type = unassigned DNA
aggagccaccgtccgagccttgcggagcgcggcagtgggcgccggctgcccgcagcccctgacccggccccggacggagcgccggccgcaccaccgccctctggccgttgcctcaccggctcggcaagatgtcggtgaaggagggcgcacagcgcaagtgggcagcgctgaaggagaagctggggccacaggattcggaccccacggaggccaacctggagagcgcggaccccgagctgtgcatccggctgctccagatgccctctgtggtcaactactccggcctgcgcaagcgcctggagggcagcgacggcggctggatggtgcagttcctggagcagagcggcctggacctgctgctggaggcgctggcgcggctgtcgggccgcggcgttgcacgtatctccgacgccctgctgcagctcacctgcgtcagctgcgtgcgcgccgtcatgaactcgcggcagggcatcgagtacatcctcagcaaccagggctacgtgcgccagctctcccaggccctggacacatccaacgtgatggtgaagaagcaggtgtttgagctactggctgccctgtgcatctactctcccgagggccacgtgctgaccctggacgccctggaccactacaagacggtgtgcagccagcagtaccgcttcagcattgtcatgaacgagctctccggcagcgacaacgtgccctacgtggtcaccctgcttagcgtgatcaacgccgtcatcttgggccccgaggacctgcgcgcgcgcacccagctgcggaacgagtttatcgggctgcagctgctggacgtcctggctcgcctgcggtgagtccccactgtagcggtcctgccggctccccctcctgctcccaaggccaggcccacctgccctttggctcccagccacctcacctaagcagcacctccagatggcagggaggtggctccctcggagtaaccccaggggtccagccagaagccaggtctcaggctagaatccagctcactgtccctggcagctgcccacagaaactagggttgcagcagccatagaaaggacagaatgagctcatatcctttgcacaccgtggatggagctggaggccgtgatcctaagtgaaccaacccagaaacagaaaatgaaatgccaataagagggaactacagggtggttcacgtggacgcaagatggagacagggacacgggctccagggcgagagttgaaaaactacctacagggtacagtgttcgtcgctacttggtgtcaggcccactagaacaagggtccccaaccgccaggctgcggaccggtacctggcctattggaaccgggccacgcagcaggaagtgagcggtgggcgggcattcctgcctgagctgcacctcatgtcagatcagcactgcattagattctccagcgcacgcacgcgcgcaagggatccaggctgcgcgctcctcatgacaatctaatgcctgatgatcgggggtggaacagttttatccctaaaccattcccgtcaccccagtctatggaaaaattgtcttccacaaaaccagtccctggtgccaaaaaggctggggaccactgccctagaaggcaaatcgcctacgttacacagtgtaccatgtggcaaacacgcacatgtacccccgagtctaaaataaaaattttttaaaaaagaaa

SEQ ID NO: 14913 - DNA, 2153 bp, Homo sapiens
  source 1..2153: mol_type = unassigned DNA
tcagcactccaccaaagcctctgcctcagccttactgtgagtctggttgacagtagcttctaagatgtcccagcaacacacactgccagtgaccctctcccctgccctcagtcaggagctcctcaagactgttcctcctccagtcaatacccatcaggagcaaatgaaacagccaactccactgcctcccccatgccagaaggtgcctgtcgagctcccagtggaggtcccatcaaagcaagaggaaaagcacatgactgctgtaaagggactgcctgagcaagaatgtgagcaacagcagaaggagccacaggagcaggagctgcagcaacagcactgggaacagcatgaggaatatcagaaagcagaaaacccagagcagcagcttaagcaggagaaaacacaaagggatcagcagctaaacaaacagctggaagaagagaagaagctcttagaccagcaactggatcaagagctagtcaagagagatgagcaactgggaatgaagaaagagcaactgttggagctcccagagcagcaggaggggcacctgaagcacctagagcagcaggagggacagctgaagcacccggagcagcaggaggggcagctggagctcccagagcagcaggaggggcagctggagctcccagagcagcaggaggggcagctggagctcccagagcagcaggaggggcagctggagctcccagagcagcaggaggggcagctggagctcccagagcagcaggaggggcagctggagctcccacagcagcaggaggggcagctggagctctctgagcagcaggaggggcagctggagctctctgagcagcaggagggacagctgaagcacctggagcaccaggaggggcagctggaggtcccagaggagcagatggggcagctgaagtacctggaacagcaggaggggcagctgaagcacctggatcagcaggagaagcagccagagctcccagagcagcagatggggcagctgaagcacctggagcagcaggaggggcagcctaagcatctggagcagcaggaggggcaactggagcagctggaggagcaggaggggcagctgaagcacctggagcagcaggaggggcagctggagcacctggagcaccaggaagggcagctggggctcccagagcagcaggtgctgcagctgaagcagctagagaagcagcaggggcagccaaagcacctggaggaggaggaggggcagctgaagcacctggtgcagcaggaggggcagctgaagcatctggtgcagcaggaggggcagctggagcagcaggagaggcaggtggagcacctggagcagcaggtggggcagctgaagcacctagaggagcaggagggacaactgaagcatctggagcagcagcaggggcagttggaggtcccagagcagcaggtggggcagccaaagaacctggagcaggaggagaagcaactggagctcccagagcagcaagagggccaggtgaagcacctggagaagcaggaggcacagctggagctcccagagcagcaggtaggacagccaaagcacctggaacagcaggaaaagcacctagagcacccagagcagcaggacggacaactaaaacatctggagcagcaggaggggcagctgaaggacctggagcagcagaaggggcagctggagcagcctgtgtttgccccagctccaggccaggtccaagacattcaaccagccctgcccacaaagggagaagtattgcttcctgtagagcaccagcagcagaagcaggaggtgcagtggccacccaaacataaataaccacccgcagtgtccagaggccctcagatcgtctcatacaagggaagagagagccactggctccacttatttcgggtccgctaggtggcccgtctcatctgtgaacttgactctgtccctctacatgtctctttaatggggtgagggtgggggagagagggaattattgtccagtgccaaccccaatgaccccaatcccaacctcaggtgagcagagcctctacttgagggactattgttactataggaatccttacttccccagtattgaagctgaatcagtgagtgtgtacaatgatacataataaatcctggaagtcttgggatccta

SEQ ID NO: 14914 - DNA, 2015 bp, Homo sapiens
  source 1..2015: mol_type = unassigned DNA
agcactccaccaaagcctctgcctcagccttactgtgagtctggttgacagtagcttctaagatgtcccagcaacacacactgccagtgaccctctcccctgccctcagtcaggagctcctcaagactgttcctcctccagtcaatacccatcaggagcaaatgaaacagccaactccactgcctcccccatcaacagcactgggaacagcatgaggaatatcagaaagcagaaaacccagagcagcagcttaagcaggagaaaacacaaagggatcagcagctaaacaaacagctggaagaagagaagaagctcttagaccagcaactggatcaagagctagtcaagagagatgagcaactgggaatgaagaaagagcaactgttggagctcccagagcagcaggaggggcacctgaagcacctagagcagcaggagggacagctgaagcacccggagcagcaggaggggcagctggagctcccagagcagcaggaggggcagctggagctcccagagcagcaggaggggcagctggagctcccagagcagcaggaggggcagctggagctcccagagcagcaggaggggcagctggagctcccagagcagcaggaggggcagctggagctcccacagcagcaggaggggcagctggagctctctgagcagcaggaggggcagctggagctctctgagcagcaggagggacagctgaagcacctggagcaccaggaggggcagctggaggtcccagaggagcagatggggcagctgaagtacctggaacagcaggaggggcagctgaagcacctggatcagcaggagaagcagccagagctcccagagcagcagatggggcagctgaagcacctggagcagcaggaggggcagcctaagcatctggagcagcaggaggggcaactggagcagctggaggagcaggaggggcagctgaagcacctggagcagcaggaggggcagctggagcacctggagcaccaggaagggcagctggggctcccagagcagcaggtgctgcagctgaagcagctagagaagcagcaggggcagccaaagcacctggaggaggaggaggggcagctgaagcacctggtgcagcaggaggggcagctgaagcatctggtgcagcaggaggggcagctggagcagcaggagaggcaggtggagcacctggagcagcaggtggggcagctgaagcacctagaggagcaggagggacaactgaagcatctggagcagcagcaggggcagttggaggtcccagagcagcaggtggggcagccaaagaacctggagcaggaggagaagcaactggagctcccagagcagcaagagggccaggtgaagcacctggagaagcaggaggcacagctggagctcccagagcagcaggtaggacagccaaagcacctggaacagcaggaaaagcacctagagcacccagagcagcaggacggacaactaaaacatctggagcagcaggaggggcagctgaaggacctggagcagcagaaggggcagctggagcagcctgtgtttgccccagctccaggccaggtccaagacattcaaccagccctgcccacaaagggagaagtattgcttcctgtagagcaccagcagcagaagcaggaggtgcagtggccacccaaacataaataaccacccgcagtgtccagaggccctcagatcgtctcatacaagggaagagagagccactggctccacttatttcgggtccgctaggtggcccgtctcatctgtgaacttgactctgtccctctacatgtctctttaatggggtgagggtgggggagagagggaattattgtccagtgccaaccccaatgaccccaatcccaacctcaggtgagcagagcctctacttgagggactattgttactataggaatccttacttccccagtattgaagctgaatcagtgagtgtgtacaatgatacataataaatcctggaagtcttgggatcc

SEQ ID NO: 14915 - DNA, 7513 bp, Homo sapiens
  source 1..7513: mol_type = unassigned DNA
gaagagttctgcactttgttccttccctggcacacctgtgtctgcattccttctatctcccggcattctccactcctgtctctgtgtgtttaaaaaccggtgtgggaagtgtgcacgcctgtgacgtcagactccagaccatgtatttcctgactcccatcttggtagccattctctgcattttggttgtgtggatctttaaaaatgccgacagaagcatggagaaaaagaagggggagcctagaaccagggccgaagctcgcccctgggtggatgaagacttaaaagacagcagtgacctgcaccaagcagaagaagatgctgatgaatggcaagaatcagaagaaaatgttgaacacatccccttctctcataaccactatcctgagaaggaaatggttaagaggtctcaggaattttatgaacttctcaataagagacggtcagtcaggttcataagtaatgagcaagtcccaatggaagtcattgataatgtcatcagaacggcaggaacagccccgagtggggctcacacagagccctggaccttcgtggttgtgaaggacccagacgtgaagcacaagattcgaaagatcattgaggaggaagaggagatcaactacatgaaaaggatgggacatcgctgggtcacagacctcaagaaactgagaaccaactggattaaagagtacttggatactgcccctattttgattctcattttcaaacaagtacatggtttcgccgcaaatggcaagaaaaaagtccactactacaatgagatcagtgtttccatcgcttgtggcatcctgctagctgccctgcaggtaaataatggaatcaccatgcggcatcagactgcgaggcaccgccacctgattgagggtcctggaagaagcagcgaagcctgcagcaagctcagctcacaaggctgcccagaatgcaggtctggtgactgtcactaccactcctctcaactgtggccctcgactgagggtgctcctgggccgccccgcacatgaaaagctgctgatgctgctccccgtggggtaccccagcaaggaggccacggtgcctgacctcaagcgcaaacctctggaccagatcatggtgacagtgtaggcagggccccccaagggagtggcagggagatggcgcccctgcttttccctgagcctctcgcctgctcctcttgggtctcttggctgctctttctccaggtgtcaggtcccctcattgctcttctcaggtggccacactatgtcaagaagcctctccacactctgtggcacttccagtcccataaatcctgtttcttatccactttggaaatgcatgaacactttacaaagaacatgcccgggtttttacattttaaaagttattctagacaatcactattggcttttttcttttatttttaaaaaactcacatagaggagacaatcagaaatttaccatagtcccaagaattcagctacatgatgactcgaatttaaatttagattaatcaaatggtctcctgttctctgatttctggtggcttttagacactaatttttgagaactacttttttttttttaccaaacttcagggacactctgctagttttgaataagtaaccatcaaagttactaaaacatggccaggcgcagtggctcatgcctgtaatcccagcactttgggaggccgaggtgggcagattgcctgagctcaagagttcgagaccagcctggccaacatggtgaaaccccatctctactaaaaatacaaaaaattagctgggcatgcacttgtaattccagctactcaggaggctgaggcaagagaactgcttgaatccgggaggtagagattgcagtgagtcaagatgctgagatgccaccactgcactccagcctgggcaacagagcgagaacctgtctcaaaaaaaacaaaaacaaagttactaaaatgtcaccttcacagaacaggacagggtacccttgggtcgcacgggcctggctggcatgtaaacggtcagttgcactgcctagtggtttggtagatctgacttgtaagcagttcatagaagctgctcaatactcaagaatcttgcaagacagttattaaacattcatagcttgaaattgcccatggtgggagagtttacatcacaaccactacaaatcagcacttgctttcttcttcttaaagagagctgcttaccatacatagcacccacagtgtctcccttctcttctaccccaacccctgaaacacactgacccctattctccagatgacagcacagctgtttgggactgatagggtcacagttgccaggttgggaatgctagatgtagtcttcacccatcaccttctgtcgtcctcccaggggtgtcatatttacagaggcaaactcttacagcttggatgatttctcatcaagcaactctactcacctctttttcccctttccctgtgcgtttcttcttcttgtcctcattttccttgagaaaactctctctataaaaaatttccatagagtatgtggctgataaacaacagaaatttgtttctcacagttctggaggctggaagtccaaggtcggggtgccctcatggtcaggtgctggtgaggaccctgatctgggttgcagactgctgacttcttattgtgtcctcgtggtagaaagagggttagagcctctggcatgccttttataagggtactaatcccatcatgaggccccgtccttatgacctcatcacctcccaaaggaccccctcctaataccatcacattgggggttagggtttcaacatatgaattgcgggggacacaaacattccgtccatggcacctacttcatagggtttggcatgctgctcggtacatggttaacattcataaatggtgggggcccttactgtggtagaaaccattgtcactgcaaggcagccctgcttgggattcaggtgaacaaatgtaacgtgggtgggtgagggactccctcctcttcagagaagccctcctgtggctcaggggcagctgcagggccagatggagttggcctgcagggagtcagccttaccccatcagagaccaacttgaaagatttttttctctgtgtagttcgtgttatcaatctgatctgcagccaggttatttacttctgaagcattggagttatcgattgccattgccccatggttctcactctttgcaggcactcttcaaatttttattttaaaaattataatgcaaacatctggccatcaccttaaccaagtgacaaagtcctagcacaccattaatggtaggataactgacattaagtgttcctgctgggatgaattatgaagtattccttccaaagatgtcaatggaaactaatcgagtcttacacctaattttcagtttacagtaaatacagaggataaagaagttaatggcatggtggaataaccaaaatgtgtatcattctacaaaaaaataggcctggactatttaaggagtgagtgtcactgtgggaagaataagagggggactgtcttgtccttgctactcaaagagtggtcctgggcctgtatcatcattgggaccacctgggcgcttgttagaatcaaagactctcaggcctcacctagacatccagaatcaaaatctgcattttaacaagatgcccaggtgatctgcatgcctgttaaagtctgagctctgttgcagataaccagagacccaacaaccaaaggcaaagcgtaagccttgattggattttggtttaggaaaaatctcataggtataaaagacaactgggaatgttgaatgtggatctggtggtaggtgatattgttagtgatgtgagtgatgcctgctgaagtactgagagatgaagcatcatattgacaacttactccaggaaaaaaggtgtgtgtataggtgtgtgtttggagagtgtgagcgagaactaacatggtaaaatgttaggtggagcatatacagttctcattatactcttattttaaatttatatttgaacacagtcaaatctgaatggaaatacatttaaataagcatttctttcagtcatataagtaatttgcctaaaaatgccctctaagtccatcattaggttaagcgatttactgaaggtgcagatatcatgcttatttcattgggttgttttggaatgtcccccacttggagagtttgaggaatggaaatgagaatcggaggagaaataaggccagaggctcacattgcttgcagggaaccgactgagtaatgaagaagaggaaggaagcccttggaaggaacgtaaaatccatttcagcctgccgccccttggaatggagggtcttctagggaccagaaacaccagacacttcttctgccccaagcacaccccacactaatttctgctgcagcatcacgatcagggcaaatcagcacagccccccagccatcagtggtgtctagaaaagtaaggataattttcttccttctcactgcagccccaagctcttattaaccttcttttatgtgttcattaaatgcagtcatgtgacaactgtgttcaaagttagaaatagtggtcggggaggcttatagatcctcttgctgttctgaggccttaaaaccaaaaaaataatggaatgattgcatcactgcgaggaagtatacttaattaagaaagttgaaaatggtttgtgtcttactaataggactcacctgaagactctactttgccaagagggaatttttaactcaaagttgtgtcagccagcacggggtagagccatggtcctcatacttgctggcatccctcatctggtggtctgttaaagcacagattgctgggccgcaccctcagggtgtgtgattgtgtgattcagtattgctgggtggtgcccaaatgctccagttctaatgtattcccaggtgttgctgatgctggtgattgggtaccacattttgagaaccatggggcattggcaatcaacaaatgcaatgcttgtgacttgacgtgataaaagttcatttattgggcaggcaaagtcctctgcaggcctggaaaccctccgagacaattacttgcatggggtaacccagtaatactgtgggatgcaacttctagggcatggctgcctccttcctagaggcagcagggggagaaaacactggaagaggtcaccccaacaattccatcgtaccttggcctaggagtgacctcctcagtctcacaaccctttggctagaactagtcatgtgacctcacaggaggtggagcagtgtcgtcaatgttatcatccccctgcacctgcaaggaaggaggcccagatgtgtgtaggtgctggatgtctcttccccaaaacatataactctggatttggaaaacaaaactggatataacagaaaagaaaaggaggggagaaggaaagttgaagaaattggtgaaatcagaataggacagtgaaaggcataaagattttcttctgaaacgctaagatcggttgatatttgtctaatacagctttaaatagagtatcactttgggccaaagaaaattgatataaacatacataaagtggaactaagattgacttcttcctagacatctctgcctctgtccacaaaatggaaacttccatcaaggagtactggaggacagttcagtatttcttcttatttgctcctccctatgaaaggaagagtgacttctctgctgcatgatattgggggtaaatagttattgcacatttgctcaaaccccagcaaagtgcaccccattttaagccaaatttacaaacttacaaagatgatccaccaatagttttctctatttactttattcttgctctgtcacccaggctagaatgcagtggtgtgattatagctcactgcagcctccaacttctggactcaagtgatcctcccaccttagcttcccaggtagctgggatacaggtgcacgccaccacacccaggctagtttttctaaatattggagttcccaaagagtattcaaactgatgtgatattttaaaagacattttgtaagcatcttttaggaatatcagtaagtggaagaaaaacacatagttatcagtggatattatgccagagaggcatgagaaatataattttattttgctaggtatcagcagagtgccctcttataatttgtgtgaaatggaaacaaaggtaacatcgtgttttcaattcacacatatatacaagtaatgagaggtccagaagaaatgtggcttcagctctgctgctactgtgcctcccttctcctgccccactcagcccacaaaataggctggacactcaaaaaacgttgcgtttatctaccttttagagagggtgaatagcagagaactggaggtgggaatggtaaggaactcccagcagggtagtggagggaatgggctgacgcatctaaggctgatgccaggtctgctccctatctgggtggcctcagcaaatgacgtccagcacatccaggggcaggctcaagggagaacagcccccaaagctaagatcctgccaagctaaatacagtagttctaatgaaatgtgagaggctataatcccatttgggaaattcctaaaaagtcatgaggcaggggattggtttatgttattatcatgacctgagagtcatggctcagagccaaatgttcaggattgaattcaacagcatttaaatgtctttagagcaggatggaaatatgttagcaatgcctgcagagtgccaagtaaacgcaaaagccaatgagatcataaaggaagttgttagctaacctaggtggagtcgccaacttccttctactctaataattaaaaataaaaataatacttgggaggtaactggaataaaggttctaaaatcaaaaccctctgaagggtgaaaactgggagcctcctgttcccatagtaaccacagcactcagggcactgtctcccagcgctggagtactgtcttatgaccagagatcctaagcaacctctgctcatctgagttgtccaccatattgtgggcatgagtccttgacaatagtaaatagcacctctgttcccttattgggtaaatgattttccaactctgggaatgtgtagaattcattatggaaataatgcaataattcaaatccataatattgatactttcatgttaagtttaggactaatcttgtgtatgctccttaagtgatttgaatctttaaaaagcttatgattccaatttgaaatgtgaaattgattttacgtttgtgatttgaagttgaaaggtataagaatatttaacttagctcatgaaaagtattagactagatttactataagtttaatgtattagatttacaagagatgcttaaatatatgagaatgttttgtcttaattggttataatcttgtcatatcaatgatttgaagtgctaaaatagaaaattaaatatgataaattacacaagaagtttagaatgtttaaaagattttaataaacaaagcctataactaag

SEQ ID NO: 14916 - DNA, 8742 bp, Homo sapiens
  source 1..8742: mol_type = unassigned DNA
gaagagttctgcactttgttccttccctggcacacctgtgtctgcattccttctatctcccggcattctccactcctgtctctgtgtgtttaaaaaccggtgtgggaagtgtgcacgcctgtgacgtcagactccagaccatgtatttcctgactcccatcttggtagccattctctgcattttggttgtgtggatctttaaaaatgccgacagaagcatggagaaaaagaagggggagcctagaaccagggccgaagctcgcccctgggtggatgaagacttaaaagacagcagtgacctgcaccaagcagaagaagatgctgatgaatggcaagaatcagaagaaaatgttgaacacatccccttctctcataaccactatcctgagaaggaaatggttaagaggtctcaggaattttatgaacttctcaataagagacggtcagtcaggttcataagtaatgagcaagtcccaatggaagtcattgataatgtcatcagaacggcaggaacagccccgagtggggctcacacagagccctggaccttcgtggttgtgaaggacccagacgtgaagcacaagattcgaaagatcattgaggaggaagaggagatcaactacatgaaaaggatgggacatcgctgggtcacagacctcaagaaactgagaaccaactggattaaagagtacttggatactgcccctattttgattctcattttcaaacaagtacatggtttcgccgcaaatggcaagaaaaaagtccactactacaatgagatcagtgtttccatcgcttgtggcatcctgctagctgccctgcagaatgcaggtctggtgactgtcactaccactcctctcaactgtggccctcgactgagggtgctcctgggccgccccgcacatgaaaagctgctgatgctgctccccgtggggtaccccagcaaggaggccacggtgcctgacctcaagcgcaaacctctggaccagatcatggtgacagtgtaggcagggccccccaagggagtggcagggagatggcgcccctgcttttccctgagcctctcgcctgctcctcttgggtctcttggctgctctttctccaggtgtcaggtcccctcattgctcttctcaggtggccacactatgtcaagaagcctctccacactctgtggcacttccagtcccataaatcctgtttcttatccactttggaaatgcatgaacactttacaaagaacatgcccgggtttttacattttaaaagttattctagacaatcactattggcttttttcttttatttttaaaaaactcacatagaggagacaatcagaaatttaccatagtcccaagaattcagctacatgatgactcgaatttaaatttagattaatcaaatggtctcctgttctctgatttctggtggcttttagacactaatttttgagaactacttttttttttttaccaaacttcagggacactctgctagttttgaataagtaaccatcaaagttactaaaacatggccaggcgcagtggctcatgcctgtaatcccagcactttgggaggccgaggtgggcagattgcctgagctcaagagttcgagaccagcctggccaacatggtgaaaccccatctctactaaaaatacaaaaaattagctgggcatgcacttgtaattccagctactcaggaggctgaggcaagagaactgcttgaatccgggaggtagagattgcagtgagtcaagatgctgagatgccaccactgcactccagcctgggcaacagagcgagaacctgtctcaaaaaaaacaaaaacaaagttactaaaatgtcaccttcacagaacaggacagggtacccttgggtcgcacgggcctggctggcatgtaaacggtcagttgcactgcctagtggtttggtagatctgacttgtaagcagttcatagaagctgctcaatactcaagaatcttgcaagacagttattaaacattcatagcttgaaattgcccatggtgggagagtttacatcacaaccactacaaatcagcacttgctttcttcttcttaaagagagctgcttaccatacatagcacccacagtgtctcccttctcttctaccccaacccctgaaacacactgacccctattctccagatgacagcacagctgtttgggactgatagggtcacagttgccaggttgggaatgctagatgtagtcttcacccatcaccttctgtcgtcctcccaggggtgtcatatttacagaggcaaactcttacagcttggatgatttctcatcaagcaactctactcacctctttttcccctttccctgtgcgtttcttcttcttgtcctcattttccttgagaaaactctctctataaaaaatttccatagagtatgtggctgataaacaacagaaatttgtttctcacagttctggaggctggaagtccaaggtcggggtgccctcatggtcaggtgctggtgaggaccctgatctgggttgcagactgctgacttcttattgtgtcctcgtggtagaaagagggttagagcctctggcatgccttttataagggtactaatcccatcatgaggccccgtccttatgacctcatcacctcccaaaggaccccctcctaataccatcacattgggggttagggtttcaacatatgaattgcgggggacacaaacattccgtccatggcacctacttcatagggtttggcatgctgctcggtacatggttaacattcataaatggtgggggcccttactgtggtagaaaccattgtcactgcaaggcagccctgcttgggattcaggtgaacaaatgtaacgtgggtgggtgagggactccctcctcttcagagaagccctcctgtggctcaggggcagctgcagggccagatggagttggcctgcagggagtcagccttaccccatcagagaccaacttgaaagatttttttctctgtgtagttcgtgttatcaatctgatctgcagccaggttatttacttctgaagcattggagttatcgattgccattgccccatggttctcactctttgcaggcactcttcaaatttttattttaaaaattataatgcaaacatctggccatcaccttaaccaagtgacaaagtcctagcacaccattaatggtaggataactgacattaagtgttcctgctgggatgaattatgaagtattccttccaaagatgtcaatggaaactaatcgagtcttacacctaattttcagtttacagtaaatacagaggataaagaagttaatggcatggtggaataaccaaaatgtgtatcattctacaaaaaaataggcctggactatttaaggagtgagtgtcactgtgggaagaataagagggggactgtcttgtccttgctactcaaagagtggtcctgggcctgtatcatcattgggaccacctgggcgcttgttagaatcaaagactctcaggcctcacctagacatccagaatcaaaatctgcattttaacaagatgcccaggtgatctgcatgcctgttaaagtctgagctctgttgcagataaccagagacccaacaaccaaaggcaaagcgtaagccttgattggattttggtttaggaaaaatctcataggtataaaagacaactgggaatgttgaatgtggatctggtggtaggtgatattgttagtgatgtgagtgatgcctgctgaagtactgagagatgaagcatcatattgacaacttactccaggaaaaaaggtgtgtgtataggtgtgtgtttggagagtgtgagcgagaactaacatggtaaaatgttaggtggagcatatacagttctcattatactcttattttaaatttatatttgaacacagtcaaatctgaatggaaatacatttaaataagcatttctttcagtcatataagtaatttgcctaaaaatgccctctaagtccatcattaggttaagcgatttactgaaggtgcagatatcatgcttatttcattgggttgttttggaatgtcccccacttggagagtttgaggaatggaaatgagaatcggaggagaaataaggccagaggctcacattgcttgcagggaaccgactgagtaatgaagaagaggaaggaagcccttggaaggaacgtaaaatccatttcagcctgccgccccttggaatggagggtcttctagggaccagaaacaccagacacttcttctgccccaagcacaccccacactaatttctgctgcagcatcacgatcagggcaaatcagcacagccccccagccatcagtggtgtctagaaaagtaaggataattttcttccttctcactgcagccccaagctcttattaaccttcttttatgtgttcattaaatgcagtcatgtgacaactgtgttcaaagttagaaatagtggtcggggaggcttatagatcctcttgctgttctgaggccttaaaaccaaaaaaataatggaatgattgcatcactgcgaggaagtatacttaattaagaaagttgaaaatggtttgtgtcttactaataggactcacctgaagactctactttgccaagagggaatttttaactcaaagttgtgtcagccagcacggggtagagccatggtcctcatacttgctggcatccctcatctggtggtctgttaaagcacagattgctgggccgcaccctcagggtgtgtgattgtgtgattcagtattgctgggtggtgcccaaatgctccagttctaatgtattcccaggtgttgctgatgctggtgattgggtaccacattttgagaaccatggggcattggcaatcaacaaatgcaatgcttgtgacttgacgtgataaaagttcatttattgggcaggcaaagtcctctgcaggcctggaaaccctccgagacaattacttgcatggggtaacccagtaatactgtgggatgcaacttctagggcatggctgcctccttcctagaggcagcagggggagaaaacactggaagaggtcaccccaacaattccatcgtaccttggcctaggagtgacctcctcagtctcacaaccctttggctagaactagtcatgtgacctcacaggaggtggagcagtgtcgtcaatgttatcatccccctgcacctgcaaggaaggaggcccagatgtgtgtaggtgctggatgtctcttccccaaaacatataactctggatttggaaaacaaaactggatataacagaaaagaaaaggaggggagaaggaaagttgaagaaattggtgaaatcagaataggacagtgaaaggcataaagattttcttctgaaacgctaagatcggttgatatttgtctaatacagctttaaatagagtatcactttgggccaaagaaaattgatataaacatacataaagtggaactaagattgacttcttcctagacatctctgcctctgtccacaaaatggaaacttccatcaaggagtactggaggacagttcagtatttcttcttatttgctcctccctatgaaaggaagagtgacttctctgctgcatgatattgggggtaaatagttattgcacatttgctcaaaccccagcaaagtgcaccccattttaagccaaatttacaaacttacaaagatgatccaccaatagttttctctatttactttattcttgctctgtcacccaggctagaatgcagtggtgtgattatagctcactgcagcctccaacttctggactcaagtgatcctcccaccttagcttcccaggtagctgggatacaggtgcacgccaccacacccaggctagtttttctaaatattggagttcccaaagagtattcaaactgatgtgatattttaaaagacattttgtaagcatcttttaggaatatcagtaagtggaagaaaaacacatagttatcagtggatattatgccagagaggcatgagaaatataattttattttgctaggtatcagcagagtgccctcttataatttgtgtgaaatggaaacaaaggtaacatcgtgttttcaattcacacatatatacaagtaatgagaggtccagaagaaatgtggcttcagctctgctgctactgtgcctcccttctcctgccccactcagcccacaaaataggctggacactcaaaaaacgttgcgtttatctaccttttagagagggtgaatagcagagaactggaggtgggaatggtaaggaactcccagcagggtagtggagggaatgggctgacgcatctaaggctgatgccaggtctgctccctatctgggtggcctcagcaaatgacgtccagcacatccaggggcaggctcaagggagaacagcccccaaagctaagatcctgccaagctaaatacagtagttctaatgaaatgtgagaggctataatcccatttgggaaattcctaaaaagtcatgaggcaggggattggtttatgttattatcatgacctgagagtcatggctcagagccaaatgttcaggattgaattcaacagcatttaaatgtctttagagcaggatggaaatatgttagcaatgcctgcagagtgccaagtaaacgcaaaagccaatgagatcataaaggaagttgttagctaacctaggtggagtcgccaacttccttctactctaataattaaaaataaaaataatacttgggaggtaactggaataaaggttctaaaatcaaaaccctctgaagggtgaaaactgggagcctcctgttcccatagtaaccacagcactcagggcactgtctcccagcgctggagtactgtcttatgaccagagatcctaagcaacctctgctcatctgagttgtccaccatattgtgggcatgagtccttgacaatagtaaatagcacctctgttcccttattgggtaaatgattttccaactctgggaatgtgtagaattcattatggaaataatgcaataattcaaatccataatattgatactttcatgttaagtttaggactaatcttgtgtatgctccttaagtgatttgaatctttaaaaagcttatgattccaatttgaaatgtgaaattgattttacgtttgtgatttgaagttgaaaggtataagaatatttaacttagctcatgaaaagtattagactagatttactataagtttaatgtattagatttacaagagatgcttaaatatatgagaatgttttgtcttaattggttataatcttgtcatatcaatgatttgaagtgctaaaatagaaaattaaatatgataaattacacaagaagtttagaatgtttaaaagattttaataaacaaagcctataactaagactgatgctttaagggagtttggcttattcaacttgagttaatcaaacattaattaaagccccccttccccaaagagatttgttttatttatttgtttactagttttataaataggataataaaatgtgtgtatgaggtcagaatgcttttgacagaagtaatacaaacaaaaaaacctcactataacccaaacaaataagggattatttttccctcctagtgagaagtctggaggtagatattagatgctggtctattgcttcaatgaagttagtgccaaagtctcagtggttctcttggtctttcttcataaccaccggatgctgttatagcttcaccaatcacaacaagcacagtgcttggaacataataggtgctcaataaatattcagtacatattgaatgtgtgcagaaatatatctcaatctagtcataaaattttagaatgcaagatctgaaagggacatgggaatctgtgtttttaacgtgttccaggtgattctgctgaccaggtgagtatggtaaatgtggcaagtattctcaagtgagctcatcagtcccagggctgttagcaccttccatctgccaggccctccctggtctagaccttcagccttgaccttgccctgaaacgccaaactcttactcccagctgctttctctgtccctccacttagatgttagtaggcaccacaaccttttaatgctcaaaatactacttttgagtcctttccaccccttacttggcccctcaattcatactttttgggatggagcctcaaatccagaaatcttctgtattagtccattctcacactgctaataaagaatacctgagactgagtaatttataaaggaaggaggtttaattgattcacagttcagcatggctggggaggcctcaggaaacttacaatcatggcagaaagaaaagcaaacatgcccttcttcacatggtgacaggaagcagaagaatgacaactgagtgaatggggaaaccccttataaagccatcagatctcatgagaactcactcattctcatgagaataacatgggggaaactgcccccattattcaattatcccccatcagttctctcccatgacatgtggggattatgggaactacaatgcaagatgagatttgggtgaagacatagccaaaccatatcatcatcttaaatttctgtgattcttttattctgcacatccaaatccatgagcaagttatactgactttatctctgaatattgaccatgggaggggaacaaggagaagcagtgtgaacaggaaaagcatgctgcctgctgctgtgaataataacatatcttgctctga

SEQ ID NO: 14917 - DNA, 1180 bp, Homo sapiens
  source 1..1180: mol_type = unassigned DNA
gaagtgtgcacgcctgtgacgtcagactccagaccatgtatttcctgactcccatcttggtagccattctctgcattttggttgtgtggatctttaaaaatgccgacagaagcatggagaaaaagaagggggagcctagaaccagggccgaagctcgcccctgggtggatgaagacttaaaagacagcagtgacctgcaccaagcagaagaagatgctgatgaatggcaagaatcagaagaaaatgttgaacacatccccttctctcataaccactatcctgagaaggaaatggttaagaggtctcaggaattttatgaacttctcaataagagacggtcagtcaggttcataagtaatgagcaagtcccaatggaagtcattgataatgtcatcagaacggcaggaacagccccgagtggggctcacacagagccctggaccttcgtggttgtgaaggacccagacgtgaagcacaagattcgaaagatcattgaggaggaagaggagatcaactacatgaaaaggatgggacatcgctgggtcacagacctcaagaaactgagaaccaactggattaaagagtacttggatactgcccctattttgattctcattttcaaacaagtacatggtttcgccgcaaatggcaagaaaaaagtccactactacaatgagatcagtgtttccatcgcttgtggcatcctgctagctgccctgcaggtaaataatggaatcaccatgcggcatcagactgcgaggcaccgccacctgattgagggtcctggaagaagcagcgaagcctgcagcaagctcagctcacaaggctgcccaggtttctactgctagagacatacaaaattcagtatggagtaaaagctatgtcttgaaaaggaccaagatataaaatgacactaaattaaggtgtaaatattttctcaaaaaagtttaagacttggccaggtgcggtggctcacgcctctaatcccagcactttgggaggccaaggcgggcggatcacgaggtcaggagatcgagaccatcctggctaacatggtgaaacccggcctttactaaaaatacaaaaaatgagccaggcgtggtggcgggcgcctgtagtcccagctactcgggaggctgaggcaggagaatggcgtgaacctgggaggcggagcttgcag

SEQ ID NO: 14918 - DNA, 882 bp, Homo sapiens
  source 1..882: mol_type = unassigned DNA
ggcattctccactcctgtctctgtgtgtttaaaaaccggtgtgggaagtgtgcacgcctgtgacgtcagactccagaccatgtatttcctgactcccatcttggtagccattctctgcattttggttgtgtggatctttaaaaatgccgacagaagcatggagaaaaagaagggggagcctagaaccagggccgaagctcgcccctgggtggatgaagacttaaaagacagcagtgacctgcaccaagcagaagaagatgctgatgaatggcaagaatcagaagaaaatgttgaacacatccccttctctcataaccactatcctgagaaggaaatggttaagaggtctcaggaattttatgaacttctcaataagagacggtcagtcaggttcataagtaatgagcaagtcccaatggaagtcattgataatgtcatcagaacggcaggaacagccccgagtggggctcacacagagccctggaccttcgtggttgtgaaggacccagacgtgaagcacaagattcgaaagatcattgaggaggaagaggagatcaactacatgaaaaggatgggacatcgctgggtcacagacctcaagaaactgagaaccaactggattaaagagtacttggatactgcccctattttgattctcattttcaaacaagtacatggtttcgccgcaaatggcaagaaaaaagtccactactacaatgagatcagtgtttccatcgcttgtggcatcctgctagctgccctgcaggtttttggaaaaattatcctgaaggagctggcattgatttccttcctgaatctgtaagcagaatgcaggtctggtgactgtcactaccactcctctcaactgtggccctcgactga

SEQ ID NO: 14919 - DNA, 2158 bp, Homo sapiens
  source 1..2158: mol_type = unassigned DNA
gaagtgtgcacgcctgtgacgtcagactccagaccatgtatttcctgactcccatcttggtagccattctctgcattttggttgtgtggatctttaaaaatgccgacagaagcatggagaaaaagaagggggagcctagaaccagggccgaagctcgcccctgggtggatgaagacttaaaagacagcagtgacctgcaccaagcagaagaagatgctgatgaatggcaagaatcagaagaaaatgttgaacacatccccttctctcataaccactatcctgagaaggaaatggttaagaggtctcaggaattttatgaacttctcaataagagacggtcagtcaggttcataagtaatgagcaagtcccaatggaagtcattgataatgtcatcagaacggcaggaacagccccgagtggggctcacacagagccctggaccttcgtggttgtgaaggacccagacgtgaagcacaagattcgaaagatcattgaggaggaagaggagatcaactacatgaaaaggatgggacatcgctgggtcacagacctcaagaaactgagaaccaactggattaaagagtacttggatactgcccctattttgattctcattttcaaacaagtacatggtttcgccgcaaatggcaagaaaaaagtccactactacaatgagatcagtgtttccatcgcttgtggcatcctgctagctgccctgcaggtaaataatggaatcaccatgcggcatcagactgcgaggcaccgccacctgattgagggtcctggaagaagcagcgaagcctgcagcaagctcagctcacaaggctgcccaggtgcctctgcagcaggcagtctttttcactttgccattgagtttgctgccccctagctttcataaggcataatcccgagagtaggttatgattagtgatggaggaaagaaaaatctccatgaagcccgcatctccagtatggtgactgggtctgataagcgcgccatgcatgtcttgtagaggcagcttccagaacttcctggtcaggtttagaggtggtgatctgattggaaaagctggagaggggcaggcggggaagtgtctggaagctactcattgcttttacttagatgtttgttatttggaggcttggaaagaggtcgatggggtaccccttggccactgagtcccctatcaacgggcatcagcatctcactgggtggggatgctctgcttccatggttggctctgtagtcataggaacttgccgtggtggttgttgtttagaatataatatacaagcctttattaatatattaaataccaagagctagtcgtagctctataattttaaagtagtgatgaatgtaatgatattttaaaatatctataacaactgtaaaatgatatgaaaataactgtggatttcattggtgataaagtcatagatattgctaacactactgtggtttgctgcctacatttataaaggaagaaactgctaaatttcagttagatgttagtgaatatgaaaactttttttttcaaattcaagttcatggacctgctaaattcaatccttggccctttgggggtctgaggattccagttaaaaaaatcctgacctataataagaccaaagtactcacatcgagagagtgaaagataaaataataatagaagtcaacttaacattaataatattaataagaggaattgtttaatatggtctgtgtatttgcaggtttctactgctagagacatacaaaattcagtatggagtaaaagctatgtcttgaaaaggaccaagatataaaatgacactaaattaaggtgtaaatattttctcaaaaaagtttaagacttggccaggtgcggtggctcacgcctctaatcccagcactttgggaggccaaggcgggcggatcacgaggtcaggagatcgagaccatcctggctaacatggtgaaacccggcctttactaaaaatacaaaaaatgagccaggcgtggtggcgggcgcctgtagtcccagctactcgggaggctgaggcaggagaatggcgtgaacctgggaggcggagcttgcagtgagcggagatcccgccactgcactccagcctgggcgacagagcgagactccgtctcaaaaaaaaaaaaaaaaa

SEQ ID NO: 14920 - DNA, 4004 bp, Homo sapiens
  source 1..4004: mol_type = unassigned DNA
tccttctagggaagggctggggaggagggggtggtgacacggtggagacaccggctaggccagggggcctgcccttgggacaggtccagacccatggagccccccgggaggagcagcaggtccacagcgtctcatactctacaccagtattgctgtcctactcaggtccttgactccatgaagcttaccccctcaggcaggctggcagagagcagtgtggagggtgatgccccaggcagtgacctgagcacagcggttgatagtcctgggagccaacccccctaccggctgagccagctgcccccctccagcagccacatggggggcccccctgctggagtgggccttccctgggctcagcgggcacgcctccagccagccagtgtcgccctgaggaagcaggaggaggaggagataaagcgctccaaggccctatcggacagctatgaactctccacagacctgcaggacaagaaggtggaaatgctggagaggaagtatgggggctccttcctgagccgcagggctgccaggaccatccagacagccttccgccagtaccgcatgaacaagaactttgagcggctacgcagctcagcctcagagagccgcatgtcccgccgcatcatcctttccaacatgcggatgcagttctcctttgaggagtatgagaaggcacagaaccccgcgtacttcgagggcaagcctgcctcgctggacgagggtgccatggctggtgcccggagccaccggcttgaacgggggctcccatatggaggctcctgtggtgggggcatcgatggtggtggaagctccgtcaccacatctggagagttttctaatgacatcacagaacttgaggactccttctccaaacaggtaaagtctctggctgaatccatcgacgaagccctgaactgccacccgtcagggcccatgtctgaggagccagggtcagcccagctggagaagcgggagtcaaaggaacagcaagaggacagctcagccacatccttcagtgatcttcccctctacctggatgacacagttccccaacaatcccctgagcgactgcccagcacagaacccccaccccagggccggcccgagttctgggcgccagcccctctcccgccagttcctccaccagtgccatcaggaacccgggaagacggtagccgtgaggaaggcactcgcaggggtcccgggtgcttggagtgccgggatttccggctgcgggctgcccaccttcccctgcttaccattgagcctcctagtgacagctccgtggacctgagtgaccgctcagatcgcggctctgtccaccgccagctggtgtatgaggctgatggctgcagcccccatgggaccctgaagcacaaggggccaccaggcagggccccgatcccacaccgccactacccagcccctgaaggcccagccccagccccaccagggcccctgccaccagcccccaacagtggcactgggcccagtggtgtggctgggggtcggaggttggggaagtgcgaggcagcaggcgagaactctgatggtggagataacgagagccttgagagctccagcaattccaatgagaccatcaactgcagctccggctcctcttctcgggacagtctaagggagcctccggctaccggcctgtgcaagcagacttaccagcgggagacaaggcatagctgggactcgccagctttcaacaatgatgtggtccagaggcggcactaccgaatcggcctcaacctcttcaacaagaagccagagaagggtatccagtatctgatcgagcggggcttcctgtcagacacaccggtgggagtggctcacttcatcctggagcggaaaggcctcagccggcagatgataggggaattcctagggaaccggcagaagcagttcaacagagacgtgttggactgtgtggtggatgagatggacttctcctccatggatctggatgatgcgctccggaagttccagtcccatatccgggttcagggtgaggcccagaaagtggagcgactcatcgaagccttcagccagcggtactgtgtctgtaacccagccctcgtgcgccagttccggaacccagacaccatcttcatccttgcttttgccatcatcctcctcaataccgacatgtacagtcccagcgtcaaagctgaacgaaagatgaaactagatgacttcatcaagaacctgagaggggttgacaatggtgaagacatcccccgagacctcctggtgggcatctaccagcgcatccaggggcgtgaactgcggaccaacgatgaccatgtgtcccaggtgcaggctgtggagcgcatgattgttggaaagaaaccagtcctgtctctccctcaccgtcgactggtttgctgctgccagctctacgaggtgccagatccaaaccgcccccagaggctagggttgcatcagcgggaggtcttcctcttcaatgatctccttgtggtcaccaaaattttccagaagaagaagatcttggtgacgtacagtttccgtcagtctttccccctcgtggaaatgcacatgcagctcttccagaattcatattaccagtttgggatcaagttgctgtctgcagtacctggtggggagcgaaaagtcctcatcatcttcaatgcccccagcctccaggaccggctgcgctttacatccgacctgcgcgagtccattgcggaggtgcaggagatggagaaataccgtgtggagtcggagctggagaagcagaaaggtatgatgcggcctaacgcctcacagcctggaggggccaaggactcagtgaatgggacgatggcccgcagtagcctggaggacacttacggggcaggcgatgggctcaaacggggcgcactcagcagttccctgcgagacctctctgatgcaggggtctgttattagcagtccacgccctcaccagaggatgccacctccgcccccacccccgccgccagaggagtacaagagccagaggcccgtctccaactcctcatccttcctgggctccctatttggaagcaagcggggcaaggggcccttccagatgccaccaccgccaacaggccaggcctctgcctcctcttcatctgcttcttccacgcaccaccaccaccaccaccaccatcatggccatagccacggtggcctgggggtgctgcctgatgggcagtccaagctccaggccctgcatgcccagtattgccaaggaccgggccctgccccgccaccctacctcccaccccagcagccctctcttcccccacctccccagcagcccccacccttgccccagctgggctccattccaccgcctcccgcctcagccccacctgtggggccacatcgccacttccacgcccatggcccagtcccagggccccaacactataccttgggccggccaggcagggcacccagacggggggctggaggacaccctcagtttgctccacatggccgccaccccctgcaccagcccacatccccactgcccctgtacagtcctgccccccagcaccctccagcccacaaacagggccctaagcacttcatcttcagccaccacccacagatgatgccagcagcaggcgcggctgggggccctggatcccggccaccagggggctcctactcccacccccaccacccccagtcaccattgtcaccacactcacccatcccaccccacccctcctatccacccctccccccaccctcccctcacaccccgcactcaccccttccacccacctccccccatggcccgctgcacgcctctgggccccctggcacagccaacccccccagtgcaaaccccaaggccaagccaagccggatcagcaccgtggtctgatgaatggagagagtgagctggggaacaggaaagtctggggagccacaggagagggaccttgcaccctctttgcttcctcggttttttcaaaaatatatatacacatagc

SEQ ID NO: 14921 - DNA, 5980 bp, Homo sapiens
  source 1..5980: mol_type = unassigned DNA
cggcagcctcagctcctgctccccgtgccgccggccccagcgctgtctcccgggccccctagggcccccgggccctcaagcccggtgcgcgccctcgcgtcccgccggccccctcccccggctgggcccgggggagggtggcgccgtgagagagcggggacagggctctcctgcccgttcccctgcccctgggccgccaggatggaggcggggtcggggcccccgggcggcccgggatccgagagcccaaatcgggccgtggagtacctgctggagctgaacaacatcatcgagagccagcagcagctgctggaaacccagcggcggcgcatcgaggagctggagggccagctggaccagctcacccaggagaaccgcgacctgcgagaggagagccagctgcaccgcggggagctgcaccgggacccccacggcgcgcgggatagcccgggccgcgagagccagtaccagaacctgcgcgagacccagttccaccaccgcgagctgcgggagagccagttccaccaggcggcccgggacgtgggctacccgaaccgggaaggcgcctaccagaatcgggaggctgtgtatcgggacaaggagcgggacgcctcctacccgctccaggacactaccggttacacagcccgcgagcgtgacgtggcccagtgccacctgcaccacgagaacccagccctgggtcgcgagcgtggcgggcgggaggccgggccggcgcacccgggccgcgagaaggaagcgggctattcggcggcggtgggcgtggggccgcggccaccgcgggagcggggccagctgagccgtggcgcatccaggagctccagtcccggcgccggcggaggccacagcaccagtaccagcaccagcccggccacgaccctccagagaaatgtggagggtgatgccccaggcagtgacctgagcacagcggttgatagtcctgggagccaacccccctaccggctgagccagctgcccccctccagcagccacatggggggcccccctgctggagtgggccttccctgggctcagcgggcacgcctccagccagccagtgtcgccctgaggaagcaggaggaggaggagataaagcgctccaaggccctatcggacagctatgaactctccacagacctgcaggacaagaaggtggaaatgctggagaggaagtatgggggctccttcctgagccgcagggctgccaggaccatccagacagccttccgccagtaccgcatgaacaagaactttgagcggctacgcagctcagcctcagagagccgcatgtcccgccgcatcatcctttccaacatgcggatgcagttctcctttgaggagtatgagaaggcacagaaccccgcgtacttcgagggcaagcctgcctcgctggacgagggtgccatggctggtgcccggagccaccggcttgaacgggggctcccatatggaggctcctgtggtgggggcatcgatggtggtggaagctccgtcaccacatctggagagttttctaatgacatcacagaacttgaggactccttctccaaacaggtaaagtctctggctgaatccatcgacgaagccctgaactgccacccgtcagggcccatgtctgaggagccagggtcagcccagctggagaagcgggagtcaaaggaacagcaagaggacagctcagccacatccttcagtgatcttcccctctacctggatgacacagttccccaacaatcccctgagcgactgcccagcacagaacccccaccccagggccggcccgagttctgggcgccagcccctctcccgccagttcctccaccagtgccatcaggaacccgggaagacggtagccgtgaggaaggcactcgcaggggtcccgggtgcttggagtgccgggatttccggctgcgggctgcccaccttcccctgcttaccattgagcctcctagtgacagctccgtggacctgagtgaccgctcagatcgcggctctgtccaccgccagctggtgtatgaggctgatggctgcagcccccatgggaccctgaagcacaaggggccaccaggcagggccccgatcccacaccgccactacccagcccctgaaggcccagccccagccccaccagggcccctgccaccagcccccaacagtggcactgggcccagtggtgtggctgggggtcggaggttggggaagtgcgaggcagcaggcgagaactctgatggtggagataacgagagccttgagagctccagcaattccaatgagaccatcaactgcagctccggctcctcttctcgggacagtctaagggagcctccggctaccggcctgtgcaagcagacttaccagcgggagacaaggcatagctgggactcgccagctttcaacaatgatgtggtccagaggcggcactaccgaatcggcctcaacctcttcaacaagaagccagagaagggtatccagtatctgatcgagcggggcttcctgtcagacacaccggtgggagtggctcacttcatcctggagcggaaaggcctcagccggcagatgataggggaattcctagggaaccggcagaagcagttcaacagagacgtgttggactgtgtggtggatgagatggacttctcctccatggatctggatgatgcgctccggaagttccagtcccatatccgggttcagggtgaggcccagaaagtggagcgactcatcgaagccttcagccagcggtactgtgtctgtaacccagccctcgtgcgccagttccggaacccagacaccatcttcatccttgcttttgccatcatcctcctcaataccgacatgtacagtcccagcgtcaaagctgaacgaaagatgaaactagatgacttcatcaagaacctgagaggggttgacaatggtgaagacatcccccgagacctcctggtgggcatctaccagcgcatccaggggcgtgaactgcggaccaacgatgaccatgtgtcccaggtgcaggctgtggagcgcatgattgttggaaagaaaccagtcctgtctctccctcaccgtcgactggtttgctgctgccagctctacgaggtgccagatccaaaccgcccccagaggctagggttgcatcagcgggaggtcttcctcttcaatgatctccttgtggtcaccaaaattttccagaagaagaagatcttggtgacgtacagtttccgtcagtctttccccctcgtggaaatgcacatgcagctcttccagaattcatattaccagtttgggatcaagttgctgtctgcagtacctggtggggagcgaaaagtcctcatcatcttcaatgcccccagcctccaggaccggctgcgctttacatccgacctgcgcgagtccattgcggaggtgcaggagatggagaaataccgtgtggagtcggagctggagaagcagaaaggtatgatgcggcctaacgcctcacagcctggaggggccaaggactcagtgaatgggacgatggcccgcagtagcctggaggacacttacggggcaggcgatgggctcaaacggggcgcactcagcagttccctgcgagacctctctgatgcagggaagcgggggcggcgtaacagcgtgggatcgctggacagcaccatcgaagggtctgttattagcagtccacgccctcaccagaggatgccacctccgcccccacccccgccgccagaggagtacaagagccagaggcccgtctccaactcctcatccttcctgggctccctatttggaagcaagcggggcaaggggcccttccagatgccaccaccgccaacaggccaggcctctgcctcctcttcatctgcttcttccacgcaccaccaccaccaccaccaccatcatggccatagccacggtggcctgggggtgctgcctgatgggcagtccaagctccaggccctgcatgcccagtattgccaaggaccgggccctgccccgccaccctacctcccaccccagcagccctctcttcccccacctccccagcagcccccacccttgccccagctgggctccattccaccgcctcccgcctcagccccacctgtggggccacatcgccacttccacgcccatggcccagtcccagggccccaacactataccttgggccggccaggcagggcacccagacggggggctggaggacaccctcagtttgctccacatggccgccaccccctgcaccagcccacatccccactgcccctgtacagtcctgccccccagcaccctccagcccacaaacagggccctaagcacttcatcttcagccaccacccacagatgatgccagcagcaggcgcggctgggggccctggatcccggccaccagggggctcctactcccacccccaccacccccagtcaccattgtcaccacactcacccatcccaccccacccctcctatccacccctccccccaccctcccctcacaccccgcactcaccccttccacccacctccccccatggcccgctgcacgcctctgggccccctggcacagccaacccccccagtgcaaaccccaaggccaagccaagccggatcagcaccgtggtctgatgaatggagagagtgagctggggaacaggaaagtctggggagccacaggagagggaccttgcaccctctttgcttcctcggttttttcaaaaatatatatacacatagcaatgtcctcctccccatgtcctccctgccttgggacccgtcctctcacccccagcagttgccatggggtttccttccagattcgaggatccttgccacttgaagcctggactcagggtgctccagcgctggggagtggtgagggccttccagagatcctcgtactctttctcccgtcttcttcttccccacttttccctggaggtctagctctgtggcctcagacctctgggcctgtgtgagctctctgtgagctctggctggcggagaagggcaggtgtccggagctgtcggggtgaaggcttccctggggctcctctggccgtgtggggctaggagagcgctctgtagagttgtggccaaacttcagctggcttggccctctctctgacctcagggcctggccacacacttccatgtgtctttttgcctgctggaggacacggaccattgatgcacttggtgggtgggaccctgcttgtgttggccccacgtggggcagtgcttcctctctcgagccagtctatgccctttctccagtaggccccagcccagacctcttcggcttcaggaacttgcctcgccctgcaacgttcttatcctgatcaaagtccagacaggttttggggggggctcaggtctgggatgagaagggcactgccctccctcacccatattgcatgcccccccgccattcccttacacctaccccacctacaactgaagacaatgcactttacagatatcacccacacacacctcgctggggcaggggcacccagcatcagccctggggagagaggctcccaaagggccaccatgagcccaagatatccttcctgaggcagagattgaagccatcagagctggggttgggagccagaatgcctgagtccttctgtccgtcagaatctccgctgcctctccagcccttttgcagccctgtttatttattataaatatattttttacaagccccagctcctcttcttgccccgcatatccagctcctcactcagctcctgcctccctctcccctctccaccatgggctgcagtatagacagacagatggaccctggctgtacgaagggccagggccactggggcttgggggcgggggagggtggcagtgggaggggctgtatggagaggagctggggttcaggcattgtcttttttcctccttgtatataagaatgtatatttgatgcctcataaaagaccttgtgctc

SEQ ID NO: 14922 - DNA, 6011 bp, Homo sapiens
  source 1..6011: mol_type = unassigned DNA
cggcagcctcagctcctgctccccgtgccgccggccccagcgctgtctcccgggccccctagggcccccgggccctcaagcccggtgcgcgccctcgcgtcccgccggccccctcccccggctgggcccgggggagggtggcgccgtgagagagcggggacagggctctcctgcccgttcccctgcccctgggccgccaggatggaggcggggtcggggcccccgggcggcccgggatccgagagcccaaatcgggccgtggagtacctgctggagctgaacaacatcatcgagagccagcagcagctgctggaaacccagcggcggcgcatcgaggagctggagggccagctggaccagctcacccaggagaaccgcgacctgcgagaggagagccagctgcaccgcggggagctgcaccgggacccccacggcgcgcgggatagcccgggccgcgagagccagtaccagaacctgcgcgagacccagttccaccaccgcgagctgcgggagagccagttccaccaggcggcccgggacgtgggctacccgaaccgggaaggcgcctaccagaatcgggaggctgtgtatcgggacaaggagcgggacgcctcctacccgctccaggacactaccggttacacagcccgcgagcgtgacgtggcccagtgccacctgcaccacgagaacccagccctgggtcgcgagcgtggcgggcgggaggccgggccggcgcacccgggccgcgagaaggaagcgggctattcggcggcggtgggcgtggggccgcggccaccgcgggagcggggccagctgagccgtggcgcatccaggagctccagtcccggcgccggcggaggccacagcaccagtaccagcaccagcccggccacgaccctccagagaaaatctgatggtgagaattccagaacagtcagtgtggagggtgatgccccaggcagtgacctgagcacagcggttgatagtcctgggagccaacccccctaccggctgagccagctgcccccctccagcagccacatggggggcccccctgctggagtgggccttccctgggctcagcgggcacgcctccagccagccagtgtcgccctgaggaagcaggaggaggaggagataaagcgctccaaggccctatcggacagctatgaactctccacagacctgcaggacaagaaggtggaaatgctggagaggaagtatgggggctccttcctgagccgcagggctgccaggaccatccagacagccttccgccagtaccgcatgaacaagaactttgagcggctacgcagctcagcctcagagagccgcatgtcccgccgcatcatcctttccaacatgcggatgcagttctcctttgaggagtatgagaaggcacagaaccccgcgtacttcgagggcaagcctgcctcgctggacgagggtgccatggctggtgcccggagccaccggcttgaacgggggctcccatatggaggctcctgtggtgggggcatcgatggtggtggaagctccgtcaccacatctggagagttttctaatgacatcacagaacttgaggactccttctccaaacaggtaaagtctctggctgaatccatcgacgaagccctgaactgccacccgtcagggcccatgtctgaggagccagggtcagcccagctggagaagcgggagtcaaaggaacagcaagaggacagctcagccacatccttcagtgatcttcccctctacctggatgacacagttccccaacaatcccctgagcgactgcccagcacagaacccccaccccagggccggcccgagttctgggcgccagcccctctcccgccagttcctccaccagtgccatcaggaacccgggaagacggtagccgtgaggaaggcactcgcaggggtcccgggtgcttggagtgccgggatttccggctgcgggctgcccaccttcccctgcttaccattgagcctcctagtgacagctccgtggacctgagtgaccgctcagatcgcggctctgtccaccgccagctggtgtatgaggctgatggctgcagcccccatgggaccctgaagcacaaggggccaccaggcagggccccgatcccacaccgccactacccagcccctgaaggcccagccccagccccaccagggcccctgccaccagcccccaacagtggcactgggcccagtggtgtggctgggggtcggaggttggggaagtgcgaggcagcaggcgagaactctgatggtggagataacgagagccttgagagctccagcaattccaatgagaccatcaactgcagctccggctcctcttctcgggacagtctaagggagcctccggctaccggcctgtgcaagcagacttaccagcgggagacaaggcatagctgggactcgccagctttcaacaatgatgtggtccagaggcggcactaccgaatcggcctcaacctcttcaacaagaagccagagaagggtatccagtatctgatcgagcggggcttcctgtcagacacaccggtgggagtggctcacttcatcctggagcggaaaggcctcagccggcagatgataggggaattcctagggaaccggcagaagcagttcaacagagacgtgttggactgtgtggtggatgagatggacttctcctccatggatctggatgatgcgctccggaagttccagtcccatatccgggttcagggtgaggcccagaaagtggagcgactcatcgaagccttcagccagcggtactgtgtctgtaacccagccctcgtgcgccagttccggaacccagacaccatcttcatccttgcttttgccatcatcctcctcaataccgacatgtacagtcccagcgtcaaagctgaacgaaagatgaaactagatgacttcatcaagaacctgagaggggttgacaatggtgaagacatcccccgagacctcctggtgggcatctaccagcgcatccaggggcgtgaactgcggaccaacgatgaccatgtgtcccaggtgcaggctgtggagcgcatgattgttggaaagaaaccagtcctgtctctccctcaccgtcgactggtttgctgctgccagctctacgaggtgccagatccaaaccgcccccagaggctagggttgcatcagcgggaggtcttcctcttcaatgatctccttgtggtcaccaaaattttccagaagaagaagatcttggtgacgtacagtttccgtcagtctttccccctcgtggaaatgcacatgcagctcttccagaattcatattaccagtttgggatcaagttgctgtctgcagtacctggtggggagcgaaaagtcctcatcatcttcaatgcccccagcctccaggaccggctgcgctttacatccgacctgcgcgagtccattgcggaggtgcaggagatggagaaataccgtgtggagtcggagctggagaagcagaaaggtatgatgcggcctaacgcctcacagcctggaggggccaaggactcagtgaatgggacgatggcccgcagtagcctggaggacacttacggggcaggcgatgggctcaaacggggcgcactcagcagttccctgcgagacctctctgatgcagggaagcgggggcggcgtaacagcgtgggatcgctggacagcaccatcgaagggtctgttattagcagtccacgccctcaccagaggatgccacctccgcccccacccccgccgccagaggagtacaagagccagaggcccgtctccaactcctcatccttcctgggctccctatttggaagcaagcggggcaaggggcccttccagatgccaccaccgccaacaggccaggcctctgcctcctcttcatctgcttcttccacgcaccaccaccaccaccaccaccatcatggccatagccacggtggcctgggggtgctgcctgatgggcagtccaagctccaggccctgcatgcccagtattgccaaggaccgggccctgccccgccaccctacctcccaccccagcagccctctcttcccccacctccccagcagcccccacccttgccccagctgggctccattccaccgcctcccgcctcagccccacctgtggggccacatcgccacttccacgcccatggcccagtcccagggccccaacactataccttgggccggccaggcagggcacccagacggggggctggaggacaccctcagtttgctccacatggccgccaccccctgcaccagcccacatccccactgcccctgtacagtcctgccccccagcaccctccagcccacaaacagggccctaagcacttcatcttcagccaccacccacagatgatgccagcagcaggcgcggctgggggccctggatcccggccaccagggggctcctactcccacccccaccacccccagtcaccattgtcaccacactcacccatcccaccccacccctcctatccacccctccccccaccctcccctcacaccccgcactcaccccttccacccacctccccccatggcccgctgcacgcctctgggccccctggcacagccaacccccccagtgcaaaccccaaggccaagccaagccggatcagcaccgtggtctgatgaatggagagagtgagctggggaacaggaaagtctggggagccacaggagagggaccttgcaccctctttgcttcctcggttttttcaaaaatatatatacacatagcaatgtcctcctccccatgtcctccctgccttgggacccgtcctctcacccccagcagttgccatggggtttccttccagattcgaggatccttgccacttgaagcctggactcagggtgctccagcgctggggagtggtgagggccttccagagatcctcgtactctttctcccgtcttcttcttccccacttttccctggaggtctagctctgtggcctcagacctctgggcctgtgtgagctctctgtgagctctggctggcggagaagggcaggtgtccggagctgtcggggtgaaggcttccctggggctcctctggccgtgtggggctaggagagcgctctgtagagttgtggccaaacttcagctggcttggccctctctctgacctcagggcctggccacacacttccatgtgtctttttgcctgctggaggacacggaccattgatgcacttggtgggtgggaccctgcttgtgttggccccacgtggggcagtgcttcctctctcgagccagtctatgccctttctccagtaggccccagcccagacctcttcggcttcaggaacttgcctcgccctgcaacgttcttatcctgatcaaagtccagacaggttttggggggggctcaggtctgggatgagaagggcactgccctccctcacccatattgcatgcccccccgccattcccttacacctaccccacctacaactgaagacaatgcactttacagatatcacccacacacacctcgctggggcaggggcacccagcatcagccctggggagagaggctcccaaagggccaccatgagcccaagatatccttcctgaggcagagattgaagccatcagagctggggttgggagccagaatgcctgagtccttctgtccgtcagaatctccgctgcctctccagcccttttgcagccctgtttatttattataaatatattttttacaagccccagctcctcttcttgccccgcatatccagctcctcactcagctcctgcctccctctcccctctccaccatgggctgcagtatagacagacagatggaccctggctgtacgaagggccagggccactggggcttgggggcgggggagggtggcagtgggaggggctgtatggagaggagctggggttcaggcattgtcttttttcctccttgtatataagaatgtatatttgatgcctcataaaagaccttgtgctca

SEQ ID NO: 14923 - DNA, 6863 bp, Homo sapiens
  source 1..6863: mol_type = unassigned DNA
atggagagcctgctggagaatccggtgcgcgccgtgctctacctcaaggagctcacggccatcgtgcagaaccagcagagcctcatccacacccagcgagagcgtatcgacgagctggagcggcggctggacgagctgagcgctgagaaccgcagcctgtgggagcaccagcagctgctgcaagcccagcctccgcccgggctcgtccccccgtcatcggccccgctgccggccgctccggccaccgctcctgccgccgccgccagggcccaggaacctctccaggaccagggacagcgctcagcagccgcgccgcatcccgcgcccgatcggccgccgcgtcagcaccacggacagctcctggagcagccccagcggggccctggcagcagggctcacacaccccagtcgccccacaagcatctggggacacaaggggccgtgactgacaaggagaaggagcgtcccccgagttgctgcgctgctgccggagccctccttcagcacaaatccccctccgccctcggcaagggcgtcctgagcaggagacctgagaatgagaccgtgctgcaccagttctgctgcccagccgccgacgcctgctccgacctggcctcccaaagtgatggctcctgcacccaggccggtgggggcatggaggactccgtggtggcagcggcggcggtggcagccggcagacccagtgcccatgccccgaaggctcaagcccaggagctgcaggaggaggaggagcggccgggggcaggggctgcctccccaagggctggcccccagcacaaggcctcccccggccggcagcagcctgccctggcgacggcgctgtgcccccacgcccctgccgcctccgattacgaactctcccttgacctaaagaataaacagattgaaatgctagaacataagtacggcggtcacctggtgtcccggcgcgccgcttgcaccatccaaaccgccttccgccaataccagctcagcaagaacttcgagaaaatccgcaactcgcttctggagagccgcctgccacggcggatctccctgcgcaaggtgcggtcacccacggccgagagcctggcggccgagaaagcgctcatggagggctacggcctcgtggggctgccgctggtgcgctcgccctccctgccgcccaccttcgcaggcaccctcaccgagctggaggactccttcaccgagcaggtgcaatccctggccaagtccatcgacgacgcgctcagcacgtggagcctcaagaccatgtgctccctgcgggagagtggcgcttaccagctccaccaggccctgcaggcggccgcggggcccccaggcctggaggccgaggggcgggcgccggagagcgcgggccccgggcccggggatgacgccgcggagacccccggcctgcccccggcccacagcgggaccctcatgatggctttccgggacgtcacggtgcagatcgccaaccagaacatatccgtctcctcctccacggctctgtcggtggccaactgcctgggcgctcagacggtccaggcccccgcagagcccgcggcgggcaaggccgagcagggcgagacctctgggcgggaggccccggaagcccccgccgtgggccgggaggacgcgtcagccgaggactcatgcgcagaggctgcggctagtggggcggcggatggggccacagcccccaaaacagaggaggaagaggaggaggaggagacggcggaggtggggagaggggccgaggccgaggcaggcgacttggagcagctgagcagcagcagcacgtccaccaagtccgccaagtcaggctcggaggcgtcggcctccgcctccaaggacgccctgcaggccatgatcctgagcctgccgcgctaccactgcgagaacccagccagctgcaagtcgcccacgctctccaccgacaccctgcgcaagcggctctaccgcatcggcctcaacctcttcaacataaaccccgacaagggcatccagttcctgatctcacgcggcttcatcccggacacccccatcggtgtggcccatttcctcctccagcgaaagggcctcagccgccagatgattggagagttcctgggcaacagcaagaagcagttcaaccgcgacgtgctggactgcgtggtggacgagatggacttctccagcatggagctggacgaggccctgcgcaagttccaggcacacatccgtgtgcagggggaggctcagaaggtggagcggctcattgaggccttcagccagcgctactgcatgtgcaaccccgaagtggttcagcagttccacaaccccgacaccatcttcatcctcgccttcgccatcatcctcctcaacaccgacatgtacagccccaacatcaagcctgaccggaagatgatgctggaggacttcatccgaaaccttcgaggtgtggacgatggcgctgacatccccagggagctggtggtaggcatctatgagaggatacagcagaaggagctcaagtccaatgaggaccacgtcacgtacgtcaccaaggtggagaagtccattgtgggcatgaagacagtgctgtccgtgccccaccgccgcctggtgtgctgcagccggctcttcgaggtgacggatgtgaacaagctgcagaagcaggcagcgcatcagagggaggtgttcctcttcaatgacctgctggtgattctcaaactttgcccgaagaagaagagctcctccacgtacaccttttgcaagtcagttggcctgctgggcatgcagttccagctctttgagaacgagtattactctcatggcatcacactggtgaccccgctctcgggctccgagaagaagcaggtgctgcatttctgtgccctgggctcggacgagatgcagaagttcgtggaggacctgaaggagtccattgctgaggtgacggagctggagcagatccgaatagagtgggagctggagaagcagcagggaacaaagacactctccttcaagccctgcggagcccagggggacccacagtcaaagcaaggatcgccgacagccaaaagggaagccgcgctcagggagaggccggcggagagcacggtggaggtgtcaattcacaacaggcttcaaacgtcccagcacaactccgggctgggggccgagaggggagcgccggtgccgccgccagacctgcagcctagccccccgagacagcagaccccaccactgccgccgccgccacccacgcccccgggcaccctggtgcagtgccagcaaattgtcaaggtcattgtcctggacaagccctgcctggcccgcatggagcccctgctgagccaggctctctcctgctacacctcgtcgtcctctgactcctgcggctccacacccctgggcggtcccggctctccggtcaaggtcacccaccagcctccgctgcccccgcccccacccccctacaaccaccctcaccagttctgtcccccaggctccctgctgcacgggcaccgctactccagtggctcaaggagcctggtgtagactctgccccaccaccctgctgtcctgggagggctggccactggggggcctgggctgcccctccactgctccccataccctggcacgatgcgttcctggtcactgatcaccatcattttgggaagagaatcccaatccctggcacctgggtttgcctcatccaaccatccttccctttctcagctgcaccccctctgcagatctgaagacacacctcactctcccagggccctacacagccagacccggcgaggcctcctcttcccctggccaccactttcccccattggaccatggactgaagaaaacgagctgagggtctaacgagcttgcaggctttgagtctgttagtgcccggggcctcgggccttgggcagcagcatgaggctgggccggccggcagtggagcactagacagagtggctggctcgcagcccagaactagtgcctctgtagctgcactgaggggaggagggttggtcccacccctggagggacaggtgggaggagtgaggagggggctttttctgccacccccgcccccaagcctgaaactctcaggagtctacttcttggtccccagggacattggctgtcctgaccatgtccttccccctcctcccagggcctctgcttcctcaggagctgcccagactccagaaaagcctggaaaaagggaggcgggaaggggagcactttcggctttctataggtcagtccagcagggccacgggatcgcgaggtcatgtatctgcaaaatgcacctttttaaagagtgtcttagttccccagccccagctaatacccggccaatgccgtgtacgcaccggcatgtgcacgcaaacacgcatgagaaccaggccattccttccgctgtggaagcagaactggagacggggcaggaatgtgcccagcagagatggggctcagcccgaggcagggctccctcctgcatgaggctcggcccgaggcagggctccctcctgcatgagtctgtggcctccaggagggacttgggtgcagatgtaagcaagaaaaaccggggctccagaggcatgtgcatttcccctgcgcccctcagcctttaaatattccctcctcctagaaggttctagaccccccccttccagcaggggtgcccaagagtccctggaccctcaaaattgcaaaggagacccaagcggggctcgctgacctcccagggcccagcaagatgggatagccagccttaggtggccccacgagcccaagcctggggaagggcccctccccagccagacgagaggcagccaccccagagaccacaggagccgtaccatggcctgcgcagtcaggccctatcaggatgtgtctgtcccaagcctggccaggctccagtcctgtgccagtagctcactgctgtcctatgtgcaggtcccccaacacttggagcctgtggttaaggcctcctgggagaggcagtgagcatgagtcaaaggtgacatggacttgaatctccccaccccgccccgcctgcagtagccgggccaggtaggaggcaaggatcattccctgctcccagaggttccagatgacctagtttcgttttgtgtgtgtgtgtgtgtggtcacccagacgtcactgtgatatcacctagtgaatctatttctggccctgtcttcgtcggcccagtttctgtaacttgcagccaatttgccctctcccctgtggctgccagcccatctgcccctctgtgtccttgctgccctggccctcctctgttttctgtaacagatgctccagtcattgcctttcagagtggagcagatgacagatggggtgcacgcattcagacacctctgatgcccttagccagggcagggatcgtccttaaagtgaaggcctggacaggaggagtcagggacttgggaggaggtggagctgtggggatgggagtggaggaatcaaaatgagggaagctgaaaatagaatgaaaacgatgactaagaggcagggagtgcgaggtatgggggaataggaactatgagctaaatatacttatggggtgggggccgtgggggccagggacactctcccagacagccctgacccgccaggcaggaccccgtcccctgctcacacagctcttcaaacttaccaaggacaggcaggaccccgtcccctgctcacacagctcttcaagcttaccaagtcccctgttgagggcacagcaaccccaggccctccctcccacctcagctgaagccccaatcttccaaatcggaaccagcaagtcttagggctggcacgcatctgggcctctagctgagaacccggactctcaggcacctcagtgcccctgccccagggcagaggcccaccccgtgggttggtgcagtggctgccctgggctccacgggcagcacagggagtctgtccaggaagcagcccagccggggtcagtattccgtggagccagtcctgagctgggaggggcatttaacacccctgagggcctggggcaggacacagctggccctcctcattgtcaggggaagcaagtgcccaacatctgtaacctcccttccctgctcagtccccaggccaaggttgggacccctctccatccctgtccccagagcctagacctcagggacctaggaaaagcctcctgctccctccccacggcagcagacagggcagggcctccagcccccagagggccggtggggggtgctctcgggccttcctgctctcctaaggttgcggggacagtagagtgctgagccccagacccagtcaccccaagatggccccactctatccactctctagacctttgggaaatctgggtccctctcctgatttgatccattcggccccaactccagagtcgggaatgggagatgaaactagttttccacccacttttggacaagtcccacccctagatctgaagcaagctctaccagcagcgtgtcctggaagcctgcctgcctgcctgcccgtctgcacaggtgtcttgatccagccctgcgtcttcgagcccctgtgccaccggtccccacggcccgccaggagtctctttgtacccactaggcttccctgatgaccatctgtctgtccgtccctgtttttgctgtacataactcctgctgcaccctctccccgcacacccgtcacccatgagagagagaaacctctctagggaaaggcagggtggctgcacccagcaactaatccaaatggcaaatattttgtaacaaaatagcccagaggtattttatctgttcaattcatagagttttagagattatattgaaagatgtcacttg

SEQ ID NO: 14924 - DNA, 2701 bp, Homo sapiens
  source 1..2701: mol_type = unassigned DNA
aagcccctccccttctctgggccttgatttcccctcctgctcagtggggacgttcttggtcctccttcttgcccactctacccagtcgccgagtctggcgaagcagagctgtctgggggtcaccgcagcaggagggaccgagcttagatacgaaaaaagacttctacacggcaagagccacagaaaggacgctccagctggctcagcagaggggcatctctccctttcaagaacaaaaggtggcaggtacccgggggccctggggcagaacgaggtaaattctgcacggacttccacatctaagaccccagaaatctccagccggctccctccgaccgaatgagaccgtgctgcaccagttctgctgcccagccgccgacgcctgctccgacctggcctcccaaagattgaaatgctagaacataagtacggcggtcacctggtgtcccggcgcgccgcttgcaccatccaaaccgccttccgccaataccagctcagcaagaacttcgagaaaatccgcaactcgcttctggagagccgcctgccacggcggatctccctgcgcaaggtgcggtcacccacggccgagagcctggcggccgagaaagcgctcatggagggctacggcctcgtggggctgccgctggtgcgctcgccctccctgccgcccaccttcgcaggcaccctcaccgagctggaggactccttcaccgagcaggtgcaatccctggccaagtccatcgacgacgcgctcagcacgtggagcctcaagaccatgtgctccctgcgggagagtggcgcttaccagctccaccaggccctgcaggcggccgcggggcccccaggcctggaggccgaggggcgggcgccggagagcgcgggccccgggcccggggatgacgccgcggagacccccggcctgcccccggcccacagcgggaccctcatgatggctttccgggacgtcacggtgcagatcgccaaccagaacatatccgtctcctcctccacggctctgtcggtggccaactgcctgggcgctcagacggtccaggcccccgcagagcccgcggcgggcaaggccgagcagggcgagacctctgggcgggaggccccggaagcccccgccgtgggccgggaggacgcgtcagccgaggactcatgcgcagaggctgcggctagtggggcggcggatggggccacagcccccaaaacagaggaggaagaggaggaggaggagacggcggaggtggggagaggggccgaggccgaggcaggcgacttggagcagctgagcagcagcagcacgtccaccaagtccgccaagtcaggctcggaggcgtcggcctccgcctccaaggacgccctgcaggccatgatcctgagcctgccgcgctaccactgcgagaacccagccagctgcaagtcgcccacgctctccaccgacaccctgcgcaagcggctctaccgcatcggcctcaacctcttcaacataaaccccgacaagggcatccagttcctgatctcacgcggcttcatcccggacacccccatcggtgtggcccatttcctcctccagcgaaagggcctcagccgccagatgattggagagttcctgggcaacagcaagaagcagttcaaccgcgacgtgctggactgcgtggtggacgagatggacttctccagcatggagctggacgaggccctgcgcaagttccaggcacacatccgtgtgcagggggaggctcagaaggtggagcggctcattgaggccttcagccagcgctactgcatgtgcaaccccgaagtggttcagcagttccacaaccccgacaccatcttcatcctcgccttcgccatcatcctcctcaacaccgacatgtacagccccaacatcaagcctgaccggaagatgatgctggaggacttcatccgaaaccttcgaggtgtggacgatggcgctgacatccccagggagctggtggtaggcatctatgagaggatacagcagaaggagctcaagtccaatgaggaccacgtcacgtacgtcaccaaggtggagaagtccattgtgggcatgaagacagtgctgtccgtgccccaccgccgcctggtgtgctgcagccggctcttcgaggtgacggatgtgaacaagctgcagaagcaggcagcgcatcagagggaggtgttcctcttcaatgacctgctggtgattctcaaactttgcccgaagaagaagagctcctccacgtacaccttttgcaagtcagttggcctgctgggcatgcagttccagctctttgagaacgagtattactctcatggcatcacactggtgaccccgctctcgggctccgagaagaagcaggtgctgcatttctgtgccctgggctcggacgagatgcagaagttcgtggaggacctgaaggagtccattgctgaggtgacggagctggagcagatccgaatagagtgggagctggagaagcagcagggaacaaagacactctccttcaagccctgcggagcccagggggacccacagtcaaagcaaggatcgccgacagccaaaagggaagccgcgctcagggagaggccggcggagagcacggtggaggtattaatcaatgcctccccagcccgactcaccattttaccaatttcaagagatacaattaaaagttactgctagcatgggtaa

SEQ ID NO: 14925 - DNA, 7094 bp, Homo sapiens
  source 1..7094: mol_type = unassigned DNA
ggaggctgggccggtgggagagggaggcgagccgaccgctgggctgctgggctcccgcgccctcgcgctccccgccgccagcccaggcgcaggcagggcgcaggcggcggcgggcggcatggagagcctgctggagaatccggtgcgcgccgtgctctacctcaaggagctcacggccatcgtgcagaaccagcagagcctcatccacacccagcgagagcgtatcgacgagctggagcggcggctggacgagctgagcgctgagaaccgcagcctgtgggagcaccagcagctgctgcaagcccagcctccgcccgggctcgtccccccgtcatcggccccgctgccggccgctccggccaccgctcctgccgccgccgccagggcccaggaacctctccaggaccagggacagcgctcagcagccgcgccgcatcccgcgcccgatcggccgccgcgtcagcaccacggacagctcctggagcagccccagcggggccctggcagcagggctcacacaccccagtcgccccacaagcatctggggacacaaggggccgtgactgacaaggagaaggagcgtcccccgagttgctgcgctgctgccggagccctccttcagcacaaatccccctccgccctcggcaagggcgtcctgagcaggagacctgagaatgagaccgtgctgcaccagttctgctgcccagccgccgacgcctgctccgacctggcctcccaaagtgatggctcctgcacccaggccggtgggggcatggaggactccgtggtggcagcggcggcggtggcagccggcagacccagtgcccatgccccgaaggctcaagcccaggagctgcaggaggaggaggagcggccgggggcaggggctgcctccccaagggctggcccccagcacaaggcctcccccggccggcagcagcctgccctggcgacggcgctgtgcccccacgcccctgccgcctccgattacgaactctcccttgacctaaagaataaacagattgaaatgctagaacataagtacggcggtcacctggtgtcccggcgcgccgcttgcaccatccaaaccgccttccgccaataccagctcagcaagaacttcgagaaaatccgcaactcgcttctggagagccgcctgccacggcggatctccctgcgcaaggtgcggtcacccacggccgagagcctggcggccgagaaagcgctcatggagggctacggcctcgtggggctgccgctggtgcgctcgccctccctgccgcccaccttcgcaggcaccctcaccgagctggaggactccttcaccgagcaggtgcaatccctggccaagtccatcgacgacgcgctcagcacgtggagcctcaagaccatgtgctccctgcgggagagtggcgcttaccagctccaccaggccctgcaggcggccgcggggcccccaggcctggaggccgaggggcgggcgccggagagcgcgggccccgggcccggggatgacgccgcggagacccccggcctgcccccggcccacagcgggaccctcatgatggctttccgggacgtcacggtgcagatcgccaaccagaacatatccgtctcctcctccacggctctgtcggtggccaactgcctgggcgctcagacggtccaggcccccgcagagcccgcggcgggcaaggccgagcagggcgagacctctgggcgggaggccccggaagcccccgccgtgggccgggaggacgcgtcagccgaggactcatgcgcagaggctgcggctagtggggcggcggatggggccacagcccccaaaacagaggaggaagaggaggaggaggagacggcggaggtggggagaggggccgaggccgaggcaggcgacttggagcagctgagcagcagcagcacgtccaccaagtccgccaagtcaggctcggaggcgtcggcctccgcctccaaggacgccctgcaggccatgatcctgagcctgccgcgctaccactgcgagaacccagccagctgcaagtcgcccacgctctccaccgacaccctgcgcaagcggctctaccgcatcggcctcaacctcttcaacataaaccccgacaagggcatccagttcctgatctcacgcggcttcatcccggacacccccatcggtgtggcccatttcctcctccagcgaaagggcctcagccgccagatgattggagagttcctgggcaacagcaagaagcagttcaaccgcgacgtgctggactgcgtggtggacgagatggacttctccagcatggagctggacgaggccctgcgcaagttccaggcacacatccgtgtgcagggggaggctcagaaggtggagcggctcattgaggccttcagccagcgctactgcatgtgcaaccccgaagtggttcagcagttccacaaccccgacaccatcttcatcctcgccttcgccatcatcctcctcaacaccgacatgtacagccccaacatcaagcctgaccggaagatgatgctggaggacttcatccgaaaccttcgaggtgtggacgatggcgctgacatccccagggagctggtggtaggcatctatgagaggatacagcagaaggagctcaagtccaatgaggaccacgtcacgtacgtcaccaaggtggagaagtccattgtgggcatgaagacagtgctgtccgtgccccaccgccgcctggtgtgctgcagccggctcttcgaggtgacggatgtgaacaagctgcagaagcaggcagcgcatcagagggaggtgttcctcttcaatgacctgctggtgattctcaaactttgcccgaagaagaagagctcctccacgtacaccttttgcaagtcagttggcctgctgggcatgcagttccagctctttgagaacgagtattactctcatggcatcacactggtgaccccgctctcgggctccgagaagaagcaggtgctgcatttctgtgccctgggctcggacgagatgcagaagttcgtggaggacctgaaggagtccattgctgaggtgacggagctggagcagatccgaatagagtgggagctggagaagcagcagggaacaaagacactctccttcaagccctgcggagcccagggggacccacagtcaaagcaaggatcgccgacagccaaaagggaagccgcgctcagggagaggccggcggagagcacggtggaggtgtcaattcacaacaggcttcaaacgtcccagcacaactccgggctgggggccgagaggggagcgccggtgccgccgccagacctgcagcctagccccccgagacagcagaccccaccactgccgccgccgccacccacgcccccgggcaccctggtgcagtgccagcaaattgtcaaggtcattgtcctggacaagccctgcctggcccgcatggagcccctgctgagccaggctctctcctgctacacctcgtcgtcctctgactcctgcggctccacacccctgggcggtcccggctctccggtcaaggtcacccaccagcctccgctgcccccgcccccacccccctacaaccaccctcaccagttctgtcccccaggctccctgctgcacgggcaccgctactccagtggctcaaggagcctggtgtagactctgccccaccaccctgctgtcctgggagggctggccactggggggcctgggctgcccctccactgctccccataccctggcacgatgcgttcctggtcactgatcaccatcattttgggaagagaatcccaatccctggcacctgggtttgcctcatccaaccatccttccctttctcagctgcaccccctctgcagatctgaagacacacctcactctcccagggccctacacagccagacccggcgaggcctcctcttcccctggccaccactttcccccattggaccatggactgaagaaaacgagctgagggtctaacgagcttgcaggctttgagtctgttagtgcccggggcctcgggccttgggcagcagcatgaggctgggccggccggcagtggagcactagacagagtggctggctcgcagcccagaactagtgcctctgtagctgcactgaggggaggagggttggtcccacccctggagggacaggtgggaggagtgaggagggggctttttctgccacccccgcccccaagcctgaaactctcaggagtctacttcttggtccccagggacattggctgtcctgaccatgtccttccccctcctcccagggcctctgcttcctcaggagctgcccagactccagaaaagcctggaaaaagggaggcgggaaggggagcactttcggctttctataggtcagtccagcagggccacgggatcgcgaggtcatgtatctgcaaaatgcacctttttaaagagtgtcttagttccccagccccagctaatacccggccaatgccgtgtacgcaccggcatgtgcacgcaaacacgcatgagaaccaggccattccttccgctgtggaagcagaactggagacggggcaggaatgtgcccagcagagatggggctcagcccgaggcagggctccctcctgcatgaggctcggcccgaggcagggctccctcctgcatgagtctgtggcctccaggagggacttgggtgcagatgtaagcaagaaaaaccggggctccagaggcatgtgcatttcccctgcgcccctcagcctttaaatattccctcctcctagaaggttctagaccccccccttccagcaggggtgcccaagagtccctggaccctcaaaattgcaaaggagacccaagcggggctcgctgacctcccagggcccagcaagatgggatagccagccttaggtggccccacgagcccaagcctggggaagggcccctccccagccagacgagaggcagccaccccagagaccacaggagccgtaccatggcctgcgcagtcaggccctatcaggatgtgtctgtcccaagcctggccaggctccagtcctgtgccagtagctcactgctgtcctatgtgcaggtcccccaacacttggagcctgtggttaaggcctcctgggagaggcagtgagcatgagtcaaaggtgacatggacttgaatctccccaccccgccccgcctgcagtagccgggccaggtaggaggcaaggatcattccctgctcccagaggttccagatgacctagtttcgttttgtgtgtgtgtgtgtgtggtcacccagacgtcactgtgatatcacctagtgaatctatttctggccctgtcttcgtcggcccagtttctgtaacttgcagccaatttgccctctcccctgtggctgccagcccatctgcccctctgtgtccttgctgccctggccctcctctgttttctgtaacagatgctccagtcattgcctttcagagtggagcagatgacagatggggtgcacgcattcagacacctctgatgcccttagccagggcagggatcgtccttaaagtgaaggcctggacaggaggagtcagggacttgggaggaggtggagctgtggggatgggagtggaggaatcaaaatgagggaagctgaaaatagaatgaaaacgatgactaagaggcagggagtgcgaggtatgggggaataggaactatgagctaaatatacttatggggtgggggccgtgggggccagggacactctcccagacagccctgacccgccaggcaggaccccgtcccctgctcacacagctcttcaaacttaccaaggacaggcaggaccccgtcccctgctcacacagctcttcaagcttaccaaggacaggcagaaccccgtcccctgctcacacagctcttcaagcttaccaaggacaggcaggaccccgtcccctgctcacacagctcttcaaacttaccaagtgccctctcccctgttgagggcacagcaaccccaggccctccctcccacctcagctgaagccccaatcttccaaatcggaaccagcaagtcttagggctggcacgcatctgggcctctagctgagaacccggactctcaggcacctcagtgcccctgccccagggcagaggcccaccccgtgggttggtgcagtggctgccctgggctccacgggcagcacagggagtctgtccaggaagcagcccagccggggtcagtattccgtggagccagtcctgagctgggaggggcatttaacacccctgagggcctggggcaggacacagctggccctcctcattgtcaggggaagcaagtgcccaacatctgtaacctcccttccctgctcagtccccaggccaaggttgggacccctctccatccctgtccccagagcctagacctcagggacctaggaaaagcctcctgctccctccccacggcagcagacagggcagggcctccagcccccagagggccggtggggggtgctctcgggccttcctgctctcctaaggttgcggggacagtagagtgctgagccccagacccagtcaccccaagatggccccactctatccactctctagacctttgggaaatctgggtccctctcctgatttgatccattcggccccaactccagagtcgggaatgggagatgaaactagttttccacccacttttggacaagtcccacccctagatctgaagcaagctctaccagcagcgtgtcctggaagcctgcctgcctgcctgcccgtctgcacaggtgtcttgatccagccctgcgtcttcgagcccctgtgccaccggtccccacggcccgccaggagtctctttgtacccactaggcttccctgatgaccatctgtctgtccgtccctgtttttgctgtacataactcctgctgcaccctctccccgcacacccgtcacccatgagagagagaaacctctctagggaaaggcagggtggctgcacccagcaactaatccaaatggcaaatattttgtaacaaaatagcccagaggtattttatctgttcaattcatagagttttagagattatattgaaagatgtcacttgagcaaa

SEQ ID NO: 14926 - DNA, 2594 bp, Homo sapiens
  source 1..2594: mol_type = unassigned DNA
cgcctccaggccccttcccgcgtcgcgacgcacgctgccccggaaggccgcggcgctgtagtgcggcgtgggagccccaggttctttagtggaagaacgcgaagcgaggatgagtgatccgtggaggcagtaacaggcgcggcgagggagaagtgattcccgaagaatcaaggctgggccggacccggtggcctggcaacagggtaataagagaaatgaagccaacaggtacagacccaaggatcttatctatagctgctgaagttgcaaaaagccctgagcagaatgtccctgttatactgttgaagttaaaagaaataataaacatcacacctttaggaagctcagagttgaagaaaatcaaacaagatatatattgttatgatctcattcaatattgcctcttggtcctcagtcaagattattctcgaatccagggtggttggactacaatttcccagcttacacagatattaagccattgctgtgtgggcttggagccaggagaagatgcagaggaattttacaatgaattacttccatcagctgcagaaaattttctagttttggggagacaattacaaacatgttttatcaatgcagctaaggctgaagaaaaagatgaattactacactttttccaaattgtgactgattctctcttctggcttttgggaggccatgttgaacttattcagaatgtactacaaagtgatcatttcttacatttactgcaagctgacaatgtccaaataggatctgcagtcatgatgatgctacagaatatactacagatcaacagtggtgatttactcagaataggaagaaaagccctgtattcaattttagatgaagttattttcaagcttttttcaactcctagtccagttataagaagtactgctacaaaactcctactgttgatggctgaatcccatcaggaaattttgattttactgagacaaagtacctgctacaaaggactcagacgtctactaagtaaacaggaaactgggactgaattcagtcaagaacttagacagcttgttggccttttaagcccaatggtctatcaggaagtagaagagcagaaactacatcaagcagcatgcttgattcaagcctattggaagggttttcagacaagaaagagattaaagaagcttccatctgctgtgattgctttgcagaggagtttcagatccaaacgatcaaagatgttgctggagataaataggcagaaggaagaagaggacctcaaattacaattgcaacttcaaagacagagagccatgagactttcccgagaattgcagctgagtatgctcgaaatagttcatccaggtcaggtggagaaacactatcgggaaatggaagagaaatcagcactgattatccagaaacattggagagggtacagggaaaggaaaaattttcaccaacagaggcagtctctcatagagtataaagcagctgtcacacttcaaagagcagcgcttaaattcctagcgaagtgccgtaagaaaaagaaactatttgctccttggcgaggactccaagaactcactgatgcacgccgagttgaactgaagaaacgagtggatgactatgtcagaagacatttgggctctccaatgtcagatgtggtcagtagggagctccatgcccaagctcaagaacgactgcaacactactttatgggcagggccctagaagagcgagcccagcagcacagagaagctctgatagcacagatcagcaccaacgttgaacagctaatgaaggcaccaagtctgaaggaggcagaagggaaagaacctgagctcttcctaagtagatccaggcctgtggcagccaaggccaagcaggcccatctcacaaccctgaagcacatacaagcaccctggtggaagaagcttggagaagaatctggagatgagattgatgttccaaaggatgagcttagtatagaattagaaaatttattcattggtggaaccaaaccaccttagtgagtaaccctaagaattgacacaaatctcatattttaggagattatattggttctgcctctggcatgctggtagactagggccatcctaacttattattttccagaggttctcctccagacaagacctgcagtaagcaaagagttatattctacctctctctcaattttctttttcttttctctgtatcctcatcgttagccacacacagatttgtgtggcttttattgtagaactaaacttagcatagtgttctgttgtttacatgaagtgtgtttttctttggtttcttctgttttccaactaaatatttttttctaaataaatattttcaacaattgatttgaaaaatttgtcaggattatttcaacttttcacatttgttatctgaaattcctatttcctgttaacataggaggtgtgtgcagactttattaatgtgaggaaaagaaatgctcaattgaaggacatttccctgttttctataaagcaatggttgaactcattttctattttgttatttctaaaaggaactgcataccaaaaaaatgcattctttctattaaactgtgagaactacat

SEQ ID NO: 14927 - DNA, 1919 bp, Homo sapiens
  source 1..1919: mol_type = unassigned DNA
ggccgcggcgctgtagtgcggcgtgggagccccaggttctttagtggaagaacgcgaagcgaggatgagtgatccgtggaggcagtaacaggcgcggcgagggagaagtgattcccgaagaatcaaggctgggccggacccggtggcctggcaacagggtaataagagaaatgaagccaacaggtacagacccaaggatcttatctatagctgctgaagttgcaaaaagccctgagcagaatgtccctgttatactgttgaagttaaaagaaataataaacatcacacctttaggaagctcagagttgaagaaaatcaaacaagatatatattgttatgatctcattcaatattgcctcttggtcctcagtcaagattattctcgaatccagggtggttggactacaatttcccagcttacacagatattaagccattgctgtgtgggcttggagccaggagaagatgcagaggaattttacaatgaattacttccatcagctgcagaaaattttctagttttggggagacaattacaaacatgttttatcaatgcagctaaggctgaagaaaaagatgaattactacactttttccaaattgtgactgattctctcttctggcttttgggaggccatgttgaacttattcagaatgtactacaaagtgatcatttcttacatttactgcaagctgacaatgtccaaataggatctgcagtcatgatgatgctacagaatatactacagatcaacagatccaaacgatcaaagatgttgctggagataaataggcagaaggaagaagaggacctcaaattacaattgcaacttcaaagacagagagccatgagactttcccgagaattgcagctgagtatgctcgaaatagttcatccaggtcaggtggagaaacactatcgggaaatggaagagaaatcagcactgattatccagaaacattggagagggtacagggaaaggaaaaattttcaccaacagaggcagtctctcatagagtataaagcagctgtcacacttcaaagagcagcgcttaaattcctagcgaagtgccgtaagaaaaagaaactatttgctccttggcgaggactccaagaactcactgatgcacgccgagttgaactgaagaaacgagtggatgactatgtcagaagacatttgggctctccaatgtcagatgtggtcagtagggagctccatgcccaagctcaagaacgactgcaacactactttatgggcagggccctagaagagcgagcccagcagcacagagaagctctgatagcacagatcagcaccaacgttgaacagctaatgaaggcaccaagtctgaaggaggcagaagggaaagaacctgagctcttcctaagtagatccaggcctgtggcagccaaggccaagcaggcccatctcacaaccctgaagcacatacaagcaccctggtggaagaagcttggagaagaatctggagatgagattgatgttccaaaggatgagcttagtatagaattagaaaatttattcattggtggaaccaaaccaccttagtgagtaaccctaagaattgacacaaatctcatattttaggagattatattggttctgcctctggcatgctggtagactagggccatcctaacttattattttccagaggttctcctccagacaagacctgcagtaagcaaagagttatattctacctctctctcaattttctttttcttttctctgtatcctcatcgttagccacacacagatttgtgtggcttttattgtagaactaaacttagcatagtgttctgttgtttacatgaagtgtgtttttctttggtttcttctgttttccaactaaatatttttttctaaataaatattttcaacaattgatttgaaaaa

SEQ ID NO: 14928 - DNA, 602 bp, Homo sapiens
  source 1..602: mol_type = unassigned DNA
cgcgtcgcgacgcacgctgccccggaaggccgcggcgctgtagtgcggcgtgggagccccaggttctttagtggaagaacgcgaagcgaggatgagtgatccgtggaggcagtaacaggcgcggcgagggagaagtgattcccgaagaatcaaggctgggccggacccggtggcctggcaacagggtagtagccttaaaatagataaataattgtctttttgtgtcaaatttcatgaatttaatgtaaagatgggagaagtgttgaattataggagaaacactcgagaaagtttacagatggtttccataacaggtggtttttcagggtaataagagaaatgaagccaacaggtacagacccaaggatcttatctatagctgctgaagttgcaaaaagccctgagcagaatgtccctgttatactgttgaagttaaaagaaataataaacatcacacctttaggaagctcagagttgaagaaaatcaaacaagatatatattgttatgatctcattcaatattgcctcttggtcctcagtcaagattattctcgaatccagggtggttggactacaatttcccagcttacacagatattaag

SEQ ID NO: 14929 - DNA, 2262 bp, Homo sapiens
  source 1..2262: mol_type = unassigned DNA
gagtggggctgtgggaggaagaaaggctagcgggcgttggccgtatgtgggtgtcttgaggcagtttttcagttctttcatttaccaaagtgacatgcacctactaggtgccaggtgtttagacgtacatacaaccctctgcaaaatctttcagtgtagtcctctgtatgaaaagtttccagccaagaattgccactgcacctgagataagggggatcctggccattaaggaaaccttgccttcgaaactgagccgtgaggaactatacaaaatgggaaattgggacaaatcccagtggctcatgacactaagaagtaaaattacgaactcactgagctggaagtcattcaacgggaattgaataggtaactgcacttttgtgagattataaatataccacggagggtaacgaagctacagaagaatggaagaagacagcctggaagactcaaaccttcctccaaaagtttggcattctgagatgacggtgtcagtgacaggcgaaccacctagtaccgtagaagaagaaggaatacctaaagaaacagacatagaaatcatcccagaaatcccggaaactctagagccactgtcccttccagatgtgctgaggatctcggcagttctggaggacaccacagaccagctctctattctgaactacatcatgcccgttcagtacgaagggagacagagcatctgcgtgaaaagcagagaaatgaatctagaaggaacgaatctagacaaacttccaatggcctcaacaatcacaaaaatacccagtccgttaataactgaggaaggacccaacttgccagaaatcagacacagaggccggttcgctgtggagtttaacaaaatgcaggatcttgtcttcaaaaaacctacaaggcagaccatcatgactacggagacactgaagaaaattcagattgataggcagtttttcagcgatgtgattgcagataccattaaggagttgcaagattcggccacttacaacagtctcctgcaagctttgagcaaagagagggaaaacaaaatgcatttctatgacatcattgccagggaggaaaaaggaagaaaacagataatatcacttcaaaaacagctaattaatgtcaaaaaggaatggcaatttgaagtccagagtcagaatgagtatattgctaacctcaaggaccaactgcaagagatgaaggcaaaatccaacttggagaatcgctacatgaaaaccaataccgagctgcagattgcccagacccagaaaaagtgtaacagaacagaggaactcttggtggaagagattgagaaactcaggatgaaaaccgaagaagaggcccggactcatacagagattgaaatgttccttagaaaggagcagcagaaacttgaggagaggctggagttctggatggagaaatacgataaggacacagaaatgaaacagaatgaactaaatgctctcaaagccacaaaggccagtgacttagcacaccttcaagacctggcaaagatgataagagagtatgaacaggtcatcattgaagatcgtatagaaaaggagaggagcaagaagaaggtaaaacaggatctcttggaattaaagagcgttataaagctccaggcctggtggcgaggcactatgatacggagagaaattggtggtttcaagatgcctaaagacaaagttgatagcaaggattcaaaaggcaaaggtaaaggcaaggataagaggagaggcaagaagaagtgaccaagttctcttttgtgttttctgctggtattctggaggtgggaaggacttggagagagttaagaaacacctggtacctcaaagatgactcatctacaggttgtttcctattgagactttcccagggaagcctgatttcactttgcctgttaatttcactctgcctgttaggtgggttttcaaaccctgatttaggattacaccattgacttagggcttcctcataccttgctgggaagaagtttctagtagtcctgtgaagattcattcttcttgctctttctcagcagaacaaaggagttcactggcttagctacagtgacgcattgaaacttgagtaattcctgtaatgtcagattttgattttacccaatttgtctgtagtgaaaaaactcttatgagcaaaagtattcagtaggaattacaatatgatgttattagctgtccagcataatatatacacagcaaagttttaataaatgttggttcctgcctgccttttaga

SEQ ID NO: 14930 - DNA, 550 bp, Homo sapiens
  source 1..550: mol_type = unassigned DNA
gatgttcccgctgcctaaagaatgattgactgtaagattgatttgccaacagtggggtgcttttctctcgatacacacagcaatagacagaacggaaattctgggatcctaatctagcatggaagagaaaggccgggagcacgaaggcagcaggacctcttccttctcttttttctttttctatacttcttttctcccctctacttatttatctctttcaagaaatgagactgggcacagtggctcacgcctgtaaacccagctctttgggaagccgaggcgggaggatcgcttgaggccaggagttcgagaccagcctgggcaacatagtaactgcacttttgtgagattataaatataccacggagggtaacgaagctacagaagaatggaagaagacagcctggaagactcaaaccttcctccaaaagtttggcattctgagatgacggtgtcagtgacaggcgaaccacctagtaccgtagaagaagaaggaatacctaaagaaacagacatagaaatcatcccagaaatcccggaaactctagag

SEQ ID NO: 14931 - DNA, 1981 bp, Homo sapiens
  source 1..1981: mol_type = unassigned DNA
agtttacttcctgcgtccccggacgccgtaggtggaaaggcgaaccctgagtggaggatgttcccgctgcctaaagaatgattgactgtaactgcacttttgtgagattataaatataccacggagggtaacgaagctacagaagaatggaagaagacagcctggaagactcaaaccttcctccaaaagtttggcattctgagatgacggtgtcagtgacaggcgaaccacctagtaccgtagaagaagaaggaatacctaaagaaacagacatagaaatcatcccagaaatcccggaaactctagagccactgtcccttccagatgtgctgaggatctcggcagttctggaggacaccacagaccagctctctattctgaactacatcatgcccgttcagtacgaagggagacagagcatctgcgtgaaaagcagagaaatgaatctagaaggaacgaatctagacaaacttccaatggcctcaacaatcacaaaaatacccagtccgttaataactgaggaaggacccaacttgccagaaatcagacacagaggccggttcgctgtggagtttaacaaaatgcaggatcttgtcttcaaaaaacctacaaggcagaccatcatgactacggagacactgaagaaaattcagattgataggcagtttttcagcgatgtgattgcagataccattaaggagttgcaagattcggccacttacaacagtctcctgcaagctttgagcaaagagagggaaaacaaaatgcatttctatgacatcattgccagggaggaaaaaggaagaaaacagataatatcacttcaaaaacagctaattaatgtcaaaaaggaatggcaatttgaagtccagagtcagaatgagtatattgctaacctcaaggaccaactgcaagagatgaaggcaaaatccaacttggagaatcgctacatgaaaaccaataccgagctgcagattgcccagacccagaaaaagtgtaacagaacagaggaactcttggtggaagagattgagaaactcaggatgaaaaccgaagaagaggcccggactcatacagagattgaaatgttccttagaaaggagcagcagaaacttgaggagaggctggagttctggatggagaaatacgataaggacacagaaatgaaacagaatgaactaaatgctctcaaagccacaaaggccagtgacttagcacaccttcaagacctggcaaagatgataagagagtatgaacaggtcatcattgaagatcgtatagaaaaggagaggagcaagaagaaggtaaaacaggatctcttggaattaaagagcgttataaagctccaggcctggtggcgaggcactatgatacggagagaaattggtggtttcaagatgcctaaagacaaagttgatagcaaggattcaaaaggcaaaggtaaaggcaaggataagaggagaggcaagaagaagtgaccaagttctcttttgtgttttctgctggtattctggaggtgggaaggacttggagagagttaagaaacacctggtacctcaaagatgactcatctacaggttgtttcctattgagactttcccagggaagcctgatttcactttgcctgttaatttcactctgcctgttaggtgggttttcaaaccctgatttaggattacaccattgacttagggcttcctcataccttgctgggaagaagtttctagtagtcctgtgaagattcattcttcttgctctttctcagcagaacaaaggagttcactggcttagctacagtgacgcattgaaacttgagtaattcctgtaatgtcagattttgattttacccaatttgtctgtagtgaaaaaactcttatgagcaaaagtattcagtaggaattacaatatgatgttattagctgtccagcataatatatacacagcaaagttttaataaatgttggttcctgcctgcctttta

SEQ ID NO: 14932 - DNA, 7233 bp, Homo sapiens
  source 1..7233: mol_type = unassigned DNA
gacggcacggggcggggcctcggggaccccggcaagcccgcgcacttggcaggagctgtagctaccgccgtccgcgcctccaaggtttcacggcttcctcagcagagactcgggctcgtccgccatgtccgccgcagacgaggttgacgggctgggcgtggcccggccgcactatggctctgtcctggataatgaaagacttactgcagaggagatggatgaaaggagacgtcagaacgtggcttatgagtacctttgtcatttggaagaagcgaagaggtggatggaagcatgcctaggggaagatctgcctcccaccacagaactggaggaggggcttaggaatggggtctaccttgccaaactggggaacttcttctctcccaaagtagtgtccctgaaaaaaatctatgatcgagaacagaccagatacaaggcgactggcctccactttagacacactgataatgtgattcagtggttgaatgccatggatgagattggattgcctaagattttttacccagaaactacagatatctatgatcgaaagaacatgccaagatgtatctactgtatccatgcactcagtttgtacctgttcaagctaggcctggcccctcagattcaagacctatatggaaaggttgacttcacagaagaagaaatcaacaacatgaagactgagttggagaagtatggcatccagatgcctgcctttagcaagattgggggcatcttggctaatgaactgtcagtggatgaagccgcattacatgctgctgttattgctattaatgaagctattgaccgtagaattccagccgacacatttgcagctttgaaaaatccgaatgccatgcttgtaaatcttgaagagcccttggcatccacttaccaggatatactttaccaggctaagcaggacaaaatgacaaatgctaaaaacaggacagaaaactcagagagagaaagagatgtttatgaggagctgctcacgcaagctgaaattcaaggcaatataaacaaagtcaatacattttctgcattagcaaatatcgacctggctttagaacaaggagatgcactggccttgttcagggctctgcagtcaccagccctggggcttcgaggactgcagcaacagaatagcgactggtacttgaagcagctcctgagtgataaacagcagaagagacagagtggtcagactgaccccctgcagaaggaggagctgcagtctggagtggatgctgcaaacagtgctgcccagcaatatcagagaagattggcagcagtagcactgattaatgctgcaatccagaagggtgttgctgagaagactgttttggaactgatgaatcccgaagcccagctgccccaggtgtatccatttgccgccgatctctatcagaaggagctggctaccctgcagcgacaaagtcctgaacataatctcacccacccagagctctctgtcgcagtggagatgttgtcatcggtggccctgatcaacagggcattggaatcaggagatgtgaatacagtgtggaagcaattgagcagttcagttactggtcttaccaatattgaggaagaaaactgtcagaggtatctcgatgagttgatgaaactgaaggctcaggcacatgcagagaataatgaattcattacatggaatgatatccaagcttgcgtggaccatgtgaacctggtggtgcaagaggaacatgagaggattttagccattggtttaattaatgaagccctggatgaaggtgatgcccaaaagactctgcaggccctacagattcctgcagctaaacttgagggagtccttgcagaagtggcccagcattaccaagacacgctgattagagcgaagagagagaaagcccaggaaatccaggatgagtcagctgtgttatggttggatgaaattcaaggtggaatctggcagtccaacaaagacacccaagaagcacagaagtttgccttaggaatctttgccattaatgaggcagtagaaagtggtgatgttggcaaaacactgagtgcccttcgctcccctgatgttggcttgtatggagtcatccctgagtgtggtgaaacttaccacagtgatcttgctgaagccaagaagaaaaaactggcagtaggagataataacagcaagtgggtgaagcactgggtaaaaggtggatattattattaccacaatctggagacccaggaaggaggatgggatgaacctccaaattttgtgcaaaattctatgcagctttctcgggaggagatccagagttctatctctggggtgactgccgcatataaccgagaacagctgtggctggccaatgaaggcctgatcaccaggctgcaggctcgctgccgtggatacttagttcgacaggaattccgatccaggatgaatttcctgaagaaacaaatccctgccatcacctgcattcagtcacagtggagaggatacaagcagaagaaggcatatcaagatcggttagcttacctgcgctcccacaaagatgaagttgtaaagattcagtccctggcaaggatgcaccaagctcgaaagcgctatcgagatcgcctgcagtacttccgggaccatataaatgacattatcaaaatccaggcttttattcgggcaaacaaagctcgggatgactacaagactctcatcaatgctgaggatcctcctatggttgtggtccgaaaatttgtccacctgctggaccaaagtgaccaggattttcaggaggagcttgaccttatgaagatgcgggaagaggttatcaccctcattcgttctaaccagcagctggagaatgacctcaatctcatggatatcaaaattggactgctagtgaaaaataagattacgttgcaggatgtggtttcccacagtaaaaaacttaccaaaaaaaataaggaacagttgtctgatatgatgatgataaataaacagaagggaggtctcaaggctttgagcaaggagaagagagagaagttggaagcttaccagcacctgttttatttattgcaaaccaatcccacctatctggccaagctcatttttcagatgccccagaacaagtccaccaagttcatggactctgtaatcttcacactctacaactacgcgtccaaccagcgagaggagtacctgctcctgcggctctttaagacagcactccaagaggaaatcaagtcgaaggtagatcagattcaagagattgtgacaggaaatcctacggttattaaaatggttgtaagtttcaaccgtggtgcccgtggccagaatgccctgagacagatcttggccccagtcgtgaaggaaattatggatgacaaatctctcaacatcaaaactgaccctgtggatatttacaaatcttgggttaatcagatggagtctcagacaggagaggcaagcaaactgccctatgatgtgacccctgagcaggcgctagctcatgaagaagtgaagacacggctagacagctccatcaggaacatgcgggctgtgacagacaagtttctctcagccattgtcagctctgtggacaaaatcccttatgggatgcgcttcattgccaaagtgctgaaggactcgttgcatgagaagttccctgatgctggtgaggatgagctgctgaagattattggtaacttgctttattatcgatacatgaatccagccattgttgctcctgatgcctttgacatcattgacctgtcagcaggaggccagcttaccacagaccaacgccgaaatctgggctccattgcaaaaatgcttcagcatgctgcttccaataagatgtttctgggagataatgcccacttaagcatcattaatgaatatctttcccagtcctaccagaaattcagacggtttttccaaactgcttgtgatgtcccagagcttcaggataaatttaatgtggatgagtactctgatttagtaaccctcaccaaaccagtaatctacatttccattggtgaaatcatcaacacccacactctcctgttggatcaccaggatgccattgctccggagcacaatgatccaatccacgaactgctggacgacctcggcgaggtgcccaccatcgagtccctgataggggaaagctctggcaatttaaatgacccaaataaggaggcactggctaagacggaagtgtctctcaccctgaccaacaagttcgacgtgcctggagatgagaatgcagaaatggatgctcgaaccatcttactgaatacaaaacgtttaattgtggatgtcatccggttccagccaggagagaccttgactgaaatcctagaaacaccagccaccagtgaacaggaagcagaacatcagagagccatgcagagacgtgctatccgtgatgccaaaacacctgacaagatgaaaaagtcaaaatctgtaaaggaagacagcaacctcactcttcaagagaagaaagagaagatccagacaggtttaaagaagctaacagagcttggaaccgtggacccaaagaacaaataccaggaactgatcaacgacattgccagggatattcggaatcagcggaggtaccgacagaggagaaaggccgaactagtgaaactgcaacagacatacgctgctctgaactctaaggccaccttttatggggagcaggtggattactataaaagctatatcaaaacctgcttggataacttagccagcaagggcaaagtctccaaaaagcctagggaaatgaaaggaaagaaaagcaaaaagatttctctgaaatatacagcagcaagactacatgaaaaaggagttcttctggaaattgaggacctgcaagtgaatcagtttaaaaatgttatatttgaaatcagtccaacagaagaagttggagacttcgaagtgaaagccaaattcatgggagttcaaatggagacttttatgttacattatcaggacctgctgcagctacagtatgaaggagttgcagtcatgaaattatttgatagagctaaagtaaatgtcaacctcctgatcttccttctcaacaaaaagttctacgggaagtaattgatcgtttgctgccagcccagaaggatgaaggaaagaagcacctcacagctcctttctaggtccttctttcctcattggaagcaaagacctagccaacaacagcacctcaatctgatacactcccgatgccacatttttaactcctctcgctctgatgggacatttgttacccttttttcatagtgaaattgtgtttcaggcttagtctgacctttctggtttcttcattttcttccattacttaggaaagagtggaaactccactaaaatttctctgtgttgttacagtcttagaggttgcagtactatattgtaagctttggtgtttgtttaattagcaatagggatggtaggattcaaatgtgtgtcatttagaagtggaagctattagcaccaatgacataaatacatacaagacacacaactaaaatgtcatgttattaacagttattaggttgtcatttaaaaataaagttcctttatatttctgtcccatcaggaaaactgaaggatatggggaatcattggttatcttccattgtgtttttctttatggacaggagctaatggaagtgacagtcatgttcaaaggaagcatttctagaaaaaaggagataatgtttttaaatttcattatcaaacttgggcaattctgtttgtgtaactccccgactagtggatgggagagtcccattgctaaaattcagctactcagataaattcagaatgggtcaaggcacctgcctgtttttgttggtgcacagagattgacttgattcagagagacaattcactccatccctatggcagaggaatgggttagccctaatgtagaatgtcattgtttttaaaactgttttatatcttaagagtgccttattaaagtatagatgtatgtcttaaaatgtgggtgataggaattttaaagatttatataatgcatcaaaagccttagaataagaaaagctttttttaaattgctttatctgtatatctgaactcttgaaacttatagctaaaacactaggatttatctgcagtgttcagggagataattctgcctttaattgtctaaaacaaaaacaaaaccagccaacctatgttacacgtgagattaaaaccaattttttccccattttttctccttttttctcttgctgcccacattgtgcctttattttatgagccccagttttctgggcttagtttaaaaaaaaaatcaagtctaaacattgcatttagaaagcttttgttcttggataaaaagtcatacactttaaaaaaaaaaaaaactttttccaggaaaatatattgaaatcatgctgctgagcctctattttctttctttgatgttttgattcagtattcttttatcataaatttttagcatttaaaaattcactgatgtacattaagccaataaactgctttaatgaataacaaactatgtagtgtgtccctattataaatgcattggagaagtatttttatgagactctttactcaggtgcatggttacagcccacagggaggcatggagtgccatggaaggattcgccactacccagaccttgttttttgttgtattttggaagacaggttttttaaagaaacattttcctcagattaaaagatgatgctattacaactagcattgcctcaaaaactgggaccaaccaaagtgtgtcaaccctgtttccttaaaagaggctatgaatcccaaaggccacatccaagacaggcaataatgagcagagtttacagctcctttaataaaatgtgtcagtaattttaaggtttatagttccctcaacacaattgctaatgcagaatagtgtaaaatgcgcttcaagaatgttgatgatgatgatatagaattgtggctttagtagcacagaggatgccccaacaaactcatggcgttgaaaccacacagttctcattactgttatttattagctgtagcattctctgtctcctctctctcctcctttgaccttctcctcgaccagccatcatgacatttaccatgaatttacttcctcccaagagtttggactgcccgtcagattgttgctgcacatagttgcctttgtatctctgtatgaaataaaaggtcatttgttcatgtt

SEQ ID NO: 14933 - DNA, 5844 bp, Homo sapiens
  source 1..5844: mol_type = unassigned DNA
cgcggtgaataacggggcctggctggaggagaaaggaaacctgctgcgggaggcggcggcgaccggccagggagcgagggaggagagttcacttttacttcagtgtcagcgcgcggcggccgtggctggctctggcgagagagcaccgagggagtgggtcgcagatcttcgggcggctaggggaaatcggcgagaggcgggatccgagcgcgccggcggggcgcagagcccgcgagcctggccagcgagggtagccgcggggggcgcgccccgggcgggcccccggagacgcgcaggatgccacacgaagagctgccgtcgctgcagagaccccgctatggctctattgtggacgatgaaaggctctctgcagaggagatggatgagaggaggcggcagaacattgcttatgaatatctgtgccacttagaggaagccaaaaggtggatggaagtttgcttagttgaagaattgccaccaaccactgaattggaagaagggctccggaatggagtttaccttgcaaagttagccaagttctttgccccgaaaatggtatcagagaaaaagatctatgatgtggaacaaacacgttataagaagtctggccttcattttcgacacacagataataccgtccagtggttaagagcgatggagtctattggtctacccaagatattttatccagaaacaacagatgtctatgatcggaaaaacataccaagaatgatatattgcattcacgcactgagtttgtatctgttcaaactaggaatagcaccccagatccaggatttgttgggcaaagtagacttcacagaggaggaaatcagtaatatgagaaaagaacttgagaaatatggaatacagatgccatctttcagcaaaataggtggtattctggccaatgaactgtccgtggatgaagctgcattacatgctgcagttatagccattaatgaagcagttgaaaaaggaatagcagagcaaaccgttgtaacactaagaaacccaaatgcggttttaactttagtggatgacaaccttgcaccagaatatcagaaagaactctgggatgccaaaaagaaaaaagaggaaaatgcaagactgaagaatagctgtatttcagaagaagaaagagatgcttatgaagaactgctgacacaagcagaaatccaaggcaatattaataaagtcaacaggcaggctgcagtggaccatatcaatgctgtcattccggaaggtgaccccgagaatacgctgcttgcactgaagaaaccagaggcccagctgcctgctgtttatccctttgctgctgccatgtatcagaacgaacttttcaacctccagaaacagaacaccatgaactacttggcccacgaggagcttttgattgctgtggaaatgttgtctgctgttgctttactaaaccaggccttggaaagcaacgatcttgtgtctgtgcagaatcaactcagaagccccgcaataggcttaaacaatctggacaaggcatatgtggaacgttatgcaaacacactactctctgttaaactagaagttttatcccaagggcaagataacttaagctggaatgaaattcagaattgtattgatatggttaatgctcaaattcaagaagaaaatgaccgagttgtagctgtagggtacatcaatgaagctattgatgaagggaatcctttgaggactttagaaactttgctcctacctactgcgaatattagtgatgtggacccagcccatgcccagcactaccaggatgttttataccatgctaaatcacagaaactcggagactctgagagtgtttccaaagtgctttggctggatgagatacagcaagccgtcgatgatgccaacgtggacaaggacagagcaaaacaatgggttactctggtggttgatgttaatcagtgtttggaaggaaaaaaatcaagtgatattttgtctgtattgaagtcttccacttctaatgcaaatgacataatcccggagtgtgctgacaaatactatgatgcccttgtgaaggcaaaagagctcaaatctgaaagagtgtctagtgacggttcatggctcaaactcaacctgcacaaaaaatatgactactattacaacactgattcaaaagagagttcctgggtcacacctgaatcatgcttgtataaagaatcatggctcacaggaaaagaaatcgaggacattattgaggaagtcacagtaggttacattcgtgagaatatatggtctgcttcagaagagttgcttcttcgctttcaagccacaagctcaggacccatccttagggaagagtttgaagctagaaaatcatttttgcatgaacaagaagagaatgtggtcaaaatacaggctttttggaaaggatataaacaacggaaggagtatatgcacaggcggcaaacgttcattgataatactgattctattgtgaagattcagtcctggttccgaatggcaactgcaagaaagagctatctttcaagactacagtatttcagagatcataataatgaaattgtgaaaatacagtcactgttgagagcgaacaaagctagagatgactacaaaacattggttggctctgaaaacccaccattaacagtaattcgcaaatttgtatacctgctggaccaaagtgatttggatttccaggaggaactagaggttgcacgattaagggaagaagtagtgaccaagatcagggccaatcaacagctggaaaaagacctgaacctgatggacatcaagattggactgctggtgaagaacaggatcacactagaggatgtaatttcacatagtaaaaagctgaacaagaaaaaaggaggagaaatggaaatactgaataacaccgacaaccaaggaataaaaagtttgagtaaggagaggagaaaaacactagaaacatatcagcagctgttttaccttttacagaccaaccctttatacttggctaagctgattttccagatgccacagaacaagtccactaaatttatggatactgttattttcacactatataattatgcctctaatcagcgagaagaatatctacttctcaagctttttaaaactgctctggaggaagaaataaaatcaaaagtggaccaggtacaggacatagttactggtaaccctacagtcatcaagatggtcgtcagcttcaatagaggtgcccggggacagaacaccctgcgccaactcctggctccagtggtaaaagagatcatcgacgacaagtcgctgattatcaacacaaaccctgtagaggtgtacaaggcttgggtgaaccaactagaaacacagactggagaggccagcaagttgccttatgatgtgaccacagaacaagctctaacatacccagaagtgaaaaataaactggaggcttccattgagaacctgagaagggtcaccgacaaagtcctgaattctatcatttcttcccttgatctactgccttatggattgaggtatatagccaaagtactgaagaattcgatccatgagaaattccccgatgcaacagaagatgagctattaaagattgttggaaacctcctgtactatcggtacatgaatccagccattgtagctccagatggctttgatatcatcgacatgacagctggaggtcagataaattctgaccaaaggagaaacttaggatcagtggccaaggttcttcagcacgcagcctccaacaagctgtttgaaggagaaaatgagcatctctcatctatgaacaattatttatcagagacgtatcaggaattcaggaaatatttcaaagaagcatgtaatgtccctgagccagaagagaagtttaatatggacaaatacacagacctggtgacagtcagcaaaccagtcatttatatttcaattgaagaaatcatcagcacacactcactcctgttggaacaccaggatgcaattgcccctgagaaaaatgacttactgagtgaattgctggggtcgctgggagaggtgccaaccgtggaatcttttcttggggaaggagcagttgaccccaatgaccctaacaaggcaaatacactaagtcagctttcaaagaccgagatttctcttgtcttgacaagcaaatatgacatagaggacggtgaagctatagatagccgaagcctcatgataaagaccaagaagctgataattgatgtgatccggaaccagccagggaacacattgacagaaatcttagagacaccagcaactgcgcaacaggaggtagaccatgccacggacatggtgagccgtgcaatgatagattccaggactccagaagaaatgaagcatagccaatctatgattgaagatgcacagctgcctcttgagcagaagaagaggaaaatccagaggaatcttcggacgttggaacagactggacacgtgtcatccgaaaataaataccaagacattctcaatgagattgccaaggatattcgaaatcaaagaatctatcgtaagcttcgaaaagctgaattggcaaaacttcagcagaccctgaatgcacttaacaagaaggcagcattttatgaagagcaaatcaattattatgacacctacataaagacttgtttagacaacttaaaaagaaaaaatactcggagatcaattaaactagatggaaaaggagaacccaaaggggcgaagagagcgaagccagtgaagtacactgcagcaaagctgcatgagaaaggtgtcctgctagatatagatgatcttcaaacaaaccagtttaagaatgttacatttgatatcatagctactgaagatgtaggcattttcgatgtaagatcaaaattccttggtgttgagatggaaaaggtgcaactcaatattcaggatttacttcagatgcaatatgaaggagtagctgtaatgaaaatgtttgataaggttaaagtgaatgtaaaccttctcatatacctgctgaacaagaagttctatggaaagtgaagtgcctacagaaatttcttggattctgtatcatctggattaggaaatgaatttgtttaatatttttgtttttaaacatgattgaaatcactgcttataaatgtgtgatttttttaaaacgaccaaaactgttctgaagaatgtacccaggtgcctttttgctaatttgatactataatagaatgagacataaaatgaattaatggaaacatatccacactgtactgtgatataggtactctgatttaaaactttggacatcctgtgatctgttttaaagttggggggtgggaaatttagctgactagggacaaacatgtaaacctattttcctatgaaaaaaattttaaatgtcccacttgaataacgtaattcttcatagtttttttaatctatggataaatggaaacctaattatttgtaatgaattatttagacagttctaagccctgtcttctgggagttatcaattttaaagagaacttttgtgcaattcaaatgaagtttttataagtaattgaaaatgacaacacaataacactttctgtataaaagtatatattttatgtgatttattcctactaaatgaaagtgcactactgcctcatgtaaagactcttgcacgcagagcctttaagtgactaaggaacaacatagatagtgagcatagtccccacctccacccctcacaatttatttgaatacttcaattgtgcctctcaattttttgtaatgctaaaaaatcagtatctagatggtttttaaatgtattctctggaaattgttttatgtaaaataaatgttacttaattccattaa

SEQ ID NO: 14934 - DNA, 5598 bp, Homo sapiens
  source 1..5598: mol_type = unassigned DNA
gagggaggagagttcacttttacttcagtgtcagcgcgcggcggccgtggctggctctggcgagagagcaccgagggagtgggtcgcagatcttcgggcggctaggggaaatcggcgagaggcgggatccgagcgcgccggcggggcgcagagcccgcgagcctggccagcgagggtagccgcggggggcgcgccccgggcgggcccccggagacgcgcaggatgccacacgaagagctgccgtcgctgcagagaccccgctatggctctattgtggacgatgaaaggctctctgcagaggagatggatgagaggaggcggcagaacattgcttatgaatatctgtgccacttagaggaagccaaaaggtggatggaagtttgcttagttgaagaattgccaccaaccactgaattggaagaagggctccggaatggagtttaccttgcaaagttagccaagttctttgccccgaaaatggtatcagagaaaaagatctatgatgtggaacaaacacgttataagaagtctggccttcattttcgacacacagataataccgtccagtggttaagagcgatggagtctattggtctacccaagatattttatccagaaacaacagatgtctatgatcggaaaaacataccaagaatgatatattgcattcacgcactgagtttgtatctgttcaaactaggaatagcaccccagatccaggatttgttgggcaaagtagacttcacagaggaggaaatcagtaatatgagaaaagaacttgagaaatatggaatacagatgccatctttcagcaaaataggtggtattctggccaatgaactgtccgtggatgaagctgcattacatgctgcagttatagccattaatgaagcagttgaaaaaggaatagcagagcaaaccgttgtaacactaagaaacccaaatgcggttttaactttagtggatgacaaccttgcaccagaatatcagaaagaactctgggatgccaaaaagaaaaaagaggaaaatgcaagactgaagaatagctgtatttcagaagaagaaagagatgcttatgaagaactgctgacacaagcagaaatccaaggcaatattaataaagtcaacaggcaggctgcagtggaccatatcaatgctgtcattccggaaggtgaccccgagaatacgctgcttgcactgaagaaaccagaggcccagctgcctgctgtttatccctttgctgctgccatgtatcagaacgaacttttcaacctccagaaacagaacaccatgaactacttggcccacgaggagcttttgattgctgtggaaatgttgtctgctgttgctttactaaaccaggccttggaaagcaacgatcttgtgtctgtgcagaatcaactcagaagccccgcaataggcttaaacaatctggacaaggcatatgtggaacgttatgcaaacacactactctctgttaaactagaagttttatcccaagggcaagataacttaagctggaatgaaattcagaattgtattgatatggttaatgctcaaattcaagaagaaaatgaccgagttgtagctgtagggtacatcaatgaagctattgatgaagggaatcctttgaggactttagaaactttgctcctacctactgcgaatattagtgatgtggacccagcccatgcccagcactaccaggatgttttataccatgctaaatcacagaaactcggagactctgagagtgtttccaaagtgctttggctggatgagatacagcaagccgtcgatgatgccaacgtggacaaggacagagcaaaacaatgggttactctggtggttgatgttaatcagtgtttggaaggaaaaaaatcaagtgatattttgtctgtattgaagtcttccacttctaatgcaaatgacataatcccggagtgtgctgacaaatactatgatgcccttgtgaaggcaaaagagctcaaatctgaaagagtgtctagtgacggttcatggctcaaactcaacctgcacaaaaaatatgactactattacaacactgattcaaaagagagttcctgggtcacacctgaatcatgcttgtataaagaatcatggctcacaggaaaagaaatcgaggctttttggaaaggatataaacaacggaaggagtatatgcacaggcggcaaacgttcattgataatactgattctattgtgaagattcagtcctggttccgaatggcaactgcaagaaagagctatctttcaagactacagtatttcagagatcataataatgaaattgtgaaaatacagtcactgttgagagcgaacaaagctagagatgactacaaaacattggttggctctgaaaacccaccattaacagtaattcgcaaatttgtatacctgctggaccaaagtgatttggatttccaggaggaactagaggttgcacgattaagggaagaagtagtgaccaagatcagggccaatcaacagctggaaaaagacctgaacctgatggacatcaagattggactgctggtgaagaacaggatcacactagaggatgtaatttcacatagtaaaaagctgaacaagaaaaaaggaggagaaatggaaatactgaataacaccgacaaccaaggaataaaaagtttgagtaaggagaggagaaaaacactagaaacatatcagcagctgttttaccttttacagaccaaccctttatacttggctaagctgattttccagatgccacagaacaagtccactaaatttatggatactgttattttcacactatataattatgcctctaatcagcgagaagaatatctacttctcaagctttttaaaactgctctggaggaagaaataaaatcaaaagtggaccaggtacaggacatagttactggtaaccctacagtcatcaagatggtcgtcagcttcaatagaggtgcccggggacagaacaccctgcgccaactcctggctccagtggtaaaagagatcatcgacgacaagtcgctgattatcaacacaaaccctgtagaggtgtacaaggcttgggtgaaccaactagaaacacagactggagaggccagcaagttgccttatgatgtgaccacagaacaagctctaacatacccagaagtgaaaaataaactggaggcttccattgagaacctgagaagggtcaccgacaaagtcctgaattctatcatttcttcccttgatctactgccttatggattgaggtatatagccaaagtactgaagaattcgatccatgagaaattccccgatgcaacagaagatgagctattaaagattgttggaaacctcctgtactatcggtacatgaatccagccattgtagctccagatggctttgatatcatcgacatgacagctggaggtcagataaattctgaccaaaggagaaacttaggatcagtggccaaggttcttcagcacgcagcctccaacaagctgtttgaaggagaaaatgagcatctctcatctatgaacaattatttatcagagacgtatcaggaattcaggaaatatttcaaagaagcatgtaatgtccctgagccagaagagaagtttaatatggacaaatacacagacctggtgacagtcagcaaaccagtcatttatatttcaattgaagaaatcatcagcacacactcactcctgttggaacaccaggatgcaattgcccctgagaaaaatgacttactgagtgaattgctggggtcgctgggagaggtgccaaccgtggaatcttttcttggggaaggagcagttgaccccaatgaccctaacaaggcaaatacactaagtcagctttcaaagaccgagatttctcttgtcttgacaagcaaatatgacatagaggacggtgaagctatagatagccgaagcctcatgataaagaccaagaagctgataattgatgtgatccggaaccagccagggaacacattgacagaaatcttagagacaccagcaactgcgcaacaggaggtagaccatgccacggacatggtgagccgtgcaatgatagattccaggactccagaagaaatgaagcatagccaatctatgattgaagatgcacagctgcctcttgagcagaagaagaggaaaatccagaggaatcttcggacgttggaacagactggacacgtgtcatccgaaaataaataccaagacattctcaatgagattgccaaggatattcgaaatcaaagaatctatcgtaagcttcgaaaagctgaattggcaaaacttcagcagaccctgaatgcacttaacaagaaggcagcattttatgaagagcaaatcaattattatgacacctacataaagacttgtttagacaacttaaaaagaaaaaatactcggagatcaattaaactagatggaaaaggagaacccaaaggggcgaagagagcgaagccagtgaagtacactgcagcaaagctgcatgagaaaggtgtcctgctagatatagatgatcttcaaacaaaccagtttaagaatgttacatttgatatcatagctactgaagatgtaggcattttcgatgtaagatcaaaattccttggtgttgagatggaaaaggtgcaactcaatattcaggatttacttcagatgcaatatgaaggagtagctgtaatgaaaatgtttgataaggttaaagtgaatgtaaaccttctcatatacctgctgaacaagaagttctatggaaagtgaagtgcctacagaaatttcttggattctgtatcatctggattaggaaatgaatttgtttaatatttttgtttttaaacatgattgaaatcactgcttataaatgtgtgatttttttaaaacgaccaaaactgttctgaagaatgtacccaggtgcctttttgctaatttgatactataatagaatgagacataaaatgaattaatggaaacatatccacactgtactgtgatataggtactctgatttaaaactttggacatcctgtgatctgttttaaagttggggggtgggaaatttagctgactagggacaaacatgtaaacctattttcctatgaaaaaaattttaaatgtcccacttgaataacgtaattcttcatagtttttttaatctatggataaatggaaacctaattatttgtaatgaattatttagacagttctaagccctgtcttctgggagttatcaattttaaagagaacttttgtgcaattcaaatgaagtttttataagtaattgaaaatgacaacacaataacactttctgtataaaagtatatattttatgtgatttattcctactaaatgaaagtgcactactgcctcatgtaaagactcttgcacgcagagcctttaagtgactaaggaacaacatagatagtgagcatagtccccacctccacccctcacaatttatttgaatacttcaattgtgcctctcaattttttgtaatgctaaaaaatcagtatctagatggtttttaaatgtattctctggaaattgttttatgtaaaataaatgttacttaattccattaa

SEQ ID NO: 14935 - DNA, 3376 bp, Homo sapiens
  source 1..3376: mol_type = unassigned DNA
agcagcttgtattcttagaaacgcagcagacagcaactttagcaggtgatttcaatcaagtcagctgaaatgcactcacttccaggagttgtagctgtagggtacatcaatgaagctattgatgaagggaatcctttgaggactttagaaactttgctcctacctactgcgaatattagtgatgtggacccagcccatgcccagcactaccaggatgttttataccatgctaaatcacagaaactcggagactctgagagtgtttccaaagtgctttggctggatgagatacagcaagccgtcgatgatgccaacgtggacaaggacagagcaaaacaatgggttactctggtggttgatgttaatcagtgtttggaaggaaaaaaatcaagtgatattttgtctgtattgaagtcttccacttctaatgcaaatgacataatcccggagtgtgctgacaaatactatgatgcccttgtgaaggcaaaagagctcaaatctgaaagagtgtctagtgacggttcatggctcaaactcaacctgcacaaaaaatatgactactattacaacactgattcaaaagagagttcctgggtcacacctgaatcatgcttgtataaagaatcatggctcacaggaaaagaaatcgaggctttttggaaaggatataaacaacggaaggagtatatgcacaggcggcaaacgttcattgataatactgattctattgtgaagattcagtcctggttccgaatggcaactgcaagaaagagctatctttcaagactacagtatttcagagatcataataatgaaattgtgaaaatacagtcactgttgagagcgaacaaagctagagatgactacaaaacattggttggctctgaaaacccaccattaacagtaattcgcaaatttgtatacctgctggaccaaagtgatttggatttccaggaggaactagaggttgcacgattaagggaagaagtagtgaccaagatcagggccaatcaacagctggaaaaagacctgaacctgatggacatcaagattggactgctggtgaagaacaggatcacactagaggatgtaatttcacatagtaaaaagctgaacaagaaaaaaggaggagaaatggaaatactgaataacaccgacaaccaaggaataaaaagtttgagtaaggagaggagaaaaacactagaaacatatcagcagctgttttaccttttacagaccaaccctttatacttggctaagctgattttccagatgccacagaacaagtccactaaatttatggatactgttattttcacactatataattatgcctctaatcagcgagaagaatatctacttctcaagctttttaaaactgctctggaggaagaaataaaatcaaaagtggaccaggtacaggacatagttactggtaaccctacagtcatcaagatggtcgtcagcttcaatagaggtgcccggggacagaacaccctgcgccaactcctggctccagtggtaaaagagatcatcgacgacaagtcgctgattatcaacacaaaccctgtagaggtgtacaaggcttgggtgaaccaactagaaacacagactggagaggccagcaagttgccttatgatgtgaccacagaacaagctctaacatacccagaagtgaaaaataaactggaggcttccattgagaacctgagaagggtcaccgacaaagtcctgaattctatcatttcttcccttgatctactgccttatggattgaggtatatagccaaagtactgaagaattcgatccatgagaaattccccgatgcaacagaagatgagctattaaagattgttggaaacctcctgtactatcggtacatgaatccagccattgtagctccagatggctttgatatcatcgacatgacagctggaggtcagataaattctgaccaaaggagaaacttaggatcagtggccaaggttcttcagcacgcagcctccaacaagctgtttgaaggagaaaatgagcatctctcatctatgaacaattatttatcagagacgtatcaggaattcaggaaatatttcaaagaagcatgtaatgtccctgagccagaagagaagtttaatatggacaaatacacagacctggtgacagtcagcaaaccagtcatttatatttcaattgaagaaatcatcagcacacactcactcctgttggaacaccaggatgcaattgcccctgagaaaaatgacttactgagtgaattgctggggtcgctgggagaggtgccaaccgtggaatcttttcttggggaaggagcagttgaccccaatgaccctaacaaggcaaatacactaagtcagctttcaaagaccgagatttctcttgtcttgacaagcaaatatgacatagaggacggtgaagctatagatagccgaagcctcatgataaagaccaagaagctgataattgatgtgatccggaaccagccagggaacacattgacagaaatcttagagacaccagcaactgcgcaacaggaggtagaccatgccacggacatggtgagccgtgcaatgatagattccaggactccagaagaaatgaagcatagccaatctatgattgaagatgcacagctgcctcttgagcagaagaagaggaaaatccagaggaatcttcggacgttggaacagactggacacgtgtcatccgaaaataaataccaagacattctcaatgagattgccaaggatattcgaaatcaaagaatctatcgtaagcttcgaaaagctgaattggcaaaacttcagcagaccctgaatgcacttaacaagaaggcagcattttatgaagagcaaatcaattattatgacacctacataaagacttgtttagacaacttaaaaagaaaaaatactcggagatcaattaaactagatggaaaaggagaacccaaaggggcgaagagagcgaagccagtgaagtacactgcagcaaagctgcatgagaaaggtgtcctgctagatatagatgatcttcaaacaaaccagtttaagaatgttacatttgatatcatagctactgaagatgtaggcattttcgatgtaagatcaaaattccttggtgttgagatggaaaaggtgcaactcaatattcaggatttacttcagatgcaatatgaaggagtagctgtaatgaaaatgtttgataaggttaaagtgaatgtaaaccttctcatatacctgctgaacaagaagttctatggaaagtgaagtgcctacagaaatttcttggattctgtatcatctggattaggaaatgaatttgtttaatatttttgtttttaaacatgattgaaatcac

SEQ ID NO: 14936 - DNA, 1647 bp, Homo sapiens
  source 1..1647: mol_type = unassigned DNA
agcagcttgtattcttagaaacgcagcagacagcaactttagcaggtgatttcaatcaagtcagctgaaatgcactcacttccaggtgatcggccttggttctgttaagaccatttttggatggggtgttttaaaggagttgtagctgtagggtacatcaatgaagctattgatgaagggaatcctttgaggactttagaaactttgctcctacctactgcgaatattagtgatgtggacccagcccatgcccagcactaccaggatgttttataccatgctaaatcacagaaactcggagactctgagagtgtttccaaagtgctttggctggatgagatacagcaagccgtcgatgatgccaacgtggacaaggacagagcaaaacaatgggttactctggtggttgatgttaatcagtgtttggaaggaaaaaaatcaagtgatattttgtctgtattgaagtcttccacttctaatgcaaatgacataatcccggagtgtgctgacaaatactatgatgcccttgtgaaggcaaaagagctcaaatctgaaagagtgtctagtgacggttcatggctcaaactcaacctgcacaaaaaatatgactactattacaacactgattcaaaagagagttcctgggtcacacctgaatcatgcttgtataaagaatcatggctcacaggaaaagaaatcgaggacattattgaggaagtcacagtaggttacattcgtgagaatatatggtctgcttcagaagagttgcttcttcgctttcaagccacaagctcaggacccatccttagggaagagtttgaagctagaaaatcatttttgcatgaacaagaagagaatgtggtcaaaatacaggctttttggaaaggatataaacaacggaaggagtatatgcacaggcggcaaacgttcattgataatactgattctattgtgaagattcagtcctggttccgaatggcaactgcaagaaagagctatctttcaagactacagtatttcagagatcataataatgaaattgtgaaaatacagtcactgttgagagcgaacaaagctagagatgactacaaaacattggttggctctgaaaacccaccattaacagtaattcgcaaatttgtatacctgctggaccaaagtgatttggatttccaggaggaactagaggttgcacgattaagggaagaagtagtgaccaagatcagggccaatcaacagctggaaaagacctgaacctgatggacatcaagattggactgctggtgaagaacaggatcacactagaggatgtaatttcacatagtaaaaagctgaacaagaaaaaaggaggagaaatggaaatactgaataacaccgacaaccaaggaataaaaagtttgagtaaggagaggagaaaaacactagaaacatatcagcagctgttttaccttttacagaccaaccctttatacttggctaagctgattttccagatgccacagaacaagtccactaaatttatggatactgttattttcacactatataattatgcctctaatcagcgagaagaatatctacttctcaagctttttaaaactgctctggaggaagaaataaaatcaaaagtggaccaggtacaggaca

SEQ ID NO: 14937 - DNA, 4208 bp, Homo sapiens
  source 1..4208: mol_type = unassigned DNA
tccggctgaaggtttccgtgcttggaaaccgcgcctccgcggaggtagccgttccctgacctagccatggcacagaacactgaaaaccacgaccctgtcggatccatcttaatccagatccatgaagacctttatcagttaaaggagaaattaacaaaattctcacctgaggaaaaaggagagactctagacattcagagtcttgaaacagcaatcaaaaggactgaagtggggttaagaattcacattgagaagtatttaaatgttgtaaaccagaatgtattaacgacttctgttaatgatgagagcttatatactccccaggcttccaaatggttacttccaactgtaattgatcagaaatcatttattttccctcaggaatctgagggtacattttggcaaccccaaagacagcacagttcatctctgcctgtctttccaagagcaaagataaaggtttcgaagttaatcaaagggtctaacatatccagcctcacggttctgccatcttctcattgcacagatccctatttcactcctataccagtcttacaagcagatgcccacaaagggattttaagtatgatagaacgagggctgattccaccaacagcaaggattacctttcagaatccacccattacacccagagcagctcctctgcatagttttgatgaagcacgtaagattccaactgtagccactttcactatacctcgggaaccacctccatctccagcagaagtgaagttctttcccaagaaacaaagatcaaaggggaaaagcagaaggtcaagaggacatcatgataggaaggccatgaaagtcaaaacacctttgagagccctgaaatcactgtgggattatgactttttaatttatgatggtgtcatagacaatacagccccagacttcttagcattcaaggaacattttagcttagcttggggaggtattttttctctcttggaacacgtcgagaagtttctcaggaactatgctataccagaagtcaaaataaaagggaataatttggtggccctccttccagagtttgagctgacgaataaacttaccagatatgaccttctctcagtgttagaggacccagctcatgtccaaatgctgataaatcttccagggcaaaggtacaagggccaagatggaaattcggaggccgccatgaagatccaagccacatggaaatgctacaaagcaagaaaattcttcctcttttatcgccagcagaagtgggcatcaggtgtgattgccattgcttggctgttatattgccataagactcgactaaagaagatactaaaggaatcacgtcagagacacctggagaattttcgcattcgagccaagcatctggcagccaactggaatcgcatcaggacctccaggaggactattatccatatcccatcattagggtattcccagcctgtgagagaacatattgccgatttcaacacacagcagaacatgcagctggggaggctgtgtgacatcttagatgccaatgtgaatgtcatctacatctgctcccatcatatgaatgacgagttagtgctgtattacaaaaaaatcctaagtctacatgcagccgtcaaatctgggaaccttgaggacagaagtgacctgcaggacaggttcaaaattatcacacctgaagctgtaaacatcttccctaagcatcatatgtgcctggccactcacctgatgtacagtcccaaggcaatcaaaagaataaaaaatctcatccgaggaacagaggcctacatcgtcagcgggctcctccacagagatgatttagctgtggccgatatgttagacatacccatcctgggctctgagcctgaactagctcatctttatagtaccaaatctggaggcaaacgtgtctttgacagtgccaatgtggcagttcctcctggaatatatgatatttatagtcagcaacagatgatagagcagctgagtcagctgataactgatcacctgcaaatacagcgttggctctttaaaatggactctgagttccgaggaaatgggactgcattttgtgatattccttcctacctaaagtgctacaaatgggtgctaaaggagagtagcagatatggccttgaagactggagaaagaaatgggcacaagagccagctttggtgaagatctctgaggagctggcgggcattttagcacagcacgcacagccagtcaatgagaaacggttcccgacgtggaggaaattcctccaaacatttctcagtcaagggggtgtgatcgaagcattcccacctgcagacaatgtcaccaacctcacagtggacatgctgatagagcccaacgggaaaatcagcgtgctgtcgacaggggaccagcttcatgctgaaagccccttcatctcctctggtaccaccgtgcctcagacctcagtggatccccaagttctcacttatttgtgcctccaaattggaaaagcctgcagaatgagagatgtggttggttacttttcgatagatctggtgacttttatagatccaagcaccttggaacaacaggtgtgggcaaccggccttaacctcgcatatagtgaccagctggccctgactcaactcaccttatacctgacaaacggccatctggattgcagtttgagcaccctggaagtgccccgctttgttccaaaggaaaggaagaaaaccaaatgcatgagtgcgctgtcaatgccgatgctggcaaccagtcgctatgcagtgatgaccacccagctaagacacagcaatctctcactggttttccactatgtttttctccagatctgtagggcccatggcattggctatgatgttgaggaaaggcaaggaactgtttttatattatatgagcacctgaagagacacaagttgggaatgttaacaatcggcgaggatctccagggggtcctcatgacctttgctcgccatctcttcatcatccatcaagaaatatcagcacctaatatgcaaggcgagaccaattttaagaccaccattgctgatattgaaactattctaagagtaacaaaggaaaacaaaatgagatttgaagaggagcaacagtccaaagatgataaaaacctctctaaacccaagaaatgatcctggaatacagtacataacaatttggatcccagtctggaataaaaagggcaatttttttttctgttagaaataaaagccaggggaaattggtttgctttgtgtgctaggaggtgaatcagaacagattataatgaaatgctctttttaaaacattgtttattaagtgatcttattttatttattaaaccaaaacttatttgtgttttcatttgagagtgttgaacaatcccttcttcttctcaaactcagaaaaaagtaatctgataaaagaagaaagttaaaagtcttactgatatcacctccgcatttacttcctcataggcctcaggattatgtagcttttattttttatgttttataaagttttctcctatttctaatagtccatcgatcttctgcatttataggtttgaataaaggcttaagaattgctatttgtcaaaacacaaatgcctttttttcaaagcttcaaattatattgaaattatatttatatgaatttttaagtgactatcattcatcgtgtttttgttataccaagccactattgtctgctattgttgccatttttcaaaaagtaggataagccagcatctagttaaccaaagcatcagaatgtatctaggtggcagtatctgctcttagtttaagatggagtgtagctcgagctctgtagcttgaataaacatttgtattctctagttctccatttaatacagcagtaggattttttcaagtttagttcaacattatactacctttaaaaaggcagactgttaagattgtagtagtgctgactctaactttcagcattcacttcataattgtccaaaaatatttccacatcagtgagctttactgaagggtgaaataaaagcaaattacaacaccaaaaccattattgttttaaagaatgacctttatgtctataaaaatattttagtgtattggggaaaggaataggatttttacctgtggaatttcaataatttgttaactgtgattcagccacaggctaagagtttctgtaataaaattaacatttgtgtgtgtca

SEQ ID NO: 14938 - DNA, 3903 bp, Homo sapiens
  source 1..3903: mol_type = unassigned DNA
cgcgcgcggtgttgccatggggacgagcggctccggctgaaggtttccgtgcttggaaaccgcgcctccgcggaggtagccgttccctgacctagccatggcacagaacactgaaaaccacgaccctgtcggatccatcttaatccagatccatgaagacctttatcagttaaaggagaaattaacaaaattctcacctgaggaaaaaggagagactctagacattcagagtcttgaaacagcaatcaaaaggactgaagtggggttaagaattcacattgagaagtatttaaatgttgtaaaccagaatgtattaacgacttctgttaatgatgagagcttatatactccccaggcttccaaatggttacttccaactgtaattgatcagaaatcatttattttccctcaggaatctgagggtacattttggcaaccccaaagacagcacagttcatctctgcctgtctttccaagagcaaagataaaggtttcgaagttaatcaaagggtctaacatatccagcctcacggttctgccatcttctcattgcacagatccctatttcactcctataccagtcttacaagcagatgcccacaaagggattttaagtatgatagaacgagggctgattccaccaacagcaaggattacctttcagaatccacccattacacccagagcagctcctctgcatagttttgatgaagcacgtaagattccaactgtagccactttcactatacctcgggaaccacctccatctccagcagaagtgaagttctttcccaagaaacaaagatcaaaggggaaaagcagaaggtcaagaggacatcatgataggaaggccatgaaagtcaaaacacctttgagagccctgaaatcactgtgggattatgactttttaatttatgatggtgtcatagacaatacagccccagacttcttagcattcaaggaacattttagcttagcttggggaggtattttttctctcttggaacacgtcgagaagtttctcaggaactatgctataccagaagtcaaaataaaagggaataatttggtggccctccttccagagtttgagctgacgaataaacttaccagatatgaccttctctcagtgttagaggacccagctcatgtccaaatgctgataaatcttccagggcaaaggtacaagggccaagatggaaattcggaggccgccatgaagatccaagccacatggaaatgctacaaagcaagaaaattcttcctcttttatcgccagcagaagtgggcatcaggtgtgattgccattgcttggctgttatattgccataagactcgactaaagaagatactaaaggaatcacgtcagagacacctggagaattttcgcattcgagccaagcatctggcagccaactggaatcgcatcaggacctccaggaggactattatccatatcccatcattagggtattcccagcctgtgagagaacatattgccgatttcaacacacagcagaacatgcagctggggaggctgtgtgacatcttagatgccaatgtgaatgtcatctacatctgctcccatcatatgaatgacgagttagtgctgtattacaaaaaaatcctaagtctacatgcagccgtcaaatctgggaaccttgaggacagaagtgacctgcaggacaggttcaaaattatcacacctgaagctgtaaacatcttccctatgatagagcagctgagtcagctgataactgatcacctgcaaatacagcgttggctctttaaaatggactctgagttccgaggaaatgggactgcattttgtgatattccttcctacctaaagtgctacaaatgggtgctaaaggagagtagcagatatggccttgaagactggagaaagaaatgggcacaagagccagctttggtgaagatctctgaggagctggcgggcattttagcacagcacgcacagccagtcaatgagaaacggttcccgacgtggaggaaattcctccaaacatttctcagtcaagggggtgtgatcgaagcattcccacctgcagacaatgtcaccaacctcacagtggacatgctgatagagcccaacgggaaaatcagcgtgctgtcgacaggggaccagcttcatgctgaaagccccttcatctcctctggtaccaccgtgcctcagacctcagtggatccccaagttctcacttatttgtgcctccaaattggaaaagcctgcagaatgagagatgtggttggttacttttcgatagatctggtgacttttatagatccaagcaccttggaacaacaggtgtgggcaaccggccttaacctcgcatatagtgaccagctggccctgactcaactcaccttatacctgacaaacggccatctggattgcagtttgagcaccctggaagtgccccgctttgttccaaaggaaaggaagaaaaccaaatgcatgagtgcgctgtcaatgccgatgctggcaaccagtcgctatgcagtgatgaccacccagctaagacacagcaatctctcactggttttccactatgtttttctccagatctgtagggcccatggcattggctatgatgttgagaacaatcggcgaggatctccagggggtcctcatgacctttgctcgccatctcttcatcatccatcaagaaatatcagcacctaatatgcaaggcgagaccaattttaagaccaccattgctgatattgaaactattctaagagtaacaaaggaaaacaaaatgagatttgaagaggagcaacagtccaaagatgataaaaacctctctaaacccaagaaatgatcctggaatacagtacataacaatttggatcccagtctggaataaaaagggcaatttttttttctgttagaaataaaagccaggggaaattggtttgctttgtgtgctaggaggtgaatcagaacagattataatgaaatgctctttttaaaacattgtttattaagtgatcttattttatttattaaaccaaaacttatttgtgttttcatttgagagtgttgaacaatcccttcttcttctcaaactcagaaaaaagtaatctgataaaagaagaaagttaaaagtcttactgatatcacctccgcatttacttcctcataggcctcaggattatgtagcttttattttttatgttttataaagttttctcctatttctaatagtccatcgatcttctgcatttataggtttgaataaaggcttaagaattgctatttgtcaaaacacaaatgcctttttttcaaagcttcaaattatattgaaattatatttatatgaatttttaagtgactatcattcatcgtgtttttgttataccaagccactattgtctgctattgttgccatttttcaaaaagtaggataagccagcatctagttaaccaaagcatcagaatgtatctaggtggcagtatctgctcttagtttaagatggagtgtagctcgagctctgtagcttgaataaacatttgtattctctagttctccatttaatacagcagtaggattttttcaagtttagttcaacattatactacctttaaaaaggcagactgttaagattgtagtagtgctgactctaactttcagcattcacttcataattgtccaaaaatatttccacatcagtgagctttactgaagggtgaaataaaagcaaattacaacaccaaaaccattattgttttaaagaatgacctttatgtctataaaaatattttagtgtattggggaaaggaataggatttttacctgtggaatttcaataatttgttaactgtgattcagccacaggctaagagtttctgtaataaaattaacatttgtgtgtgtc

SEQ ID NO: 14939 - DNA, 3062 bp, Homo sapiens
  source 1..3062: mol_type = unassigned DNA
atgacaaaggccatgaaagtcaaaacacctttgagagccctgaaatcactgtgggattatgactttttaatttatgatggtgtcatagacaatacagccccagacttcttagcattcaaggaacattttagcttagcttggggaggtattttttctctcttggaacacgtcgagaagtttctcaggaactatgctataccagaagtcaaaataaaagggaataatttggtggccctccttccagagtttgagctgacgaataaacttaccagatatgaccttctctcagtgttagaggacccagctcatgtccaaatgctgataaatcttccagggcaaaggtacaagggccaagatggaaattcggaggccgccatgaagatccaagccacatggaaatgctacaaagcaagaaaattcttcctcttttatcgccagcagaagtgggcatcaggtgtgattgccattgcttggctgttatattgccataagactcgactaaagaagatactaaaggaatcacgtcagagacacctggagaattttcgcattcgagccaagcatctggcagccaactggaatcgcatcaggacctccaggaggactattatccatatcccatcattagggtattcccagcctgtgagagaacatattgccgatttcaacacacagcagaacatgcagctggggaggctgtgtgacatcttagatgccaatgtgaatgtcatctacatctgctcccatcatatgaatgacgagttagtgctgtattacaaaaaaatcctaagtctacatgcagccgtcaaatctgggaaccttgaggacagaagtgacctgcaggacaggttcaaaattatcacacctgaagctgtaaacatcttccctatgatagagcagctgagtcagctgataactgatcacctgcaaatacagcgttggctctttaaaatggactctgagttccgaggaaatgggactgcattttgtgatattccttcctacctaaagtgctacaaatgggtgctaaaggagagtagcagatatggccttgaagactggagaaagaaatgggcacaagagccagctttggtgaagatctctgaggagctggcgggcattttagcacagcacgcacagccagtcaatgagaaacggttcccgacgtggaggaaattcctccaaacatttctcagtcaagggggtgtgatcgaagcattcccacctgcagacaatgtcaccaacctcacagtggacatgctgatagagcccaacgggaaaatcagcgtgctgtcgacaggggaccagcttcatgctgaaagccccttcatctcctctggtaccaccgtgcctcagacctcagtggatccccaagttctcacttatttgtgcctccaaattggaaaagcctgcagaatgagagatgtggttggttacttttcgatagatctggtgacttttatagatccaagcaccttggaacaacaggtgtgggcaaccggccttaacctcgcatatagtgaccagctggccctgactcaactcaccttatacctgacaaacggccatctggattgcagtttgagcaccctggaagtgccccgctttgttccaaaggaaaggaagaaaaccaaatgcatgagtgcgctgtcaatgccgatgctggcaaccagtcgctatgcagtgatgaccacccagctaagacacagcaatctctcactggttttccactatgtttttctccagatctgtagggcccatggcattggctatgatgttgagaacaatcggcgaggatctccagggggtcctcatgacctttgctcgccatctcttcatcatccatcaagaaatatcagcacctaatatgcaaggcgagaccaattttaagaccaccattgctgatattgaaactattctaagagtaacaaaggaaaacaaaatgagatttgaagaggagcaacagtccaaagatgataaaaacctctctaaacccaagaaatgatcctggaatacagtacataacaatttggatcccagtctggaataaaaagggcaatttttttttctgttagaaataaaagccaggggaaattggtttgctttgtgtgctaggaggtgaatcagaacagattataatgaaatgctctttttaaaacattgtttattaagtgatcttattttatttattaaaccaaaacttatttgtgttttcatttgagagtgttgaacaatcccttcttcttctcaaactcagaaaaaagtaatctgataaaagaagaaagttaaaagtcttactgatatcacctccgcatttacttcctcataggcctcaggattatgtagcttttattttttatgttttataaagttttctcctatttctaatagtccatcgatcttctgcatttataggtttgaataaaggcttaagaattgctatttgtcaaaacacaaatgcctttttttcaaagcttcaaattatattgaaattatatttatatgaatttttaagtgactatcattcatcgtgtttttgttataccaagccactattgtctgctattgttgccatttttcaaaaagtaggataagccagcatctagttaaccaaagcatcagaatgtatctaggtggcagtatctgctcttagtttaagatggagtgtagctcgagctctgtagcttgaataaacatttgtattctctagttctccatttaatacagcagtaggattttttcaagtttagttcaacattatactacctttaaaaaggcagactgttaagattgtagtagtgctgactctaactttcagcattcacttcataattgtccaaaaatatttccacatcagtgagctttactgaagggtgaaataaaagcaaattacaacaccaaaaccattattgttttaaagaatgacctttatgtctataaaaatattttagtgtattggggaaaggaataggatttttacctgtggaatttcaataatttgttaactgtgattcagccacaggctaagagtttctgtaataaaattaacatttgtgtgtgtc

SEQ ID NO: 14940 - DNA, 3965 bp, Homo sapiens
  source 1..3965: mol_type = unassigned DNA
cgcgcgcggtgttgccatggggacgagcggctccggctgaaggtttccgtgcttggaaaccgcgcctccgcggaggtagccgttccctgacctagccatggcacagaacactgaaaaccacgaccctgtcggatccatcttaatccagatccatgaagacctttatcagttaaaggagaaattaacaaaattctcacctgaggaaaaaggagagactctagacattcagagtcttgaaacagcaatcaaaaggactgaagtggggttaagaattcacattgagaagtatttaaatgttgtaaaccagaatgtattaacgacttctgttaatgatgagagcttatatactccccaggcttccaaatggttacttccaactgtaattgatcagaaatcatttattttccctcaggaatctgagggtacattttggcaaccccaaagacagcacagttcatctctgcctgtctttccaagagcaaagataaaggtttcgaagttaatcaaagggtctaacatatccagcctcacggttctgccatcttctcattgcacagatccctatttcactcctataccagtcttacaagcagatgcccacaaagggattttaagtatgatagaacgagggctgattccaccaacagcaaggattacctttcagaatccacccattacacccagagcagctcctctgcatagttttgatgaagcacgtaagattccaactgtagccactttcactatacctcgggaaccacctccatctccagcagaagtgaagttctttcccaagaaacaaagatcaaaggggaaaagcagaaggtcaagaggacatcatgataggaaggccatgaaagtcaaaacacctttgagagccctgaaatcactgtgggattatgactttttaatttatgatggtgtcatagacaatacagccccagacttcttagcattcaaggaacattttagcttagcttggggaggtattttttctctcttggaacacgtcgagaagtttctcaggaactatgctataccagaagtcaaaataaaagggaataatttggtggccctccttccagagtttgagctgacgaataaacttaccagatatgaccttctctcagtgttagaggacccagctcatgtccaaatgctgataaatcttccagggcaaaggtacaagggccaagatggaaattcggaggccgccatgaagatccaagccacatggaaatgctacaaagcaagaaaattcttcctcttttatcgccagcagaagtgggcatcaggtgtgattgccattgcttggctgttatattgccataagactcgactaaagaagatactaaaggaatcacgtcagagacacctggagaattttcgcattcgagccaagcatctggcagccaactggaatcgcatcaggacctccaggaggactattatccatatcccatcattagggtattcccagcctgtgagagaacatattgccgatttcaacacacagcagaacatgcagctggggaggctgtgtgacatcttagatgccaatgtgaatgtcatctacatctgctcccatcatatgaatgacgagttagtgctgtattacaaaaaaatcctaagtctacatgcagccgtcaaatctgggaaccttgaggacagaagtgacctgcaggacaggttcaaaattatcacacctgaagctgtaaacatcttccctatgatagagcagctgagtcagctgataactgatcacctgcaaatacagcgttggctctttaaaatggactctgagttccgaggaaatgggactgcattttgtgatattccttcctacctaaagtgctacaaatgggtgctaaaggagagtagcagatatggccttgaagactggagaaagaaatgggcacaagagccagctttggtgaagatctctgaggagctggcgggcattttagcacagcacgcacagccagtcaatgagaaacggttcccgacgtggaggaaattcctccaaacatttctcagtcaagggggtgtgatcgaagcattcccacctgcagacaatgtcaccaacctcacagtggacatgctgatagagcccaacgggaaaatcagcgtgctgtcgacaggggaccagcttcatgctgaaagccccttcatctcctctggtaccaccgtgcctcagacctcagtggatccccaagttctcacttatttgtgcctccaaattggaaaagcctgcagaatgagagatgtggttggttacttttcgatagatctggtgacttttatagatccaagcaccttggaacaacaggtgtgggcaaccggccttaacctcgcatatagtgaccagctggccctgactcaactcaccttatacctgacaaacggccatctggattgcagtttgagcaccctggaagtgccccgctttgttccaaaggaaaggaagaaaaccaaatgcatgagtgcgctgtcaatgccgatgctggcaaccagtcgctatgcagtgatgaccacccagctaagacacagcaatctctcactggttttccactatgtttttctccagatctgtagggcccatggcattggctatgatgttgaggaaaggcaaggaactgtttttatattatatgagcacctgaagagacacaagttgggaatgttaacaatcggcgaggatctccagggggtcctcatgacctttgctcgccatctcttcatcatccatcaagaaatatcagcacctaatatgcaaggcgagaccaattttaagaccaccattgctgatattgaaactattctaagagtaacaaaggaaaacaaaatgagatttgaagaggagcaacagtccaaagatgataaaaacctctctaaacccaagaaatgatcctggaatacagtacataacaatttggatcccagtctggaataaaaagggcaatttttttttctgttagaaataaaagccaggggaaattggtttgctttgtgtgctaggaggtgaatcagaacagattataatgaaatgctctttttaaaacattgtttattaagtgatcttattttatttattaaaccaaaacttatttgtgttttcatttgagagtgttgaacaatcccttcttcttctcaaactcagaaaaaagtaatctgataaaagaagaaagttaaaagtcttactgatatcacctccgcatttacttcctcataggcctcaggattatgtagcttttattttttatgttttataaagttttctcctatttctaatagtccatcgatcttctgcatttataggtttgaataaaggcttaagaattgctatttgtcaaaacacaaatgcctttttttcaaagcttcaaattatattgaaattatatttatatgaatttttaagtgactatcattcatcgtgtttttgttataccaagccactattgtctgctattgttgccatttttcaaaaagtaggataagccagcatctagttaaccaaagcatcagaatgtatctaggtggcagtatctgctcttagtttaagatggagtgtagctcgagctctgtagcttgaataaacatttgtattctctagttctccatttaatacagcagtaggattttttcaagtttagttcaacattatactacctttaaaaaggcagactgttaagattgtagtagtgctgactctaactttcagcattcacttcataattgtccaaaaatatttccacatcagtgagctttactgaagggtgaaataaaagcaaattacaacaccaaaaccattattgttttaaagaatgacctttatgtctataaaaatattttagtgtattggggaaaggaataggatttttacctgtggaatttcaataatttgttaactgtgattcagccacaggctaagagtttctgtaataaaattaacatttgtgtgtgtc

SEQ ID NO: 14941 - DNA, 1000 bp, Homo sapiens
  source 1..1000: mol_type = unassigned DNA
cgcgcgcggtgttgccatggggacgagcggctccggctgaaggtttccgtgcttggaaaccgcgcctccgcggaggtagccgttccctgacctagccatggcacagaacactgaaaaccacgaccctgtcggatccatcttaatccagatccatgaagacctttatcagttaaaggagaaattaacaaaattctcacctgaggaaaaaggagagactctagacattcagagtcttgaaacagcaatcaaaaggactgaagtggggttaagaattcacattgagaagtatttaaatgttgtaaaccagaatgtattaacgacttctgttaatgatgagagcttatatactccccaggcttccaaatggttacttccaactgtaattgatcagaaatcatttattttccctcaggaatctgagggtacattttggcaaccccaaagacagcacagttcatctctgcctgtctttccaagagcaaagcgaaagatagggttgaatgtaaaaatcttgcaggatcctgaaaacatccaccacagagctgctgtaaatgcgaactatggaatcagtttgccatatattaatcagagaaaagcatgttaggtcctcaaaggtatgtggaaacaagaagaaatccctggtactgttcatgttccctcactgacatccagttccagttagactttataatacaacacattaagaaatctacagaaaatttgactttgatttattccttttaaataaaaagtgtttcttaaaaggcttgaaacatgtatctgttaacatgaattttaaaagaacaattatgaatgcataacaaaatagccaaaccaaacattgctttgaattgctgcacaaataactgattataactgttatgacctagaaaaaaatcataaaaacatttttctttttggcaagatgtgagttgctgtagaattataccagttctttggttctactttccaaataaatatatatataatgcaatgtaaa

SEQ ID NO: 14942 - DNA, 1460 bp, Homo sapiens
  source 1..1460: mol_type = unassigned DNA
tcacattcccccacagtcacattgcgctctgtgattctgaggaatacagtgtgccagcatccgatccagtctcctttcacctgcaggtgttccagaaacttcaaaatgcgtctggaagaactgaaaagattgcagaatcctctagaacaagttaatgatggaaaatattcatttgaaaatcaccagctggccatggatgcagagaataatattgaaaagtatcccctcaatctacagcccttggaatcaaaggtgaaaatcattcagcgagcatggcgagagtacctgcagcggcaggagcccctggggaagaggagcccgtccccaccctctgtctcctcagagaagctgagcagctctgtcagcatgaacaccttctccgacagcagcacacccgtgagtgtcatgtttctttttctatgtcctgacttgacattcaactgaaagcctagactttggttctaagagagaaatcttgggatgtgagcaggtggtttgtgacagtgaagatctatgtagcttatttgctacccaggaacccatggtgagagttttgtcacctcaaaataaagacacaattcataagcacaaagtgaactttatcaagtctggagaaaatagattgcatttatgtgttctcatttctctattatggaggtatcttttttgcttttctttataatagcatatttcttttagtatgtgctgtgtgtttcttttattgtgtggtgctaatatgatagaagataagattggttataaggagtagaaagagaacttttaccagaagaattgaaagtggtcacacactcaggggttgcaacttaaatgtctccaggggccaggtaagtcaccctcatgactgaggtggctgagctgtgcccctggctacacggagaacatagacctcacctgaagggcagcgcacttggctcctgacaatgtgacaccatgtggcgatacaggcaggcatggccaaatgtgattttctttcttcaggacatgtcagaaatctgcatttttaagtgttagcagccagtaagaaaatttaaaaggtaaagtaagcatgcctacagaccacaattgacctacaggccaccagtttaagaaatctgagatagagagttaaggaataagggaatctgctggaagtctttatttttaaaaaacaccaaaagtgggaagaaatcagtgatgagggatttatgaaccaggattttgtggatttaagcattgtgataatttgtaaccagtcactgaaatgctgaaaagttagagaaatgaagtaattacacaagtatattacttccaaaaatttttcttttacttttggttatcatgtttattctgtggtaaaaaggtttcccaacactcaacgcaatgtattctttttgggatcaggtaaaagttactgtatttgaaatgttttcagatggttgcattgcatattcttcaataaa

SEQ ID NO: 14943 - DNA, 885 bp, Homo sapiens
  source 1..885: mol_type = unassigned DNA
tcacattcccccacagtcacattgcgctctgtgattctgaggaatacagtgtgccagcatccgatccagtctcctttcacctgcaggtgttccagaaacttcaaaatgcgtctggaagaactgaaaagattgcagaatcctctagaacaagttaatgatggaaaatattcatttgaaaatcaccagctggccatggatgcagagaataatattgaaaagtatcccctcaatctacagcccttggaatcaaaggtgaaaatcattcagcgagcatggcgagagtacctgcagcggcaggagcccctggggaagaggagcccgtccccaccctctgtctcctcagagaagctgagcagctctgtcagcatgaacaccttctccgacagcagcacaccctttgccagggcccctgttgggaagattcatccttacatctcttggaggttgcagtcacctggggacaagttgcctggtggaaggaaggtgattcttctctaccttgaccagcttgccagacccactgggttcatacatactctcaaggagccccagatagaaagacttggttttctcaccctccagtgaatggacctcaagtttatggagggaataggatgatccctggcctacactgactaagcctgtcatcaagaaatgagcttcctctaacaaccatgagtccatttggaacttctgtgttaaaagccttcagtccaagtcaaatgttgtcagtgagctgtgtccctggggagttctttatgccctgcctcttgcttgatcttttccaggttgttgaacctcagccctctttctctgggtttaatctattgctgttactgcctagacaattttctatcttctcatatctgatcaactgactgtctt

SEQ ID NO: 14944 - DNA, 1408 bp, Homo sapiens
  source 1..1408: mol_type = unassigned DNA
tcacattcccccacagtcacattgcgctctgtgattctgaggaatacagtgtgccagcatccgatccagtctcctttcacctgcaggtgttccagaaacttcaaaatgcgtctggaagaactgaaaagattgcagaatcctctagaacaagttaatgatggaaaatattcatttgaaaacattcagcgagcatggcgagagtacctgcagcggcaggagcccctggggaagaggagcccgtccccaccctctgtctcctcagagaagctgagcagctctgtcagcatgaacaccttctccgacagcagcacaccctttgccagggcccctgttgggaagattcatccttacatctcttggaggttgcagtcacctggggacaagttgcctggtggaaggaaggtgattcttctctaccttgaccagcttgccagacccactgggttcatacatactctcaaggagccccagatagaaagacttggttttctcaccctccagtgaatggacctcaagtttatggagggaataggatgatccctggcctacactgactaagcctgtcatcaagaaatgagcttcctctaacaaccatgagtccatttggaacttctgtgttaaaagccttcagtccaagtcaaatgttgtcagtgagctgtgtccctggggagttctttatgccctgcctcttgcttgatcttttccaggttgttgaacctcagccctctttctctgggtttaatctattgctgttactgcctagacaattttctatcttctcatatctgatcaactgactgtcttgtcccaagtcccttccttccttctactaacctctaacacaaccttaatggaggccaacaagcccttacctaacttctggacattgccagctgctctgcagccccacgcccataactgcaattattgcctatctcaactatctaccccaggcatgcactacacaggaaatcagctcactaatctggttgagttcctgtgtggagctgataatgatgcttttgcatgcttctgctctgattgttttggctaggcctagtggttaatgtggttctttgaacatttctgccttaaaatatataacaaaagtaacgtttaagtatgagtgctcaaattcattatcttaataaaagctgagcacttgttatgtgccaggcactctgctattatcttgtttaatcctatcaatgatcatacaaagaaagacactattattatctccattttacaggtgatgaaaaagagacttaaagagataactaccttttcttgggccacccattgggttggagctccatattttattcttccactatattacttgaaaagaaggctgcatttagacacggtcaagcaatcagttcatgcatttctaagactgctttac

SEQ ID NO: 14945 - DNA, 6354 bp, Homo sapiens
  source 1..6354: mol_type = unassigned DNA
gctctgctgctctcgcgatatttgcgcgagcctgcttccttctttcctcccttgccagtccgcctgtcttcctccccgtcttccctgcccggcctcccccttcttcccccgctggccccctccccggagggataatatggtctccggcgatggacgccccaaaagcaggatacgcctttgagtaccttattgaaacattaaatgacagttcacataagaagttcttcgatgtatctaaacttggcaccaagtatgatgttctgccttactcaatacgggtcttgttggaagctgctgtacgaaattgtgatggctttttaatgaagaaggaagatgttatgaacattttagactggaaaaccaaacaaagcaatgttgaagtgccctttttccctgcccgtgttcttcttcaagattttactggaataccagcaatggtggattttgctgctatgagggaggcagtgaaaactcttggaggtgatcctgagaaagtccatcctgcttgtccgacagatcttacagttgaccattctttacaaattgacttcagtaaatgtgcaatacagaatgcaccaaatcctggaggtggtgacctgcagaaagcaggaaagctctctccagttaaagtgcagcctaagaagcttccctgcagaggccagactacctgccgaggatcttgtgattctggagaactaggccgaaactcaggaacattttcttcgcagattgagaatacacccatcctgtgtccttttcatttgcaaccagtgcctgaacctgaaacagtgttaaaaaatcaagaagtagaattcggcagaaatcgagagaggcttcagttttttaagtggagttcaagagtttttaagaatgtggcagtgatccctcctggaactggaatggctcatcaaataaacttagaatatttgtcaagagtggtttttgaagaaaaagacctcctcttcccagacagtgtagtcggcacagattcacacataacgatggtgaatggtttagggattctggggtggggggttggaggcattgaaacagaagcagttatgcttggtctgccagtttctcttactttaccagaggtggttggatgtgagttaactgggtcatcaaacccttttgttacatccatagatgttgttcttggtattacaaagcacctcaggcaagtaggagtggctggaaagtttgttgagttttttggaagtggagtttcacaattatctatagttgatcgaactacaatagcaaacatgtgtccggaatatggtgctatcctcagctttttccctgttgacaatgtgacattaaaacatttagaacatacaggttttagcaaagccaaactcgaatcaatggaaacataccttaaagctgtgaaattgtttcgaaatgaccagaattcttcaggagaacctgaatactcccaggtgatccagattaatctgaattcaatagttccatctgttagtggtccaaaaagacctcaggatagagttgctgtgacagatatgaaaagcgatttccaggcttgcttaaatgaaaaggttggatttaaaggcttccaaattgcagctgaaaaacaaaaggatattgtctccattcattatgaaggaagtgaatataagctgtctcatggatcagtggtcattgctgcagttatcagttgtaccaataattgcaatccatctgtcatgcttgctgcaggtcttttggctaaaaaggctgttgaagctggtctgcgtgttaaaccttatataagaacaagtttatctccaggcagtgggatggttacacattacctcagttcaagtggagtattaccatatctaagtaagcttggatttgaaatcgttggctatggatgttcaatttgtgtgggaaatacagcacccttatcagacgcagttttaaatgcagtaaaacagggtgatttggttacctgtggaattttatctggaaacaaaaattttgaaggtcgtctttgtgattgtgttcgtgccaattatcttgcctctccacccttagtggtagcttatgccatagcaggcacagtgaatatagatttccagacagaacctttaggtactgaccccaccggcaagaacatttacctgcatgatatttggcctagtcgagaagaagttcatcgagtagaggaagaacatgttatactatccatgtttaaagcattaaaagataaaatagaaatggggaataaacggtggaattccttagaagcaccggattcagttttgtttccatgggacttaaagtctacttatatcagatgcccttcattttttgataaacttaccaaagagccaattgcactccaggctattgaaaatgcccatgtcttattatatttgggagactctgtcacaacagatcatatatcacctgcaggaagtatcgctaggaatagtgctgccgctaagtatttgacaaacagaggccttacccctcgtgaattcaactcttacggagctcgaagaggtaatgatgctgtaatgacaagaggcacttttgcaaatatcaagctttttaataagtttattggaaaaccagctcctaaaacaattcattttccatcaggacagacgctagatgtatttgaggctgcagagctgtaccagaaagaaggtatcccactgattattttagcaggaaagaaatatggttcaggaaactccagagactgggctgccaaaggaccgtatttactgggtgtgaaagctgttttggccgaaagttatgaaaaaatacacaaagatcatttgattggaattggcatagctccacttcagttccttccaggagaaaatgcagattccttgggcctctccggtagagaaacattttctttaacatttcctgaagaactgtctcctggaattacattgaatatacagacaagcactggaaaagtattcagcgtgattgcttcgtttgaagatgatgtggaaataacattatacaaacatggaggattattaaactttgtggcacgaaaattctcatagtatctacttaccatagatacctttcataactggtaactgcaaagccttttgtgctggacccaggaatccttaccatggagcagcagatagtcccagtatactcacttatctcatccatggatgtaaatgatgatgaatcaacatagtaactgaaatgaaatcttcttgattttaaataatatacgaatggtgctattaatattgctaaaatcaacgtgtgaagtgtgttgtggaagagacctgtaagtatggggggggggcgatattttatcagaccattttgtaaataaaggcagaatttgtgttgaagattcttatatgaataaccttcctggatttgtttagttttgcaccaataaaactgtgtactactgtttgttggtttaagagtagcagattgaaatataagaagccagattagactctaaaattgtggccattggaatctcatttataaatggaccttttaagtatattaattcctcttcagaattgagctggacacatttggcattcttagtttgtcatataaccaggtttatccttagtctaactgcaagggatggaacctgccccaggtcacaatcattctgtccaatccagccaaggttccctccacatatgaagatggaccatggcaggatacaactgattgtgtggcaccatgtattagcagtgggaatatgtatcacatatgatgcagcctttcatatttcagcagtttgccactgtgactgtctggcaagcccccagatggcgttatattaattggattagattattttgctcaccttatgtaatactgtaacttcctataacctaatattttcggtatcattaaccaaaatttcacactcatagttgctaaagagaatgttattcaatcattaaactctgaactgatttcttctatacatttaaattatccaccctcaataatacgggtgctcaaccctatgcattttttaagtgttgctatttcttaattaaattgatttcctgtcattttgaatcatttatcacctgcgatgcatgattctattaattttgttatgttactgttttaaccaaagctgaccgtaaggataaaacacttaagttgttgctgagtactatatatcctcaatatgcatgtctgcccatcacatcaaatgttctgtcaacaagatgtttggtaattttttttaaaaaggttggaaaattaattatagaaggttctatactgtttttttaattaagaaactaagtctagcaggctaaaggttaattgtagtgattttttttcacatagatatctttctatgacctagttagttactgcaattcagaattagttcacattgcataaagaattacttgttgtaagcaaaatgctgaaactaccaaaccagtggatgaagaccactaagaactttgcacataatcatacaatcttttgaaaatattttgcaaatatgtgtttagacaataagatggactagagttcgacaaaatgatttctttatttaaattttgtataagtattttcttcgacactttcaaattatattgtgttcttgatatatgctgtatatttatttgttagtgcatgtgtttttaatttacatgaaaacatgagttaggagaaattacaggttgaaagatgaaatgcctgtatgtgctctgaagaaatggtaattccagattgtgcagggggaaacaaatctattttgttttgttttgttttttgagacggagtcttgccctgtggctgggctggagtgcaatggcgcgatcttggctcactgcaacctccgcctcccgggttcaggggattctcctgcctcagcctcctgagtagctgggactacaagcatgcaccaccacgcccagctaatttttgtagttttagtagagatggggtttcaccatgttggccagatgatctgaatctcttgacctcgtgatccgcccgccttggcctccacaagtgctgggattacaggtgtgagccaccacacccggcctatattgttttgaaagcatactctatatatagttatgggcagaggcacaggcatcctcagcagctgattcaggagatgatggtaaagctagctaactatgaattaaacattcacatatccagtctacctggtccagtaataatacaagcaaatcttgtatttcaggaacaaatcaaggttctcttaattttttggcttatatacaatgaagtaaaaacttgataaacatggtttcaaattgaggaggagagtcttggatgtatgttttaatatgtataccttataattctgcctctagccaaatgctatgtttgcaaaatgtggcatctgttagtttttattgtctgtgtcttctttgtttactataccttgggtaattttgtgttaccaaaaaaaaaaaaaaaaaaaggaagtgtaatgtcagacacacaagaaaagcaaatcagtgttgtaagcttaaagtacaatttcaaaggtcactaccaacagcagggttttttttatactttgaaaacattatgctacatatcattgccattttcatattttggggttttgctactcttatacaatggaatcaatggaaatgtcatccagccactgaattgccattattatatctaaaaagtttctaagatgacagttatcactattttgttttatctccatgctgacatttgaaagaaggtactagtatccctctagccagattgcttagtttttcgttggtaatcaaacaacagttgtactaaaggaaagtaaagctaggacctaaatcagaatcatagttgcctgcatatatggtaacaaggtcgtgtgcatttgctttcacagtgatgagtgagaggatgagaagaaattatttgacatttttctgtggttgaatagaagacacctttcttttgtctttaggtttaggaggagatactaagatactggatgtttatcctatcttagtttggttggagtaataagagagaagaagagggtggactttggcttttcagtgttttttcccctaaagagtgatattgctgacgtttctatcaattttacacataatatgtggctatgaaaccatatatctcacttaagtaacaaagtaatcactttgtctatcactaagtaatagacaaaaatcattgtctattatttaaagccaacaaaacagtgtaacagttttaagttcaataatgttaagtattgtatagaaatatattggaggcaaagttcagttgatgacaattgtgtatatgttactgatgctgtaaattatttttaataaagaaaattgtattatcacattt

SEQ ID NO: 14946 - DNA, 813 bp, Homo sapiens
  source 1..813: mol_type = unassigned DNA
tcccgggggtgggcgtccccgggggccgatcgcctccacactcctgccggcctgcgctgttcggccgttccggttaagcagaggctgaacgtgcccggtggcgggggttcccggtggtggcccggagtcctagcctggagacaccttcagcagtaaacaagataaaacaacttcttaaagataagcctgagcatgtaggtgtaaaagttggtgtccgaaccaggggctgtaatggcctttcttatactctagaatatacaaagacaaaaggagattctgatgaagaagttattcaagatggagtcagagtattcatcgaaaagaaagcacagctaacacttttaggaacagaaatggactatgttgaagacaaattatccagtgagtttgtgttcaataacccaaacatcaaagggacttgtggctgtggagaaagctttaatatttgaaatctcaggactcttctggccgtaggttccaggaaagctcgtggaagctttggggctcactgcagaaatcatgtgactgtcacgtgctggaaaataaagtgatacatcttgaaaatgaatccagtgtgttggattccagaagaaatgatatttatattctctataggggacagaaaatgagaagccatcactctttttggatcatttaggtctcttgtatcctttgttttagaaccagtttcattaaagttgccttcctgggcacctgtttatccatttcctgaactgtgtgcactccttagatcgctattgatggcttgatcatccctcagcatttctcccaaccagatcggtgactcctaaa

SEQ ID NO: 14947 - DNA, 1264 bp, Homo sapiens
  source 1..1264: mol_type = unassigned DNA
aatgcgcccgccgtgtccatggagagaagctgaggcggccgaccttcggcccgaggcaccggggcgccgggacggcgaagatgtcggcttccttagtccgggcaactgtccgggctgtgagcaagaggaagctgcagcccacccgggcagccctcaccctgacaccttcagcagtaaacaagataaaacaacttcttaaagataagcctgagcatgtaggtgtaaaagttggtgtccgaaccaggggctgtaatggcctttcttatactctagaatatacaaagacaaaaggagattctgatgaagaagttattcaagatggctggagtgcagtggtgtgatctcggcttgctgcaacctccacctccctggttcaagcgatcctcccacctcagcctcccaagtagctgggattataggcgcccaccaccatgcctggttcatttttgtatttttagtggagctgtattatcaactcatgtttttgaggaatcctgtatttccaatttttattcaaagctatttattataatttaatttataattaaaattaattatatttgctgctgcccccttcttccaccctataatctgttaaaacctatctaaaataaataatttatcttgtcattggaagtatgcacttagcttgcagttcttacctacatgggagaatgaggcctagattcctaagtgtgctttcttattaaactaaagttataactatcaataaagaccttttaaaaatgtattattttaaaaattataacacattataaaccttaagattttcatcttaaagaagaggtgacttaattatatattgtttatatttagctaatggctcaatttcttgtaaggaagaaagtttttttgttgtttcgttgttttgtttgtttgttgagacagagtcttgctctcttacccaggctggagtgcagtggcacaatcatggttcactgtagcctctgtctcccgggctcaagcagtcctcccacctcagcctcccgagtagctgggactacaggtgcccaccactgtgcccggctaatttttgtatttttagtggagccagggttttgccctgtttcccagactagaaagctttcttaaattgattgtatttgttggctgggcactgtggctcacacctgtaatcccagcactttgggaggccgaggtgggaggatcacttgagcccaggaatgcaagaccagcttgggccacgtggtgaaaccctgactctaaaaaaattagttggtcc

SEQ ID NO: 14948 - DNA, 1958 bp, Homo sapiens
  source 1..1958: mol_type = unassigned DNA
gccgtgtccatggagagaagctgaggcggccgaccttcggcccgaggcaccggggcgccgggacggcgaagatgtcggcttccttagtccgggcaactgtccgggctgtgagcaagaggaagctgcagcccacccgggcagccctcaccctgacaccttcagcagtaaacaagataaaacaacttcttaaagataagcctgagcatgtaggtgtaaaagttggtgtccgaaccaggggctgtaatggcctttcttatactctagaatatacaaagacaaaaggagattctgatgaagaagttattcaagatggagtcagagtattcatcgaaaagaaagcacagctaacacttttaggaacagaaatggactatgttgaagacaaattatccagtgagtttgtgttcaataacccaaacatcaaagggacttgtggctgtggagaaagctttaatatttgaaatctcaggactcttctggccgtaggttccaggaaagctcgtggaagctttggggctcactgcagaaatcatgtgactgtcacgtgctggaaaataaagtgatacatcttgaaaatgaatccagtgtgttggattccagaagaaatgatatttatattctctataggggacagaaaatgagaagccatcactctttttggatcatttaggtctcttgtatcctttgttttagaaccagtttcattaaagttgccttcctgggcacctgtttatccatttcctgaactgtgtgcactccttagatcgctattgatggcttgatcatccctcagcatttctcccaaccagatcggtgactcctaaaatctgagacaggacatcgtgactgctggtagtaatatggtggtgcattgttttttccacccaaacttaacatagcctttttatacatttttatgaaaaatttcattgtcagctgcctcactgcatactctttaatagtaccaggcaaagattttcttcaactatagtacagattagttctgagtgatggtatcaaaaggtgagaaagacgtcatccgcctttttttaatccatttcttttgccaccctatatgtctgttcagagatgggctctcaagctgactttgattcttttagttgagaagtctcttaaagccatctagcccacctccatcaattccctatgtgaggaagcaaaaccccagggaagccaaagggctcctgtccaccctgacaccacaggccgggggagagtagggactctacccccctctccccttgtaggtgacacatgctctgccctctgaggcagtcagcgaaggcaaatggtctgacttctttatgtggtcaacattttgatagaatttctttataatttgatagagattatattatttttattttattttgagtgggaagaattttaaaacctttttatgtcaattaccatcttgtttctttcacctttgaaacaatggtttgtagcagagatgacattgtagcaacccagaattatgcttttggaatgtggtcctcactgtacaggagaatgtgtaatcttttgttaaaattcccagtgtgcatacattttctggttcctcggtccagttgctaaagttcttagtattttagcctaacatatttatcaccaacttttctttaaaagtgttccttttgtcacttagttactgattttcctgggtttgacataagtattctatgagatgatatatatgctttttttgaaagctgattctcatgaattcaagtagctgagttcctttatgtttcgtttattcactaaagtagctgacacaaaacacaccaaaacctagagcggtagttttatgtaaatgctcatgagtttgtatcaataatataattgttgatccacttataattcgtgcaacactgtatgtatgtagagattgagttgtcaattaaaaaaaatgtggcctctttgtgatcataaaa

SEQ ID NO: 14949 - DNA, 1163 bp, Homo sapiens
  source 1..1163: mol_type = unassigned DNA
ggcggtgaagacattcctcccgggccctgcgccctgcagcgtggtaaccccactgccggagaccgtgcgcaacccagctgctagacccccggcgttgagcggcaaaaccccgccccgagcggcttgccccgcccccggctcgtcactcatgcaactcacccaatggtggcggcggggggcggggctaggactgagggcgccgtgcgccgaagcttgtggcgtcaatgcgcccgccgtgtccatggagagaagctgaggcggccgaccttcggcccgaggcaccggggcgccgggacggcgaagatgtcggcttccttagtccgggcaactgtccgggctgtgagcaagaggaagctgcagcccacccgggcagccctcaccctgacaccttcagcagtaaacaagataaaacaacttcttaaagataagcctgagcatgtaggtgtaaaagttggtgtccgaaccaggggctgtaatggcctttcttatactctagaatatacaaagacaaaaggagattctgatgaagaagttattcaagatggagtcagagtattcatcgaaaagaaagcacagctaacacttttaggaacagaaatggactatgttgaagacaaattatccagtgagtttgtgttcaataacccaaacatcaaagggacttgtggctgtggagaaagctttaatatttgaaatctcaggactcttctggccgtaggttccaggaaagctcgtggaagctttggggctcactgcagaaatcatgtgactgtcacgtgctggaaaataaagtgatacatcttgaaaatgaatccagtgtgttggattccagaagaaatgatatttatattctctataggggacagaaaatgagaagccatcactctttttggatcatttaggtctcttgtatcctttgttttagaaccagtttcattaaagttgccttcctgggcacctgtttatccatttcctgaactgtgtgcactccttagatcgctattgatggcttgatcatccctcagcatttctcccaaccagatcggtgactcctaaaatctgagacaggacatcgtgactgctggtagtaatatggtggtgcattgttttttccacccaaacttaacatagcctttttatacatttttatgaaaaatttcatt

SEQ ID NO: 14950 - DNA, 994 bp, Homo sapiens
  source 1..994: mol_type = unassigned DNA
ggcgcaggcgcaagccggcaagatggcggcggctggggctttccgtctgaggcgggcggcatcggctctgctgctgcggagcccccgcctgcccgcccgggagctgtcggccccggcccgactctatcacaagaaggttgttgatcattatgaaaatcctagaaacgtggggtcccttgacaagacatctaaaaatgttggaactggactggtgggggctccagcatgtggtgacgtaatgaaattacagattcaagtggatgaaaaggggaagattgtggatgctaggtttaaaacatttggctgtggttccgcaattgcctccagctcattagccactgaatgggtgaaaggaaagacggtggaggaagccttgactatcaaaaacacagatatcgccaaggagctctgccttcctcccgtgaaactgcactgctccatgctggctgaagatgcaatcaaggccgccctggctgattacaaattgaaacaagaacccaaaaaaggagaggcagagaagaaatgagccctccctcggcgaagcctccagcaggccacaccagctgtttcccacctgctgtgcagtcaccttagatgttcagaagccgcttcctctccactgaagagctatgagatacgcacaatacttgctgttcacgttatgactctcatgcaagcaaaatacacagtttcattgttctgaatcctgtggtttctttcagcccacttttatcgccttaacctagttaatgtatattttgaattgtgtgtatgacctcagaactgaaattgataatgaagttgcaagttttgatagcccgtgaagtgcataagtatctaattttacctgaattgatttggggggaaattaccagtagaatgccttggtctgaatatttgatagaaccaattgttgtacataaaacagattgcgcatatatatatatgtataaaaaataataaaataatggaagatgatggtgttctctagtaa

SEQ ID NO: 14951 - DNA, 1168 bp, Homo sapiens
  source 1..1168: mol_type = unassigned DNA
aggcgcaagccggcaagatggcggcggctggggctttccgtctgaggcgggcggcatcggctctgctgctgcggagcccccgcctgcccgcccgggagctgtcggccccggcccgactctatcacaagaaggtatctcaaatctgtgaagtattgtagaggagacacaaaaggaattgggggtcacaaatggttctcattgacatgagtgtagacctttctactcaggttgttgatcattatgaaaatcctagaaacgtggggtcccttgacaagacatctaaaaatgttggaactggactggtgggggctccagcatgtggtgacgtaatgaaattacagattcaagtggatgaaaaggggaagattgtggatgctaggtttaaaacatttggctgtggttccgcaattgcctccagctcattagccactgaatgggtgaaaggaaagacggtggaggaagccttgactatcaaaaacacagatatcgccaaggagctctgccttcctcccgtgaaactgcactgctccaaatctgtgctgtttccagcagaggagaaaactcagctttcgccataatcctgtttcctgtgtatttcttcacttcctgtctggatggtattcctgtcgggtgctggctgaagatgcaatcaaggccgccctggctgattacaaattgaaacaagaacccaaaaaaggagaggcagagaagaaatgagccctccctcggcgaagcctccagcaggccacaccagctgtttcccacctgctgtgcagtcaccttagatgttcagaagccgcttcctctccactgaagagctatgagatacgcacaatacttgctgttcacgttatgactctcatgcaagcaaaatacacagtttcattgttctgaatcctgtggtttctttcagcccacttttatcgccttaacctagttaatgtatattttgaattgtgtgtatgacctcagaactgaaattgataatgaagttgcaagttttgatagcccgtgaagtgcataagtatctaattttacctgaattgatttggggggaaattaccagtagaatgccttggtctgaatatttgatagaaccaattgttgtacataaaacagattgcgcatatatatatatgtataaaaaataataaaataatggaagatg

SEQ ID NO: 14952 - DNA, 1069 bp, Homo sapiens
  source 1..1069: mol_type = unassigned DNA
aggcgcaagccggcaagatggcggcggctggggctttccgtctgaggcgggcggcatcggctctgctgctgcggagcccccgcctgcccgcccgggagctgtcggccccggcccgactctatcacaagaaggtatctcaaatctgtgaagtattgtagaggagacacaaaaggaattgggggtcacaaatggttctcattgacatgagtgtagacctttctactcaggttgttgatcattatgaaaatcctagaaacgtggggtcccttgacaagacatctaaaaatgttggaactggactggtgggggctccagcatgtggtgacgtaatgaaattacagattcaagtggatgaaaaggggaagattgtggatgctaggtttaaaacatttggctgtggttccgcaattgcctccagctcattagccactgaatgggtgaaaggaaagacggtggaggaagccttgactatcaaaaacacagatatcgccaaggagctctgccttcctcccgtgaaactgcactgctccatgctggctgaagatgcaatcaaggccgccctggctgattacaaattgaaacaagaacccaaaaaaggagaggcagagaagaaatgagccctccctcggcgaagcctccagcaggccacaccagctgtttcccacctgctgtgcagtcaccttagatgttcagaagccgcttcctctccactgaagagctatgagatacgcacaatacttgctgttcacgttatgactctcatgcaagcaaaatacacagtttcattgttctgaatcctgtggtttctttcagcccacttttatcgccttaacctagttaatgtatattttgaattgtgtgtatgacctcagaactgaaattgataatgaagttgcaagttttgatagcccgtgaagtgcataagtatctaattttacctgaattgatttggggggaaattaccagtagaatgccttggtctgaatatttgatagaaccaattgttgtacataaaacagattgcgcatatatatatatgtataaaaaataataaaataatggaagatga

SEQ ID NO: 14953 - DNA, 1858 bp, Homo sapiens
  source 1..1858: mol_type = unassigned DNA
ctccccgcgcctttaatactcgcccgctgcggcggtcgccgagtccgcggacatgtccttcccgcagctgggctacccgcagtacctgagcgccgcggggccgggcgcctacggcggcgagcgcccgggggtgctggccgcggccgctgcggcggctgccgccgcctcgtcgggccgaccgggggccgcggagctgggcggcggggcaggcgcggctgcagtcacctcggtgctgggcatgtacgcggcggcggggccgtacgcgggcgcgcccaactacagcgccttcctgccctacgccgcggatctcagcctcttctcgcagatgggctcgcagtatgaactgaaggacaaccctggggtgcaccccgccaccttcgcagcccacacggcgccggcttattacccctacggccagttccaatacggggaccccgggcggcccaagaacgccacccgcgagagcaccagcacgctcaaggcctggctcaacgagcaccgcaagaatccctaccccaccaagggcgagaagatcatgctggccatcatcaccaagatgaccctcacgcaggtctccacctggttcgccaacgcgcgccggcgcctcaagaaggagaacaaggtgacatggggagcgcgcagcaaggaccaggaagatggagcgctcttcggcagcgacaccgagggcgacccggagaaggccgaggacgacgaggagatcgacctggaaagcatcgacattgacaagatcgacgagcacgatggcgaccagagcaacgaggatgacgaggacaaggccgaggctccgcacgcgcccgcagccccttctgctcttgcccgggaccaaggctcgccgctggcagcagccgacgttctcaagccccaggactcgcccttgggcctggcaaaggaggccccagagccgggcagcacgcgcctgctgagccccggcgctgcagcgggcggcctgcagggtgcgccgcacggcaagcccaagatctggtcgctggcggagacagccacgagccccgacggtgcgcccaaggcttcgccaccaccacccgcgggccaccccggcgcgcacgggccctccgccggggcgccgctgcaacaccccgccttcctgcctagccacggactgtacacctgccacatcggcaagttctccaactggaccaacagcgcattcctcgcacagggctccctgctcaacatgcgctccttcctgggcgttggcgctccccacgccgcgccccatggccctcaccttcctgcacctccaccaccgcagccgccggtcgctattgccccgggggcactcaatggagacaaggcctcggtccgcagcagccccacgctcccagagagagacctcgtccccaggccagattcgccggcacagcagttaaagtcgcccttccagccggtacgcgacaactctctggccccgcaggagggaacgccgcggatcctagcagccctcccgtccgcctgattaagggtcttcttttacttttgcgggggggaggggggaggagttggggagggagggaatgtgggaggaattaagacaaatatttcagactggtgtaaaggacaaatatgacaacgacgtcaaggactcgcatccgtcgctttctgcagaaaggggcttcttcggtcccgagctcgcgtccaggtggccaggcctctgccggcggctccagtggctgcgattatcgggttcggtaaatgcccccacgtgcttgtgtctctttccccccttttctgtatatagagtggtttcagattgtaaatagcgcgtcagcgaacttgtctaaatcatatatttttgtctaataaactaaatgaaatgaca

SEQ ID NO: 14954 - DNA, 2456 bp, Homo sapiens
  source 1..2456: mol_type = unassigned DNA
aaaccccgaccgccggcctggcgcgcggctgcgcccaccggctccgcgctgctgccgccgccaccgccaccccgccgccgccccggcccgcgggccgcccaggctagtacccgggccggcctgcctccgccggccgtccgggtgcccgccgccgcgccgcgccccggccgggcgtggatggagggcgccgcgcgccctgcccgctgctcggcgtgacgcgggccccgcgccccgcgcccaccatgtcctacccgcagggctacctgtaccaggcgcccggctcgctggcgctctactcgtgcccggcctacggcgcgtcggctttggcggctccgcgcagcgaggagctggcgcgctcggcgtcgggctcggcgttcagcccctacccgggctcggcggccttcacggcgcaggcggccaccggcttcgggagcccgctgcagtactcggccgacgccgccgccgccgccgccggcttcccgtcctacatgggcgcaccctacgacgcgcacaccaccggcatgaccggcgccatcagctaccacccgtacggcagcgcggcctacccgtaccagctcaacgaccccgcgtaccgcaagaacgccacgcgggacgccacggccactctcaaggcctggctcaacgagcaccgcaagaacccctaccccaccaagggcgagaagatcatgctagccatcatcaccaagatgaccctcacccaggtctccacctggttcgccaacgcgcgccggcgcctcaagaaggagaacaagatgacctgggccccgagaaacaaaagcgaagatgaggacgaggacgagggcgacgctaccagaagcaaggacgagagtcccgacaaggcgcaggagggcacggagacctcggcagaggacgaagggatcagcctgcacgtggactcgctcacggatcactcgtgctcggccgagtcggacggggagaagcttccgtgccgcgccggggaccccctgtgcgaatcgggctcggagtgcaaggacaagtatgacgacctggaggacgacgaggacgacgacgaggagggcgagcggggcctggcgccgcccaagcccgtgacctcgtcgccgcttaccggcttggaggcgccgctgctgagccccccgcccgaggccgcgccccgcggtggccgcaagacgccccagggcagccggacgtctccgggcgcgccgccccccgccagcaagcccaagctgtggtcgctggccgagatcgccacgtcggacctcaagcagccgagcctgggcccgggctgcgggccaccggggctgcccgcggccgccgcgccggcctcaaccggggcaccgccaggaggctcgccctaccctgcctcgccgctgctgggccgccccctctactacacgtcgcccttctacggcaactacacaaactacgggaacttgaacgcggcgctgcagggccagggtctcctgcggtacaactctgcggccgcggcccccggcgaggccctgcacaccgcgccaaaggcggccagcgacgcgggcaaggcgggcgcgcacccgctcgagtcccactaccggtccccgggcggcggctacgagcccaagaaagatgccagcgagggctgcaccgtggttggcgggggcgtccagccctacctatagaagggccgagcacagcaatgcaagtaagtgggcaccctggtgcttcccagaccctgtggagcctcccagcaccaacttgcttaatgtgtttttcttgcttctggtcatggggttagaagacagagcatttcaatcttgtccagcttttctttccttaagggggaaactatattttctgttttatagattccctctttttggcacaagttctatcactcctttacctagggaaggaaaaaaaaaatatatatatatatgtgtgtgtgtgtgtgtgtaatatatatatgtatatatatagtacatgtatatatatagtacatgtgtatatatatattacacactactgttgttttcttttgaaacaatagattattaaaatctgggcatttatatgcaatttagagccatttttactatgctagacacataatagacacatgctttgatgagcttgggctaccaaaacttggagtagcaaaaacctttatagatgatgtttgcaaaataagactgaagagacacgaggcgtactagtcttttatcagccctgtccaacctcccctccacccatgtccaagtggacaggactctgacattctcccggggctcacaacagtatctcaaaaaatatgttgctttgcaacgagtcagaattactaatcatagatcttgaagataagaaagatttggaaccacttcagatcaactcgtttttataatggtgttgttgtggaactgaaagattggggatgatttggttttttccttggtccacaggtaggtgtcacaattgctttg

SEQ ID NO: 14955 - DNA, 2630 bp, Homo sapiens
  source 1..2630: mol_type = unassigned DNA
ctcccccaaaccccgaccgccggcctggcgcgcggctgcgcccaccggctccgcgctgctgccgccgccaccgccaccccgccgccgccccggcccgcgggccgcccaggctagtacccgggccggcctgcctccgccggccgtccgggtgcccgccgccgcgccgcgccccggccgggcgtggatggagggcgccgcgcgccctgcccgctgctcggcgtgacgcgggccccgcgccccgcgcccaccatgtcctacccgcagggctacctgtaccaggcgcccggctcgctggcgctctactcgtgcccggcctacggcgcgtcggctttggcggctccgcgcagcgaggagctggcgcgctcggcgtcgggctcggcgttcagcccctacccgggctcggcggccttcacggcgcaggcggccaccggcttcgggagcccgctgcagtactcggccgacgccgccgccgccgccgccggcttcccgtcctacatgggcgcaccctacgacgcgcacaccaccggcatgaccggcgccatcagctaccacccgtacggcagcgcggcctacccgtaccagctcaacgaccccgcgtaccgcaagaacgccacgcgggacgccacggccactctcaaggcctggctcaacgagcaccgcaagaacccctaccccaccaagggcgagaagatcatgctagccatcatcaccaagatgaccctcacccaggtctccacctggttcgccaacgcgcgccggcgcctcaagaaggagaacaagatgacctgggccccgagaaacaaaagcgaagatgaggacgaggacgagggcgacgctaccagaagcaaggacgagagtcccgacaaggcgcaggagggcacggagacctcggcagaggacgaagggatcagcctgcacgtggactcgctcacggatcactcgtgctcggccgagtcggacggggagaagcttccgtgccgcgccggggaccccctgtgcgaatcgggctcggagtgcaaggacaagtatgacgacctggaggacgacgaggacgacgacgaggagggcgagcggggcctggcgccgcccaagcccgtgacctcgtcgccgcttaccggcttggaggcgccgctgctgagccccccgcccgaggccgcgccccgcggtggccgcaagacgccccagggcagccggacgtctccgggcgcgccgccccccgccagcaagcccaagctgtggtcgctggccgagatcgccacgtcggacctcaagcagccgagcctgggcccgggctgcgggccaccggggctgcccgcggccgccgcgccggcctcaaccggggcaccgccaggaggctcgccctaccctgcctcgccgctgctgggccgccccctctactacacgtcgcccttctacggcaactacacaaactacgggaacttgaacgcggcgctgcagggccagggtctcctgcggtacaactctgcggccgcggcccccggcgaggccctgcacaccgcgccaaaggcggccagcgacgcgggcaaggcgggcgcgcacccgctcgagtcccactaccggtccccgggcggcggctacgagcccaagaaagatgccagcgagggctgcaccgtggttggcgggggcgtccagccctacctatagaagggccgagcacagcaatgcaagtaggtgtcacaattgctttgaaaaaaaaaaaaaaaaaaaagtcagcaggccattctctcttcccaagctcataaatttacagatacaacaaacagatgtctaaatccagaccacatcttgtgccactgtaaaagagaaggatccacacagcactgtcagcccacagactctaacaattggaacagactattgttggacatatgtgaatttgttggcatagtatagtttccccgatgtatgtgtgacttttgaaaacaatctgtttttctcaggatatcttgaattgatcacttcattgccacggtatatattctataggtgtgataggatttactgtaaagtttatttgtaaaagatgtacacagtagaaataaaacgtgatggaagaacttgagtacttcagaagtggaaacaaatttgatatttatttttataatgatataaagcttctagtaatttatgcaagttgtattgcaatggaatctaaactttttgtaaataaattctgcctggtttttatttgaacattgctggttatacaatctttgttggttgtttaacacgaattctttactaatttatatcttaaattgtaaataaaaacagactagtctacaataatatgatgtttggggcttatttttcctagaagaatgatttggggtagagcgctagtgaataacctccaggtgatctgacctcacctttttaatgaaaacctgtgtgaaataaactctcctttctctcctgagcattgaaaaaaaaaaaaaaaggcagatggaagagaagtatataatcgggagaaacatgtgctgtagatgatttctatacaggtattgcaaaaaaaccaaaaaacataagatttttgtgccctgagtgtgctaattacttgttagtgtaaatttttaaaacttggcaaaataaaatgatctgacacccta

SEQ ID NO: 14956 - DNA, 2601 bp, Homo sapiens
  source 1..2601: mol_type = unassigned DNA
cgcgcggcaccctaagtgtccacaacttttggctgccttacttagcccagggcgcagaggctggaaaggtcgcggggagtatcgtgtgagtaaagagagagatttacaaaatagaagtagtgagaaaggaagaagtgaagggaacggaccggagagcaaaagccctcgtgagaaagggaaagagaaggggagaggagaaaggagagtttcatagcgtccagggcagtgcaggagcccgaagcagcggaagcgatcctggggggaagaggagtgcggagaggggaggggagaggaagggcgaggagggggagtgaaaactagaggagggcgaaggaagcgaggcgcgacactgctggggagaggagggcagtgaggagcgaggagcgggcagaggcagctccggcggccgagaggagggagcgcggcgcagagaggaggggcttgcgccccgtagaaatgtcaatcagagcccggagccccgggaatctccgccaatctgttcggacctgacctggctcctcgccgccgccctcgccgccgccgtcgccgccgcggagcagatcaataggcgaacgcggagcacagcgcagcgcgggcggcagcgcggccccaagcccggcccagcccccgatgcgcgccggagcccgcgggcggcgctgagctgggcggcccgggggtcggcccccctctccgtccgtgccccgcgggccaccatgtccttcccccagctgggataccaatacatccgcccgctttacccgtccgagcgcccgggggccgctggcggcagcggcggcagcgcgggggcccggggcggcctgggtgccggagcctcggagctgaacgcctcggggtccctgtccaacgtgctctcgtccgtgtacggggcgccctacgccgcggccgctgcggccgccgccgcccaaggctacggcgccttcctgccctacgccgcggagctgcccatcttcccgcagctgggcgcgcagtatgagctgaaggacagccccggggtgcagcatccggccgcggctgccgcgtttccgcacccgcaccccgccttctacccgtatggccagtaccagttcggggacccgtcccgtcccaagaacgccaccagggagagcaccagcacgctgaaggcctggctcaacgagcaccgcaagaacccctaccccaccaagggcgagaagatcatgctggccatcatcaccaagatgaccctcacccaggtgtccacctggttcgccaacgcgcgccggcgcctcaagaaggagaataagatgacttgggcgcctcgcagccgcactgacgaggagggaaacgcttatgggagcgagcgcgaggaggaagacgaagaggaggacgaggaggacggcaaacgcgagctagagctggaggaggaggagctcgggggggaggaggaggacacggggggcgagggcctggctgacgacgacgaggacgaggagatcgatttggagaacttagacggcgcggccaccgagcctgagctgtccctggctggggcggcgcgcagggatggcgacctaggcctgggacccatttcggactccaaaaatagcgactcggaagatagctctgagggcttagaggaccggccactaccggtcctgagtctggctccagcgccaccaccagtggccgtggcctcgccgtctctgccgtcgccccccgtgagcctggacccctgcgctcccgcaccagcccccgcctccgccctgcagaagcccaagatctggtccctcgcggagactgccacaagcccggacaacccgcgccgctcgcctcccggcgcgggggggtctccaccgggggcagcggtcgcgccttccgccctgcagctctctccggccgccgccgccgccgccgctcacagactggtctcagcgccgctgggcaagttcccggcttggaccaaccggccgtttccaggcccaccgcccggcccccgcctgcacccgctctccctgctgggctctgcccctccgcacctgctgggacttcccggagccgcgggccacccggctgccgccgccgccttcgctcggccagcggagcccgaaggcggaacagatcgctgtagtgccttggaagtggagaaaaagttactcaagacagctttccagcccgtgcccaggcggccccagaaccatctggacgccgccctggtcttatcggctctctcctcatcctagttctttaaaaaaaacaaaaaaacaaaaaaaactttttttaatcgttgtaataattgtataaaaaaaatcgctctgtatagttacaacttgtaagcatgtccgtgtataaatacctaaaagcaaaactaaacaaagaaagtaagaaaaagaaataaaaccagtcctcctcagccctccccaagtcgcttctgtggcaccccgcattcgctgtgaggtttgtttgtccggttgattttggggggtggagtttcagtgagaataaacgtgtctgcctttgtgtgtgtgtatatatacagagaaatgtacatatgtgtgaaccaaattgtacgagaaagtatctatttttggctaaataaatgagctgctgccactttgactataa

SEQ ID NO: 14957 - DNA, 2221 bp, Homo sapiens
  source 1..2221: mol_type = unassigned DNA
tcctgcttcgccctcccagcgcctagaagcctgcagctccggagcagtggccgcgccacgccggccccagcgcgcagaaccctgcaggccccgcccgtccgccccgggccgcgcccgccatgtcctacccgcagtttggatacccctactcctcggctccccagttcttgatggccaccaactccctgagcacgtgctgcgagtccggaggccgcacgctggcggactccgggcccgccgcctcggcccaggcgccggtctactgcccggtctacgagagccggctgctggccaccgcgcgccacgagctcaactcggccgcggcgctgggcgtctatgggggtccctatggcggatcgcagggctatggcaactacgtgacctacggctcggaggcgtccgccttctactcgctgaacagctttgattccaaggatggttcgggatctgcgcatgggggcctggcaccagccgctgccgcctactacccttacgagccagctctgggccagtacccctatgacaggtatggaaccatggacagcggcacgcggcgcaagaacgccacgcgcgagaccaccagcacgctcaaggcctggctgcaggagcaccgcaagaacccctaccccaccaagggcgagaagatcatgctggccatcatcaccaagatgaccctcacacaggtctccacctggttcgccaacgcgcgccggcgcctcaagaaggagaacaagatgacgtggccgccgcggaacaagtgcgcagacgagaagcggccctacgcggagggcgaggaggaggaggggggcgaggaggaggcgcgggaggagcccctcaagagctccaagaacgcagagcccgtgggcaaagaggagaaggagctggagcttagtgacttggacgacttcgacccgctggaagcagagccgccggcgtgcgagctgaagccgcccttccactccctggacggcggtctggagcgcgtccccgccgcgcccgacggcccggtcaaggaggcctcaggcgcgctccggatgtctctggccgcgggtggcggagctgctctggacgaggacctggagagggcccggagctgtctccgcagcgcggcggccgggccggagccactgccgggcgcagagggcggccctcaggtctgcgaggccaagctggggtttgtgccggcgggggcgtcggcaggcctggaggctaagccgcgcatctggtccctggcccacacagccaccgccgccgccgccgccgccacctccctgagccagactgagtttccgtcgtgcatgctcaagcgccaaggtcccgcggcccctgcggctgtgtcctccgcgcccgccacgtccccgtctgtggcccttccccactctggcgccctggacaggcaccaggactccccggtaaccagtctcagaaactgggtggacggggtcttccacgaccccatcctcaggcacagcactttgaaccaggcctgggccaccgccaagggcgccctcctggaccccgggcctctgggacgctcgctgggggcgggcgcgaacgtgctgactgcacccctggcccgcgcctttccgcctgccgtgccccaggacgccccagctgcaggcgccgccagggagctgctcgccctgcccaaggccggcggcaaacccttctgcgcctgaggcgggcgggtcccgagcccaggagggaacccgcgctcaggcggacggcgccgactcttttcactgagtttccagaggaagactagcgcggccaccgcgaagccgccaacccaccggagagggggcttctgaacttggactcctgggaacatggacaagcccggcgctgccacgccggggcctccaccgcctgggcctgagcctgaccgggccattcccaaatttgggacgcggaaggagaggctctcggagcagaagaggccagataccctgaagcataaagtttacgtcaaaagtttacatggagaaggcggttccgttctgaagcgtggtctgctgtcccctgggcgtgaggcctcctgggcctgtcgggcctccgatttcatcctcagcacgtaatgctcaccaacagcacttgcactgagttgactcttgcacactcttgactccataatatgatgctttttaagatgtatgttcacaccaataattgcctgcttcagaggctaatataacaaaaccaataaaaccgagtgatggtg

SEQ ID NO: 14958 - DNA, 2538 bp, Homo sapiens
  source 1..2538: mol_type = unassigned DNA
gaccgcggcgcctggggacgccggcgcgctccgctcgccaggtgctccgcctggaaatgtctccattagttgtcgccggctccccgctggagcgcgcgcgccgagcttccgcgcggagccctcgcgggctgccgggagcggcccagcgccaccgcaggtaggtgaggtcccccgctcccgcccccgccccggggttccgagacccctccccccttccgaggaggcggaggctccgcgcggccgccgaggggagcgggcggcggcggctgcggcgactccccggtgcgtcccgggctgcgagctgctccccgcggccccggcagccacacggcgcgggcgggagcttccccagctcagcgcctagaagcctgcagctccggagcagtggccgcgccacgccggccccagcgcgcagaaccctgcaggccccgcccgtccgccccgggccgcgcccgccatgtcctacccgcagtttggatacccctactcctcggctccccagttcttgatggccaccaactccctgagcacgtgctgcgagtccggaggccgcacgctggcggactccgggcccgccgcctcggcccaggcgccggtctactgcccggtctacgagagccggctgctggccaccgcgcgccacgagctcaactcggccgcggcgctgggcgtctatgggggtccctatggcggatcgcagggctatggcaactacgtgacctacggctcggaggcgtccgccttctactcgctgaacagctttgattccaaggatggttcgggatctgcgcatgggggcctggcaccagccgctgccgcctactacccttacgagccagctctgggccagtacccctatgacaggtatggaaccatggacagcggcacgcggcgcaagaacgccacgcgcgagaccaccagcacgctcaaggcctggctgcaggagcaccgcaagaacccctaccccaccaagggcgagaagatcatgctggccatcatcaccaagatgaccctcacacaggtctccacctggttcgccaacgcgcgccggcgcctcaagaaggagaacaagatgacgtggccgccgcggaacaagtgcgcagacgagaagcggccctacgcggagggcgaggaggaggaggggggcgaggaggaggcgcgggaggagcccctcaagagctccaagaacgcagagcccgtgggcaaagaggagaaggagctggagcttagtgacttggacgacttcgacccgctggaagcagagccgccggcgtgcgagctgaagccgcccttccactccctggacggcggtctggagcgcgtccccgccgcgcccgacggcccggtcaaggaggcctcaggcgcgctccggatgtctctggccgcgggtggcggagctgctctggacgaggacctggagagggcccggagctgtctccgcagcgcggcggccgggccggagccactgccgggcgcagagggcggccctcaggtctgcgaggccaagctggggtttgtgccggcgggggcgtcggcaggcctggaggctaagccgcgcatctggtccctggcccacacagccaccgccgccgccgccgccgccacctccctgagccagactgagtttccgtcgtgcatgctcaagcgccaaggtcccgcggcccctgcggctgtgtcctccgcgcccgccacgtccccgtctgtggcccttccccactctggcgccctggacaggcaccaggactccccggtaaccagtctcagaaactgggtggacggggtcttccacgaccccatcctcaggcacagcactttgaaccaggcctgggccaccgccaagggcgccctcctggaccccgggcctctgggacgctcgctgggggcgggcgcgaacgtgctgactgcacccctggcccgcgcctttccgcctgccgtgccccaggacgccccagctgcaggcgccgccagggagctgctcgccctgcccaaggccggcggcaaacccttctgcgcctgaggcgggcgggtcccgagcccaggagggaacccgcgctcaggcggacggcgccgactcttttcactgagtttccagaggaagactagcgcggccaccgcgaagccgccaacccaccggagagggggcttctgaacttggactcctgggaacatggacaagcccggcgctgccacgccggggcctccaccgcctgggcctgagcctgaccgggccattcccaaatttgggacgcggaaggagaggctctcggagcagaagaggccagataccctgaagcataaagtttacgtcaaaagtttacatggagaaggcggttccgttctgaagcgtggtctgctgtcccctgggcgtgaggcctcctgggcctgtcgggcctccgatttcatcctcagcacgtaatgctcaccaacagcacttgcactgagttgactcttgcacactcttgactccataatatgatgctttttaagatgtatgttcacaccaataattgcctgcttcagaggctaatataacaaaac

SEQ ID NO: 14959 - DNA, 1990 bp, Homo sapiens
  source 1..1990: mol_type = unassigned DNA
ggtgcgggctcggctgacgaccgcggcgcctggggacgccggcgcgctccgctcgccaggtgctccgcctggaaatgtctccattagttgtcgccggctccccgctggagcgcgcgcgccgagcttccgcgcggagccctcgcgggctgccgggagcggcccagcgccaccgcagcgcctagaagcctgcagctccggagcagtggccgcgccacgccggccccagcgcgcagaaccctgcaggccccgcccgtccgccccgggccgcgcccgccatgtcctacccgcagtttggatacccctactcctcggctccccagttcttgatggccaccaactccctgagcacgtgctgcgagtccggaggccgcacgctggcggactccgggcccgccgcctcggcccaggcgccggtctactgcccggtctacgagagccggctgctggccaccgcgcgccacgagctcaactcggccgcggcgctgggcgtctatgggggtccctatggcggatcgcagggctatggcaactacgtgacctacggctcggaggcgtccgccttctactcgctgaacagctttgattccaaggatggttcgggatctgcgcatgggggcctggcaccagccgctgccgcctactacccttacgagccagctctgggccagtacccctatgacaggtatggaaccatggacagcggcacgcggcgcaagaacgccacgcgcgagaccaccagcacgctcaaggcctggctgcaggagcaccgcaagaacccctaccccaccaagggcgagaagatcatgctggccatcatcaccaagatgaccctcacacaggtctccacctggttcgccaacgcgcgccggcgcctcaagaaggagaacaagatgacgtggccgccgcggaacaagtgcgcagacgagaagcggccctacgcggagggcgaggaggaggaggggggcgaggaggaggcgcgggaggagcccctcaagagctccaagaacgcagagcccgtgggcaaagaggagaaggagctggagcttagtgacttggacgacttcgacccgctggaagcagagccgccggcgtgcgagctgaagccgcccttccactccctggacggcggtctggagcgcgtccccgccgcgcccgacggcccggtcaaggaggcctcaggcgcgctccggatgtctctggccgcgggtggcggagctgctctggacgaggacctggagagggcccggagctgtctccgcagcgcggcggccgggccggagccactgccgggcgcagagggcggccctcaggtctgcgaggccaagctggggtttgtgccggcgggggcgtcggcaggcctggaggctaagccgcgcatctggtccctggcccacacagccaccgccgccgccgccgccgccacctccctgagccagactgagtttccgtcgtgcatgctcaagcgccaaggtcccgcggcccctgcggctgtgtcctccgcgcccgccacgtccccgtctgtggcccttccccactctggcgccctggacaggcaccaggactccccggtaaccagtctcagaaactgggtggacggggtcttccacgaccccatcctcaggcacagcactttgaaccaggcctgggccaccgccaagggcgccctcctggaccccgggcctctgggacgctcgctgggggcgggcgcgaacgtgctgactgcacccctggcccgcgcctttccgcctgccgtgccccaggacgccccagctgcaggcgccgccagggagctgctcgccctgcccaaggccggcggcaaacccttctgcgcctgaggcgggcgggtcccgagcccaggagggaacccgcgctcaggcggacggcgccgactcttttcactgagtttccagaggaagactagcgcggccaccgcgaagccgccaacccaccggagagggggcttctgaacttggactcctgggaacatgga

SEQ ID NO: 14960 - DNA, 2401 bp, Homo sapiens
  source 1..2401: mol_type = unassigned DNA
cttagcatcttggcaggacctttgcaaaggcaaaagcagagccccccggtgcaaagagcgaggggaaaaaagagaaagcagcaagggaggggaggggaggggaaaaaaagcccagctggggcgagcgaggcgcgcagaggagcgggcgcggcggtcgcagccggaggcgcgcgggaagccagcgaggaggcgccgcgggccggagccccggagccggggccagaggagcggcggcccagggcagccagaggccaggtgcccgcccgctcgccctcgcagggcgccgcccggctcgttggcggccgcggcgcggcgcgccccatgcccgtgtgtggccatgtcctatccgcagggctacttgtaccagccgtccgcctcgctggcgctctactcgtgcccggcgtacagcaccagcgtcatttcggggccccgcacggatgagctcggccgctcttcttcgggctccgcgttctcgccctacgctggctcgactgccttcacggcgccctcgccgggctacaactcgcacctccagtacggcgccgaccccgcggccgccgccgccgccgccttctcctcgtacgtgggctctccctacgaccacacacccggcatggcgggctccttggggtaccatccttacgcggcgcccctgggatcgtacccttacggggacccagcgtaccggaagaacgccacaagggacgccacggctaccctcaaggcctggctcaacgagcaccgcaagaacccctaccccaccaagggcgagaagatcatgctggccatcatcaccaagatgaccctcacccaggtgtccacctggttcgccaacgcgcgccggcgcctcaagaaagagaataaaatgacgtggacgccgcggaaccgcagcgaggacgaggaagaggaggagaacattgacctggagaagaacgacgaggacgagccccagaagcccgaggacaagggcgaccccgagggccccgaagcaggaggagctgagcagaaggcggcttcgggctgcgaacggcttcagggaccacccacccctgcaggcaaggagacggagggcagcctcagcgactcggattttaaggagccgccctcggagggccgcctcgacgcgctgcagggccccccccgcaccggcgggccctccccggctgggccagcggcggcgcggctggcggaggacccggcccctcactaccccgccggagcgccggcgcccggcccgcatccagccgcgggcgaggtgcctccgggtcccggcgggccctcggttatccattcgccgcctccgccgccgcctcctgcggtgctcgccaagcccaaactgtggtctttggcagagatcgccacatcgtcggacaaggtcaaggacgggggcggcgggaacgagggctctccatgcccaccgtgtcccgggcccatagccgggcaagccctaggaggcagccgggcgtcgccggccccggcgccgtcacgctcgccctcggcgcagtgtccttttccaggcgggacggtgctgtcccggcctctctactacaccgcgcccttctatcccggctacacgaactatggctccttcggacaccttcatggccacccggggcccgggccaggccccacaaccggtccggggtctcatttcaatggattaaaccagaccgtgttgaaccgagcggacgctttggctaaagacccgaaaatgttgcggagccagtctcagctagacctgtgcaaagactctccctatgaattgaagaaaggtatgtccgacatttaacgcgggctgcgtcggtcccggacttttctaatttattaaaaacatggccttggcagttatttttccatcaccgagagagagagacagagagagaaaataaactacccctcctattcagaagtttatagtttatggagatggatgacataaaaatgtaaacatctccacacaaaaaaaaaaatgtcttaaccaaccgaaaagaaaaattaaaaaaggatttgtattaaatcttattctgtatatttaatgtagcatttttgtatttaaattgataattcaatatctttgaagtaaattatgaaatcaagacacctgtacaggcatttaatgtttttttgtaatataaatatatacatttgtgtttcccccaaaactgtttcatagttaaaaaatacaagtttaatttaattttttacacctattgattctgctgggtatgagctaaagtattacagaaaggaaacaggttatactcttagatttaaaaagtgaaagaaactgcaggcgcctttgtaaaatgcaaaatatttaattaaaagagattttaacataatgagagccactcattactttttagaagcctcaataaactgtccattgccttggtcaaaa

SEQ ID NO: 14961 - DNA, 881 bp, Homo sapiens
  source 1..881: mol_type = unassigned DNA
atgtcctatccgcagggctacttgtaccagccgtccgcctcgctggcgctctactcgtgcccggcgtacagcaccagcgtcatttcggggccccgcacggatgagctcggccgctcttcttcgggctccgcgttctcgccctacgctggctcgactgccttcacggcgccctcgccgggctacaactcgcacctccagtacggcgccgaccccgcggccgccgccgccgccgccttctcctcgtacgtgctgttgaaaaaagaaaaaaagagccttgacttcccttgttttccccccttgcgcccaacgtgcgtccgctcccccgccgagcgcggagtcgcctcagttgcccaggcctctatctgcatggagggccgggccgccgtggccagatctgcgcacgggggctctccctacgcccaccgtgtcccgggcccatagccgggcaagccctaggaggcagccgggcgtcgccggccccggcgccgtcacgctcgccctcggcgcagtgtccttttccaggcgggacggtgctgtcccggcctctctactacaccgcgcccttctatcccggctacacgaactatggctccttcggacaccttcatggccacccggggcccgggccaggccccacaaccggtccggggtctcatttcaatggattaaaccagaccgtgttgaaccgagcggacgctttggctaaagacccgaaaatgttgcggagccagtctcagctagacctgtgcaaagactctccctatgaattgaagaaaggtatgtccgacatttaacgcgggctgcgtcggtcccggacttttctaatttattaaaaacatggccttggcagttatttttccatcaccgagagagagagacag

SEQ ID NO: 14962 - DNA, 711 bp, Homo sapiens
  source 1..711: mol_type = unassigned DNA
cgcaggctcggcggcacgccccctgacgtgtgtgcctcaggcttataatagggccggtgctgcctgccgaagccggcggctgagaggcagcgaactcatctttgccagtacaggagcttgtgccgtggcccacagcccacagcccacagccatgggctgggacctgacggtgaagatgctggcgggcaacgaattccaggtgtccctgagcagctccatgtcggtgtcagagctgaaggcgcagatcacccagaagatcggcgtgcacgccttccagcagcgtctggctgtccacccgagcggtgtggcgctgcaggacagggtcccccttgccagccagggcctgggccccggcagcacggtcctgctggtggtggacaaatgcgacgaacctctgagcatcctggtgaggaataacaagggccgcagcagcacctacgaggtacggctgacgcagaccgtggcccacctgaagcagcaagtgagcgggctggagggtgtgcaggacgacctgttctggctgaccttcgaggggaagcccctggaggaccagctcccgctgggggagtacggcctcaagcccctgagcaccgtgttcatgaatctgcgcctgcggggaggcggcacagagcctggcgggcggagctaagggcctccaccagcatccgagcaggatcaagggccggaaataaaggctgttgtaaagagaaa

SEQ ID NO: 14963 - DNA, 2755 bp, Homo sapiens
  source 1..2755: mol_type = unassigned DNA
caggcggcgcggccgggaaggaacgcgggaggggacagaaggaagaggaagaggaggagagggaggccagagccagaacagcccggcagcccgagcttcgggggagaacggcctgagccccgagcaagttgcctcgggagccctaatcctctcccgctggctcgccgagcggtcagtggcgctcagcggcggcgaggctgaaatatgataatcagaacagctgcgccgcgcgccctgcagccaatgggcgcggcgctcgcctgacgtccccgcgcgctgcgtcagaccaatggcgatggagctgagttggagcagagaagtttgagtaagagataaggaagagaggtgcccgagccgcgccgagtctgccgccgccgcagcgcctccgctccgccaactccgccggcttaaattggactcctagatccgcgagggcgcggcgcagccgagcagcggctctttcagcattggcaaccccaggggccaatatttcccacttagccacagctccagcatcctctctgtgggctgttcaccaactgtacaaccaccatttcactgtggacattactccctcttacagatatgggagacatgggagatccaccaaaaaaaaaacgtctgatttccctatgtgttggttgcggcaatcagattcacgatcagtatattctgagggtttctccggatttggaatggcatgcggcatgtttgaaatgtgcggagtgtaatcagtatttggacgagagctgtacatgctttgttagggatgggaaaacctactgtaaaagagattatatcaggttgtacgggatcaaatgcgccaagtgcagcatcggcttcagcaagaacgacttcgtgatgcgtgcccgctccaaggtgtatcacatcgagtgtttccgctgtgtggcctgcagccgccagctcatccctggggacgaatttgcgcttcgggaggacggtctcttctgccgagcagaccacgatgtggtggagagggccagtctaggcgctggcgacccgctcagtcccctgcatccagcgcggccactgcaaatggcagcggagcccatctccgccaggcagccagccctgcggccccacgtccacaagcagccggagaagaccacccgcgtgcggactgtgctgaacgagaagcagctgcacaccttgcggacctgctacgccgcaaacccgcggccagatgcgctcatgaaggagcaactggtagagatgacgggcctcagtccccgtgtgatccgggtctggtttcaaaacaagcggtgcaaggacaagaagcgaagcatcatgatgaagcaactccagcagcagcagcccaatgacaaaactaatatccaggggatgacaggaactcccatggtggctgccagtccagagagacacgacggtggcttacaggctaacccagtggaagtacaaagttaccagccaccttggaaagtactgagcgacttcgccttgcagagtgacatagatcagcctgcttttcagcaactggtcaatttttcagaaggaggaccgggctctaattccactggcagtgaagtagcatcaatgtcctctcaacttccagatacacctaacagcatggtagccagtcctattgaggcatgaggaacattcattctgtattttttttccctgttggagaaagtgggaaattataatgtcgaactctgaaacaaaagtatttaacgacccagtcaatgaaaactgaatcaagaaatgaatgctccatgaaatgcacgaagtctgttttaatgacaaggtgatatggtagcaacactgtgaagacaatcatgggattttactagaattaaacaacaaacaaaacgcaaaacccagtatatgctattcaatgatcttagaagtactgaaaaaaaaagacgtttttaaaacgtagaggatttatattcaaggatctcaaagaaagcattttcatttcactgcacatctagagaaaaacaaaaatagaaaattttctagtccatcctaatctgaatggtgctgtttctatattggtcattgccttgccaaacaggagctccagcaaaagcgcaggaagagagactggcctccttggctgaaagagtcctttcaggaaggtggagctgcattggtttgatatgtttaaagttgactttaacaaggggttaattgaaatcctgggtctcttggcctgtcctgtagctggtttattttttactttgccccctccccactttttttgagatccatcctttatcaagaagtctgaagcgactataaaggtttttgaattcagatttaaaaaccaacttataaagcattgcaacaaggttacctctattttgccacaagcgtctcgggattgtgtttgacttgtgtctgtccaagaacttttcccccaaagatgtgtatagttattggttaaaatgactgttttctctctctatggaaataaaaaggaaaaaaaaaaaggaaactttttttgtttgctcttgcattgcaaaaattataaagtaatttattatttattgtcggaagacttgccacttttcatgtcatttgacattttttgtttgctgaagtgaaaaaaaaagataaaggttgtacggtggtctttgaattatatgtctaattctatgtgttttgtctttttcttaaatattatgtgaaatcaaagcgccatatgtagaattatatcttcaggactatttcactaataaacatttggcatagataaataaataaa

SEQ ID NO: 14964 - DNA, 981 bp, Homo sapiens
  source 1..981: mol_type = unassigned DNA
atgggagacatgggagatccaccaaaaaaaaaacgtctgatttccctatgtgttggttgcggcaatcagattcacgatcagtatattctgagggtttctccggatttggaatggcatgcggcatgtttgaaatgtgcggagtgtaatcagtatttggacgagagctgtacatgctttgttagggatgggaaaacctactgtaaaagagattatatcaggttgtacgggatcaaatgcgccaagtgcagcatcggcttcagcaagaacgacttcgtgatgcgtgcccgctccaaggtgtatcacatcgagtgtttccgctgtgtggcctgcagccgccagctcatccctggggacgaatttgcgcttcgggaggacggtctcttctgccgagcagaccacgatgtggtggagagggccagtctaggcgctggcgacccgctcagtcccctgcatccagcgcggccactgcaaatggcagcggagcccatctccgccaggcagccagccctgcggccccacgtccacaagcagccggagaagaccacccgcgtgcggactgtgctgaacgagaagcagctgcacaccttgcggacctgctacgccgcaaacccgcggccagatgcgctcatgaaggagcaactggtagagatgacgggcctcagtccccgtgtgatccgggtctggtttcaaaacaagcggtgcaaggacaagaagcgaagcatcatgatgaagcaactccagcagcagcagcccaatgacaaaactgctaacccagtggaagtacaaagttaccagccaccttggaaagtactgagcgacttcgccttgcagagtgacatagatcagcctgcttttcagcaactggtcaatttttcagaaggaggaccgggctctaattccactggcagtgaagtagcatcaatgtcctctcaacttccagatacacctaacagcatggtagccagtcctattgaggcatga

SEQ ID NO: 14965 - DNA, 1958 bp, Homo sapiens
  source 1..1958: mol_type = unassigned DNA
gattactagttagcaaatgagggggtaaatattccagtggatacaagcttggactcttttcttgaagctttctttctatcagaagcatttgctgatattgctgacattgaaacattaaaagaaaatttgagaagcaatgggcatcctgaagctgcaagtatttctcattgtgctctctgttgcattgaaccatctgaaagctacacccattgaaagtcatcaggtggaaaagcggaaatgcaacactgccacatgtgcaacgcagcgcctggcaaattttttagttcattccagcaacaactttggtgccattctctcatctaccaacgtgggatccaatacatatggcaagaggaatgcagtagaggttttaaagagagagccactgaattacttgcccctttagaggacaatgtaactctatagttattgttttatgttctagtgatttcctgtataatttaacagtgcccttttcatctccagtgtgaatatatggtctgtgtgtctgatgtttgttgctaggacatataccttctcaaaagattgttttatatgtagtactaactaaggtcccataataaaaagatagtatcttttaaaatgaaatgtttttgctatagatttgtattttaaaacataagaacgtcattttgggacctatatctcagtggcacaggtttaagaacgaaggagaaaaaggtagtttgaaccttggtaaattgtaaacagctaataatgaagttattcttgacatgagaaaatcagtaattggaccaggcgcggtggctcttgcctgtaatcccagcactttgggaggccgaggcaggcagatcacaaggtcaggagttcgagaccagcctgaccaacatggtgaaaccctgtctctactaaaaatacaaaaattagccgggggtggtgacatgtgcctgtaatcccagctactcaggaggctaaggcaggagaatcgcttaaacccaggaggcggaggttgcagtgagccgagattgcaccactgcactccagcctgggtggcagagtgagactcgtctcaaaaaaaagaaagaaaattagtaattgtaagtacccctgataagcaaattagtaattgtcaatacccctgttaagcaattcctttttgcagtatatttctgaaatgacagaatgctgttttaaaaacaaagaaataaaatcctgctcctgactcggtcaaaatattttttaaagtctattgtttgttgtgcttgctggtactaagaggctatttaaaagtataaaactgctttgtatccatgagggtttcattgtgtgttagcagcagtgagcttctattaaatgtatatgtcatttattttgtttaagtggctttcagcaaacctcagtcatattcttatgcagggtattgcgaaacaacttgtgttctattaatcgtgtcttcaattaaaagaccacagacttctggaaactctttgctgtataagaattatttcttttgtttaacaaattagacatttctggcagaggttatgtatatgatacactttttttgatagcagctgcaatgttggacagaagatgaaatgctttgctttgagtcagattcttatgaatatctgcttttccctgactttgagttaggtagctttggaagtagcattaattcagataaactgccatcatgctgcgttatgccatttctaaagacactcaacttgtacttttaaaaaaatagaaaaaataagcatttcaatctaagtggaaatttgactcattgacttacatttctaagttaaaatttccctttatgaagtgtgccttaggttaccaaattgtagaggctttcgttggtggtggtaagtggtagcggtagtgagtgtatagaggcagggaaatatatttataataaattctatgtcatgaattacatattgaaataaataggtgaatatacaaattta

SEQ ID NO: 14966 - DNA, 351 bp, Homo sapiens
  source 1..351: mol_type = unassigned DNA
aagcttggactcttttcttgaagctttctttctatcagaagcatttgctgatattgctgacattgaaacattaaaagtgctggattattctttgcagaaaatttgagaagcaatgggcatcctgaagctgcaagtatttctcattgtgctctctgttgcattgaaccatctgaaagctacacccattgaaagtcatcaggtggaaaagcggaaatgcaacactgccacatgtgcaacgcagcgcctggcaaattttttagttcattccagcaacaactttggtgccattctctcatctaccaacgtgggatccaatacatatggcaagaggaatgcagtagaggttttaaa

SEQ ID NO: 14967 - DNA, 409 bp, Homo sapiens
  source 1..409: mol_type = unassigned DNA
agctttgcacatctccaggtcagacctatcctaatatctacatctacatttccagaaaatttgagaagcaatgggcatcctgaagctgcaagtatttctcattgtgctctctgttgcattgaaccatctgaaagctacacccattgaaagtcatcaggtggaaaagcggaaatgcaacactgccacatgtgcaacgcagcgcctggcaaattttttagttcattccagcaacaactttggtgccattctctcatctaccaacgtgggatccaatacatatggcaagaggaatgcagtagaggttttaaagagagagccactgaattacttgcccctttagaggacaatgtaactctatagttattgttttatgttctagtgatttcctgtataatttaacagtgccctt

SEQ ID NO: 14968 - DNA, 2309 bp, Homo sapiens
  source 1..2309: mol_type = unassigned DNA
ctgcgctccccccgcccctttccctcgccttcggctgacgctgacgtcggatgagtgatccggagggacgctccgaccgcggccgggaggctcctgggggccggggctccgaggttataatataacttatcctctcatgcttttttcctgccccttctccccaaatcatcaacaatagaagaagaagaaaacatgtcaggacacaaatgttatccctgggacttacaggatcgatatgctcaagataagtcagttgtaaataagatgcaacagaaatattgggagacgaagcaggcctttattaaagccacagggaagaaggaagatgaacatgttgttgcctctgacgcggacctggatgccaagctagagctgtttcattcaattcagagaacctgtctggacttatcgaaagcaattgtactctatcaaaagaggatatgtttcttgtctcaagaagaaaacgaactgggaaaatttcttcgatcccaaggtttccaagataaaaccagagcaggaaagatgatgcaagcgacaggaaaggccctctgcttttcttcccagcaaaggttggccttacgaaatcctttgtgtcgatttcaccaagaagtggagacttttcggcatcgggccatctcagatacttggctgacggtgaaccgcatggaacagtgcaggacggaatatagaggagcactattatggatgaaggacgtgtctcaggagcttgatccagacctctacaagcaaatggagaagttcaggaaggtacaaacacaagtgcgccttgcaaaaaaaaactttgacaaattgaagatggatgtttgtcaaaaagtggatcttcttggagcgagcagatgcaatctcttgtctcacatgctagcaacataccagaccactctgcttcatttttgggagaaaacttctcacactatggcagccatccatgagagtttcaaaggttatcaaccatatgaatttactactttaaagagcttacaagaccctatgaaaaaattagttgagaaagaagagaagaagaaaatcaaccagcaggaaagtacagatgcagccgtgcaggagccgagccaattaatttcattagaggaagaaaaccagcgcaaggaatcctctagttttaagactgaagatggaaaaagtattttatctgccttagacaaaggctctacacatactgcatgctcaggacccatagatgaactattagacatgaaatctgaggaaggtgcttgcctgggaccagtggcagggaccccggaacctgaaggtgctgacaaagatgacctgctgctgttgagtgagatcttcaatgcttcctccttggaagagggcgagttcagcaaagagtgggccgctgtgtttggagacggccaagtgaaggagccagtgcccactatggccctgggagagccagaccccaaggcccagacaggctcaggtttccttccttcgcagcttttagaccaaaatatgaaagacttacaggcctcgctacaagaacctgctaaggctgcctcagacctgactgcctggttcagcctcttcgctgacctcgacccactctcaaatcctgatgctgttgggaaaaccgataaagaacacgaattgctcaatgcatgaatctgtacccttcgggagggcactcacatgccgcccccagcagctcccctgggggctagcagaagtataaagtgatcagtatgctgttttaataattatgtgccattttaataaaatgaaagggtcaacggccctgtttatattggtataattatttactcttatttggtataaagggttttcgtgtatctctatgtggatctaaataatacaggattgtctagaagcggtttccaggccaccgctctcctgcctacatcccatcatggctgctgcggtgtcactgggctaccgtgagatccaagttgaaatcagaagcctactttgatggtaggtttgaatgacgtgtcctacagcctcagaggcagcaggaggctagcaaagcttaaatgcctccttctctgcccccagcctctgtcccccttggaggagggctgtaggaagattccctcttcctgccaagccaccttccagtgagctctggatgaagctctggccaaccaaagacactgtccccacagcaggtgcctggtgggccacgtgttctcacactggtggaggagctgggcttctgtccaaggcacaaaccttactatggaaagcagccatatttgcagataccactgtctccttttgtcctcttcgtggctggaattcaaaagcatgta

SEQ ID NO: 14969 - DNA, 1415 bp, Homo sapiens
  source 1..1415: mol_type = unassigned DNA
taccccaggagatgggggtcgaggagagaccccggggagtagagagagagaaactcactccccgagtccccgaccctccccaagcaaggttataatataacttatcctctcatgcttttttcctgccccttctccccaaatcatcaacaatagaagaagaagaaaacatgtcaggacacaaatgcagttatccctgggacttacaggatcgatatgctcaagataagtcagttgtaaataagatgcaacagaaatattgggagacgaagcaggcctttattaaagccacagggaagaaggaagatgaacatgttgttgcctctgacgcggacctggatgccaagctagagctgtttcattcaattcagagaacctgtctggacttatcgaaagcaattgtactctatcaaaagaggatatgtttcttgtctcaagaagaaaacgaactgggaaaatttcttcgatcccaaggtttccaagataaaaccagagcaggaaagatgatgcaagcgacaggaaaggccctctgcttttcttcccagcaaaggttggccttacgaaatcctttgtgtcgatttcaccaagaagtggagacttttcggcatcgggccatctcagatacttggctgacggtgaaccgcatggaacagtgcaggacggaatatagaggagcactattatggatgaaggacgtgtctcaggagcttgatccagacctctacaagcaaatggagaagttcaggaaggtacaaacacaagtgcgccttgcaaaaaaaaactttgacaaattgaagatggatgtttgtcaaaaagtggatcttcttggagcgagcagatgcaatctcttgtctcacatgctagcaacataccagcttgcctgggaccagtggcagggaccccggaacctgaaggtgctgacaaagatgacctgctgctgttgagtgagatcttcaatgcttcctccttggaagagggcgagttcagcaaagagtgggccgctgtgtttggagacggccaagtgaaggagccagtgcccactatggccctgggagagccagaccccaaggcccagacaggctcaggtttccttccttcgcagcttttagaccaaaatatgaaagacttacaggcctcgctacaagaacctgctaaggctgcctcagacctgactgcctggttcagcctcttcgctgacctcgacccactctcaaatcctgatgctgttgggaaaaccgataaagaacacgaattgctcaatgcatgaatctgtacccttcgggagggcactcacatgccgcccccagcagctcccctgggggctagcagaagtataaagtgatcagtatgctgttttaataattatgtgccattttaataaaatgaaagggtcaacggccctgtttatattggtataa

SEQ ID NO: 14970 - DNA, 2133 bp, Homo sapiens
  source 1..2133: mol_type = unassigned DNA
gctgcaggaagcagcaggagacgcccggcagccgggacggtcggggacgcctgaagaagaagaaaacatgtcaggacacaaatgcagttatccctgggacttacaggatcgatatgctcaagataagtcagttgtaaataagatgcaacagaaatattgggagacgaagcaggcctttattaaagccacagggaagaaggaagatgaacatgttgttgcctctgacgcggacctggatgccaagctagagctgtttcattcaattcagagaacctgtctggacttatcgaaagcaattgtactctatcaaaagaggatatgtttcttgtctcaagaagaaaacgaactgggaaaatttcttcgatcccaaggtttccaagataaaaccagagcaggaaagatgatgcaagcgacaggaaaggccctctgcttttcttcccagcaaaggttggccttacgaaatcctttgtgtcgatttcaccaagaagtggagacttttcggcatcgggccatctcagatacttggctgacggtgaaccgcatggaacagtgcaggacggaatatagaggagcactattatggatgaaggacgtgtctcaggagcttgatccagacctctacaagcaaatggagaagttcaggaaggtacaaacacaagtgcgccttgcaaaaaaaaactttgacaaattgaagatggatgtttgtcaaaaagtggatcttcttggagcgagcagatgcaatctcttgtctcacatgctagcaacataccagaccactctgcttcatttttgggagaaaacttctcacactatggcagccatccatgagagtttcaaaggttatcaaccatatgaatttactactttaaagagcttacaagaccctatgaaaaaattagttgagaaagaagagaagaagaaaatcaaccagcaggaaagtacagatgcagccgtgcaggagccgagccaattaatttcattagaggaagaaaaccagcgcaaggaatcctctagttttaagactgaagatggaaaaagtattttatctgccttagacaaaggctctacacatactgcatgctcaggacccatagatgaactattagacatgaaatctgaggaaggtgcttgcctgggaccagtggcagggaccccggaacctgaaggtgctgacaaagatgacctgctgctgttgagtgagatcttcaatgcttcctccttggaagagggcgagttcagcaaagagtgggccgctgtgtttggagacggccaagtgaaggagccagtgcccactatggccctgggagagccagaccccaaggcccagacaggctcaggtttccttccttcgcagcttttagaccaaaatatgaaagacttacaggcctcgctacaagaacctgctaaggctgcctcagacctgactgcctggttcagcctcttcgctgacctcgacccactctcaaatcctgatgctgttgggaaaaccgataaagaacacgaattgctcaatgcatgaatctgtacccttcgggagggcactcacatgccgcccccagcagctcccctgggggctagcagaagtataaagtgatcagtatgctgttttaataattatgtgccattttaataaaatgaaagggtcaacggccctgtttatattggtataattatttactcttatttggtataaagggttttcgtgtatctctatgtggatctaaataatacaggattgtctagaagcggtttccaggccaccgctctcctgcctacatcccatcatggctgctgcggtgtcactgggctaccgtgagatccaagttgaaatcagaagcctactttgatggtaggtttgaatgacgtgtcctacagcctcagaggcagcaggaggctagcaaagcttaaatgcctccttctctgcccccagcctctgtcccccttggaggagggctgtaggaagattccctcttcctgccaagccaccttccagtgagctctggatgaagctctggccaaccaaagacactgtccccacagcaggtgcctggtgggccacgtgttctcacactggtggaggagctgggcttctgtccaaggcacaaaccttactatggaaagcagccatatttg

SEQ ID NO: 14971 - DNA, 2458 bp, Homo sapiens
  source 1..2458: mol_type = unassigned DNA
gctgcgctgcggtgcgcacgggctccgccggttgctattccggctggtggcggccgccgcaggaagggccggttcctgcgctccccccgcccctttccctcgccttcggctgacgctgacgtcggatgagtgatccggagggacgctccgaccgcggccgggaggctcctgggggccggggctccgaggttataatataacttatcctctcatgcttttttcctgccccttctccccaaatcatcaacaatagaagaagaagaaaacatgtcaggacacaaatgcagttatccctgggacttacaggatcgatatgctcaagataagtcagttgtaaataagatgcaacagaaatattgggagacgaagcaggcctttattaaagccacagggaagaaggaagatgaacatgttgttgcctctgacgcggacctggatgccaagctagagctgtttcattcaattcagagaacctgtctggacttatcgaaagcaattgtactctatcaaaagaggatatgtttcttgtctcaagaagaaaacgaactgggaaaatttcttcgatcccaaggtttccaagataaaaccagagcaggaaagatgatgcaagcgacaggaaaggccctctgcttttcttcccagcaaaggttggccttacgaaatcctttgtgtcgatttcaccaagaagtggagacttttcggcatcgggccatctcagatacttggctgacggtgaaccgcatggaacagtgcaggacggaatatagaggagcactattatggatgaaggacgtgtctcaggagcttgatccagacctctacaagcaaatggagaagttcaggaaggtacaaacacaagtgcgccttgcaaaaaaaaactttgacaaattgaagatggatgtttgtcaaaaagtggatcttcttggagcgagcagatgcaatctcttgtctcacatgctagcaacataccagaccactctgcttcatttttgggagaaaacttctcacactatggcagccatccatgagagtttcaaaggttatcaaccatatgaatttactactttaaagagcttacaagaccctatgaaaaaattagttgagaaagaagagaagaagaaaatcaaccagcaggaaagtacagatgcagccgtgcaggagccgagccaattaatttcattagaggaagaaaaccagcgcaaggaatcctctagttttaagactgaagatggaaaaagtattttatctgccttagacaaaggctctacacatactgcatgctcaggacccatagatgaactattagacatgaaatctgaggaaggtgcttgcctgggaccagtggcagggaccccggaacctgaaggtgctgacaaagatgacctgctgctgttgagtgagatcttcaatgcttcctccttggaagagggcgagttcagcaaagagtgggccgctgtgtttggagacggccaagtgaaggagccagtgcccactatggccctgggagagccagaccccaaggcccagacaggctcaggtttccttccttcgcagcttttagaccaaaatatgaaagacttacaggcctcgctacaagaacctgctaaggctgcctcagacctgactgcctggttcagcctcttcgctgacctcgacccactctcaaatcctgatgctgttgggaaaaccgataaagaacacgaattgctcaatgcatgaatctgtacccttcgggagggcactcacatgccgcccccagcagctcccctgggggctagcagaagtataaagtgatcagtatgctgttttaataattatgtgccattttaataaaatgaaagggtcaacggccctgtttatattggtataattatttactcttatttggtataaagggttttcgtgtatctctatgtggatctaaataatacaggattgtctagaagcggtttccaggccaccgctctcctgcctacatcccatcatggctgctgcggtgtcactgggctaccgtgagatccaagttgaaatcagaagcctactttgatggtaggtttgaatgacgtgtcctacagcctcagaggcagcaggaggctagcaaagcttaaatgcctccttctctgcccccagcctctgtcccccttggaggagggctgtaggaagattccctcttcctgccaagccaccttccagtgagctctggatgaagctctggccaaccaaagacactgtccccacagcaggtgcctggtgggccacgtgttctcacactggtggaggagctgggcttctgtccaaggcacaaaccttactatggaaagcagccatatttgcagataccactgtctccttttgtcctcttcgtggctggaattcaaaagcatgtatttctgaagcctcttgtgacattgttttttttttttttttaattaaacagaaaagatatttgacatgcaaa

SEQ ID NO: 14972 - DNA, 2383 bp, Homo sapiens
  source 1..2383: mol_type = unassigned DNA
actctgggcggcggatccgagcgggggataccccaggagatgggggtcgaggagagaccccggggagtagagagagagaaactcactccccgagtccccgaccctccccaagcaaggttataatataacttatcctctcatgcttttttcctgccccttctccccaaatcatcaacaatagaagaagaagaaaacatgtcaggacacaaatgcagttatccctgggacttacaggatcgatatgctcaagataagtcagttgtaaataagatgcaacagaaatattgggagacgaagcaggcctttattaaagccacagggaagaaggaagatgaacatgttgttgcctctgacgcggacctggatgccaagctagagctgtttcattcaattcagagaacctgtctggacttatcgaaagcaattgtactctatcaaaagaggatatgtttcttgtctcaagaagaaaacgaactgggaaaatttcttcgatcccaaggtttccaagataaaaccagagcaggaaagatgatgcaagcgacaggaaaggccctctgcttttcttcccagcaaaggttggccttacgaaatcctttgtgtcgatttcaccaagaagtggagacttttcggcatcgggccatctcagatacttggctgacggtgaaccgcatggaacagtgcaggacggaatatagaggagcactattatggatgaaggacgtgtctcaggagcttgatccagacctctacaagcaaatggagaagttcaggaaggtacaaacacaagtgcgccttgcaaaaaaaaactttgacaaattgaagatggatgtttgtcaaaaagtggatcttcttggagcgagcagatgcaatctcttgtctcacatgctagcaacataccagaccactctgcttcatttttgggagaaaacttctcacactatggcagccatccatgagagtttcaaaggttatcaaccatatgaatttactactttaaagagcttacaagaccctatgaaaaaattagttgagaaagaagagaagaagaaaatcaaccagcaggaaagtacagatgcagccgtgcaggagccgagccaattaatttcattagaggaagaaaaccagcgcaaggaatcctctagttttaagactgaagatggaaaaagtattttatctgccttagacaaaggctctacacatactgcatgctcaggacccatagatgaactattagacatgaaatctgaggaaggtgcttgcctgggaccagtggcagggaccccggaacctgaaggtgctgacaaagatgacctgctgctgttgagtgagatcttcaatgcttcctccttggaagagggcgagttcagcaaagagtgggccgctgtgtttggagacggccaagtgaaggagccagtgcccactatggccctgggagagccagaccccaaggcccagacaggctcaggtttccttccttcgcagcttttagaccaaaatatgaaagacttacaggcctcgctacaagaacctgctaaggctgcctcagacctgactgcctggttcagcctcttcgctgacctcgacccactctcaaatcctgatgctgttgggaaaaccgataaagaacacgaattgctcaatgcatgaatctgtacccttcgggagggcactcacatgccgcccccagcagctcccctgggggctagcagaagtataaagtgatcagtatgctgttttaataattatgtgccattttaataaaatgaaagggtcaacggccctgtttatattggtataattatttactcttatttggtataaagggttttcgtgtatctctatgtggatctaaataatacaggattgtctagaagcggtttccaggccaccgctctcctgcctacatcccatcatggctgctgcggtgtcactgggctaccgtgagatccaagttgaaatcagaagcctactttgatggtaggtttgaatgacgtgtcctacagcctcagaggcagcaggaggctagcaaagcttaaatgcctccttctctgcccccagcctctgtcccccttggaggagggctgtaggaagattccctcttcctgccaagccaccttccagtgagctctggatgaagctctggccaaccaaagacactgtccccacagcaggtgcctggtgggccacgtgttctcacactggtggaggagctgggcttctgtccaaggcacaaaccttactatggaaagcagccatatttgcagataccactgtctccttttgtcctcttcgtggctggaattcaaaagcatgtatttctgaagcctcttgtgacattgttttttttttttttttaattaaacagaaaagatatttgacatgc

SEQ ID NO: 14973 - DNA, 1539 bp, Homo sapiens
  source 1..1539: mol_type = unassigned DNA
atgtcaggacacaaatgcagttatccctgggacttacaggatcgatatgctcaagataagtcagttgtaaataagatgcaacagaaatattgggagacgaagcaggcctttattaaagccacagggaagaaggaagatgaacatgttgttgcctctgacgcggacctggatgccaagctagagctgtttcattcaattcagagaacctgtctggacttatcgaaagcaattgtactctatcaaaagaggatatgtttcttgtctcaagaagaaaacgaactgggaaaatttcttcgatcccaaggtttccaagataaaaccagagcaggaaagatgatgcaagcgacaggaaaggccctctgcttttcttcccagcaaaggttggccttacgaaatcctttgtgtcgatttcaccaagaagtggagacttttcggcatcgggccatctcagatacttggctgacggtgaaccgcatggaacagtgcaggacggaatatagaggagcactattatggatgaaggacgtgtctcaggagcttgatccagacctctacaagcaaatggagaagttcaggaaggtacaaacacaagtgcgccttgcaaaaaaaaactttgacaaattgaagatggatgtttgtcaaaaagtggatcttcttggagcgagcagatgcaatctcttgtctcacatgctagcaacataccagaccactctgcttcatttttgggagaaaacttctcacactatggcagccatccatgagagtttcaaaggttatcaaccatatgaatttactactttaaagagcttacaagaccctatgaaaaaattagttgagaaagaagagaagaagaaaatcaaccagcaggaaagtacagatgcagccgtgcaggagccgagccaatatttacagaatatttgcctcgagatgaaagcaaattcagatattaagatgctacagaaagggaaagaaggccagcaaattggcatattaatttcattagaggaagaaaaccagcgcaaggaatcctctagttttaagactgaagatggaaaaagtattttatctgccttagacaaaggctctacacatactgcatgctcaggacccatagatgaactattagacatgaaatctgaggaaggtgcttgcctgggaccagtggcagggaccccggaacctgaaggtgctgacaaagatgacctgctgctgttgagtgagatcttcaatgcttcctccttggaagagggcgagttcagcaaagagtgggccgctgtgtttggagacggccaagtgaaggagccagtgcccactatggccctgggagagccagaccccaaggcccagacaggctcaggtttccttccttcgcagcttttagaccaaaatatgaaagacttacaggcctcgctacaagaacctgctaaggctgcctcagacctgactgcctggttcagcctcttcgctgacctcgacccactctcaaatcctgatgctgttgggaaaaccgataaagaacacgaattgctcaatgcatga

SEQ ID NO: 14974 - DNA, 551 bp, Homo sapiens
  source 1..551: mol_type = unassigned DNA
gggggcgcgccgggcgggctgcaggaagcagcaggagacgcccggcagccgggacggtcggggacgcctggttataatataacttatcctctcatgcttttttcctgccccttctccccaaatcatcaacaatagaagaagaagaaaacatgtcaggacacaaatgttatccctgggacttacaggatcgatatgctcaagataagtcagttgtaaataagatgcaacagaaatattgggagacgaagcaggcctttattaaagccacagggaagaaggaagatgaacatgttgttgcctctgacgcggacctggatgccaagctagagctgtttcattcaattcagagaacctgtctggacttatcgaaagcaattgtactctatcaaaagaggatatgtttcttgtctcaagaagaaaacgaactgggaaaatttcttcgatcccaaggtttccaagataaaaccagagcaggaaagatgatgcaagcgacaggaaaggccctctgcttttcttcccagcaaaggttggccttacgaaatcctttgtgt

SEQ ID NO: 14975 - DNA, 604 bp, Homo sapiens
  source 1..604: mol_type = unassigned DNA
ggatccgagcgggggataccccaggagatgggggtcgaggagagaccccggggagtagagagagagaaactcactccccgagtccccgaccctccccaagcaagaagaagaagaaaacatgtcaggacacaaatgcagttatccctgggacttacaggatcgatatgctcaagataagtcagttgtaaataagatgcaacagaaatattgggagacgaagcaggcctttattaaagccacagggaagaaggaagatgaacatgttgttgcctctgacgcggacctggatgccaagctagagctgtttcattcaattcagagaacctgtctggacttatcgaaagcaattgtactctatcaaaagaggatatgtttcttgtctcaagaagaaaacgaactgggaaaatttcttcgatcccaaggtttccaagataaaaccagagcaggaaagatgatgcaagcgacaggaaaggccctctgcttttcttcccagcaaaggttggccttacgaaatcctttgtgtcgatttcaccaagaagtggagacttttcggcatcgggccatctcagatacttggctgacggtgaaccgcatggaacagtgc

SEQ ID NO: 14976 - DNA, 1170 bp, Homo sapiens
  source 1..1170: mol_type = unassigned DNA
aaaacggacggtgcagggggtgggccacgtgtccagccctaacgaaacggtaaccagccctgggaagcccgcaagaggcctcagcggtggccgtccgagagccgagaggtgagggtgcccccgcctcacctgcagaggggccgttccgggctcgaacccggcaccttccggaaaatggcggctgccaggcccagcctgggccgagtcctcccaggatcctctgtcctgttcctgtgtgacatgcaggagaagttccgccacaacatcgcctacttcccacagatcgtctcagtggctgcccgcatgctcaaggtggcccggctgcttgaggtgccagtcatgctgacggagcagtacccacaaggcctgggccccacggtgcccgagctggggactgagggccttcggccgctggccaagacctgcttcagcatggtgcctgccctgcagcaggagctggacagtcggccccagctgcgctctgtgctgctctgtggcattgaggcacaggcctgcatcttggacccccgttcttatccggggttggccctgacctctctctacccacagaacacgaccctggacctcctagaccgggggctgcaggtccatgtggtggtggacgcctgctcctcacgcagccaggtggaccggctggtggctctggcccgcatgagacagagtggtgccttcctctccaccagcgaagggctcattctgcagcttgtgggcgatgccgtccacccccagttcaaggagatccagaaactcatcaaggagcccgccccagacagcggactgctgggcctcttccaaggccagaactccctcctccactgaactccaaccctgccttgagggaagaccaccctcctgtcacccggacctcagtggaagcccgttccccccatccctggatcccaagagtggtgcgatccaccaggagtgccgcccccttgtggggggggcagggtgctgccttcccattggacagctgctcccggaaatgcaaatgagactcctggaaactgggtgggaattggctgagccaagatggaggcggggctcggccccgggccacttcacggggcgggaaggggaggggaagaagagtctcagactgtgggacacggactcgcagaataaacatatatgtggctgtggaccaaa

SEQ ID NO: 14977 - DNA, 1122 bp, Homo sapiens
  source 1..1122: mol_type = unassigned DNA
aaaacggacggtgcagggggtgggccacgtgtccagccctaacgaaacggtaaccagccctgggaagcccgcaagaggcctcagcggtggccgtccgagagccgagaggtgagggtgcccccgcctcacctgcagaggggccgttccgggctcgaacccggcaccttccggaaaatggcggctgccaggcccagcctgggccgagtcctcccaggatcctctgtcctgttcctgtgtgacatgcaggagaagttccgccacaacatcgcctacttcccacagatcgtctcagtggctgcccgcatgctcaaggtggcccggctgcttgaggtgccagtcatgctgacggagcagtacccacaaggcctgggccccacggtgcccgagctggggactgagggccttcggccgctggccaagacctgcttcagcatggtgcctgccctgcagcaggagctggacagtcggccccagctgcgctctgtgctgctctgtggcattgaggcacaggcctgcatcttgaacacgaccctggacctcctagaccgggggctgcaggtccatgtggtggtggacgcctgctcctcacgcagccaggtggaccggctggtggctctggcccgcatgagacagagtggtgccttcctctccaccagcgaagggctcattctgcagcttgtgggcgatgccgtccacccccagttcaaggagatccagaaactcatcaaggagcccgccccagacagcggactgctgggcctcttccaaggccagaactccctcctccactgaactccaaccctgccttgagggaagaccaccctcctgtcacccggacctcagtggaagcccgttccccccatccctggatcccaagagtggtgcgatccaccaggagtgccgcccccttgtggggggggcagggtgctgccttcccattggacagctgctcccggaaatgcaaatgagactcctggaaactgggtgggaattggctgagccaagatggaggcggggctcggccccgggccacttcacggggcgggaaggggaggggaagaagagtctcagactgtgggacacggactcgcagaataaacatatatgtggctgtggaccaaa

SEQ ID NO: 14978 - DNA, 912 bp, Homo sapiens
  source 1..912: mol_type = unassigned DNA
aaaacggacggtgcagggggtgggccacgtgtccagccctaacgaaacggtaaccagccctgggaagcccgcaagaggcctcagcggtggccgtccgagagccgagaggtgagggtgcccccgcctcacctgcagaggggccgttccgggctcgaacccggcaccttccggaaaatggcggctgccaggcccagcctgggccgagtcctcccaggatcctctgtcctgttcctgtgtgacatgcaggagaagttccgccacaacatcgcctacttcccacagatcgtctcagtggctgcccgcatgctcaagaacacgaccctggacctcctagaccgggggctgcaggtccatgtggtggtggacgcctgctcctcacgcagccaggtggaccggctggtggctctggcccgcatgagacagagtggtgccttcctctccaccagcgaagggctcattctgcagcttgtgggcgatgccgtccacccccagttcaaggagatccagaaactcatcaaggagcccgccccagacagcggactgctgggcctcttccaaggccagaactccctcctccactgaactccaaccctgccttgagggaagaccaccctcctgtcacccggacctcagtggaagcccgttccccccatccctggatcccaagagtggtgcgatccaccaggagtgccgcccccttgtggggggggcagggtgctgccttcccattggacagctgctcccggaaatgcaaatgagactcctggaaactgggtgggaattggctgagccaagatggaggcggggctcggccccgggccacttcacggggcgggaaggggaggggaagaagagtctcagactgtgggacacggactcgcagaataaacatatatgtggctgtggaccaaa

SEQ ID NO: 14979 - DNA, 4128 bp, Homo sapiens
  source 1..4128: mol_type = unassigned DNA
cgtgcaggggcgggctccgagcgtggggtgggcgcttgcgcactgccgctgcggctgttgctgcggagccaggaggggaagcgatggctgggcccgcgtggatctctaaggtctctcggctgctgggggcattccacaacccaaaacaggtgaccagaggttttactggtggtgttcagacagtaactttaattccaggagatggtattggcccagaaatttcagctgcagttatgaagatttttgatgctgccaaagcacctattcagtgggaggagcggaacgtcactgccattcaaggacctggaggaaagtggatgatcccttcagaggctaaagagtccatggataagaacaagatgggcttgaaaggccctttgaagaccccaatagcagccggtcacccatctatgaatttactgctgcgcaaaacatttgacctttacgcgaatgtccgaccatgtgtctctatcgaaggctataaaaccccttacaccgatgtaaatattgtgaccattcgagagaacacagaaggagaatacagtggaattgagcatgtgattgttgatggagtcgtgcagagtatcaagctcatcaccgagggggcgagcaagcgcattgctgagtttgcctttgagtatgcccggaacaaccaccggagcaacgtcacggcggtgcacaaagccaacatcatgcggatgtcagatgggctttttctacaaaaatgcagggaagttgcagaaagctgtaaagatattaaatttaatgagatgtaccttgatacagtatgtttgaatatggtacaagatccttcccaatttgatgttcttgttatgccaaatttgtatggagacatccttagtgacttgtgtgcaggattgatcggaggtctcggtgtgacaccaagtggcaacattggagccaatggggttgcaatttttgagtcggttcatgggacggctccagacattgcaggcaaggacatggcgaatcccacagccctcctgctcagtgccgtgatgatgctgcgccacatgggactttttgaccatgctgcaagaattgaggctgcgtgttttgctacaattaaggacggaaagagcttgacaaaagatttgggaggcaatgcaaaatgctcagacttcacagaggaaatctgtcgccgagtaaaagatttagattaacacttctacaactggcatttacatcagtcactctaaatggacaccacatgaacctctgtttagaatacctacgtatgtatgcattggtttgcttgtttcttgacagtacatttttagatctggccttttcttaacaaaatctgtgcaaaagatgcaggtggatgtccctaggtctgttttcaaagaactttttccaagtgcttgttttatttattaagtgtctacctggtaaatgttttttttgtaaactctgagtggactgtatcatttgctattctaaaccattttacacttaagttaaaatagtttctcttcagctgtaaataacaggatacagaattaacaagagaaaatgtctaactttttaagaaaaaccttattttcttcggtttttgaaaaacataatggaaataaaacaggatattgacataatagcacaaaatgacactcttctaaaactaaatgggcacaagagaattttcctgggaaagttcacatcaaaaagagtgaatgtggtatatttctaaatgatatggaaaatagagacagatttgtcctttacagaaattactgagtgtgaataaaaacttcagatccaagaaatatataatgagagatataatttttgttaataagacaaaggtaatatattggatacaaagacacaaatgtattgtgtgttcaattattttgttgtcttgagatttaatattctttccaagagcttttaatgaagcagagagctagtacttcattttcactggatacattttcagcatcatgagttgtcacagcctctgagcccctgatctgaagccagaagggctgagtgtattgtaaacttattcttgcatgttgctgtctgggaatggaccacactacagcaggtagttctgggggcgatactgccgaaaggcccgaacacatgtattttggctgcaattgaggaacttgggatgctattaattttgtatttcagcaactgccccttctcctatcccaaagcaccaattactgccctctgcctcagcagtaccagtataagatgacattccaaagactggaggcaactcagcctgagttaattcacaaaattatgccatgctggggcttgagcttgagcttgggcttaggcttgggctcagcttttgaccctcaggcatctcctttcccttcctgtcttcctctcccttctcctctgctgcagcatgattttcttaatcttcagacactcactattttcatgaacagttaccctctgtccccacaaccaaagacaactcatggcctcctttggcccttgtgtaacattgcaaacctgtggctttgcaaaatgtacccaggtcacaaggggatttttttttttttagcaatgatatccctgtctgggtcactttttaagcttgtaaccgcccccccagacttataatcttaaatgtattttcctttgtttaagctgctgcttcctctgtttcattggattgtgccagttatcagtggctcttgggttcaaagtaataaagaattccaaaactgagatgtttgctttctctacctgtttcctgttcagatgccttcggtcattttggctcagcttgctactgagaatggctgcttcccgtattcagaatggaagtggggtggtctggtggcgacaggctaacgtagagctggctgcttttatgagaatgcgccacttgaccccatcctgcacctttgtttattccagggcactaatggtcactcgcatgcccgctgtgcacagtcctgtgagttaaatgcccactactctctgcactggtcccacctgctcaattgacaaaaaaaatcaggtccttgttgacagttctgttaaaaggtttaatattcaaattatacattaaatagaatcaaacaggcagcagcagttttattaagcatcaagtcagttggcatgtgggtggcggagtgcctggtaatggaataatagggtcggcgatgcccgccaagattccagagtaagtcaggtcgctaggtgagttgtgactgattgcttttcctgcagcgcacgtgagcagtatcagccatctctctcctacccgctccacagcctactgctggctgtcctgtatgtgagctagcagctttttaatctacctggaactaaggccaaaaattatcagccctttcgttctggaaggagagctgatctcatttgtcacctgaacaaaaagcaatacttaaactgaattaaaactacccacacgtgaagcttcttggaattgtcagctattgttggcgtaagacctggtaaatgtagagccagtgctgtgccctgacctggagatctaacagacttggcagaaatgcctgtgcccagactgaagagacctggggctcaggaagaggctcggaacgcctgccctctattctatagaaactgcaggcataggccctgattacattttttgctcttggtaaaaggagtcaatgatacctttgtacttctccaaaactgtgagccgtttcagtttcatcgtgggacctaaaagggaaatgagaagaaatgagtgaggcccaggctctgagaactctgagaatgtgtgtggtaaagactcacactcagtcctatatataactcaggaattaagccagataatcaggaccgtcagtagccagcctccaagacagtgatcgctcctggtattcatatggcttgtgtgtagtctcctgtgttataccactggttgtggccagtggagtatagatgaagggttggtatgtcacctctgagaataggttataaaagatcagtttcttttatacacataggaaagtagtgtaagctacatctgccttttccttgacctgtacccagttttgaccctcagtccattttctctgaaatggatttatttgttccatctcttgaatgaataaattgttgaagcaattaaaaaataga

SEQ ID NO: 14980 - DNA, 1037 bp, Homo sapiens
  source 1..1037: mol_type = unassigned DNA
aggaggggaagcgatggctgggcccgcgtggatctctaaggtctctcggctgctgggggcattccacaacccaaaacaggtgaccagaggttttactggtggtgttcagacagtaactttaattccaggagatggtattggcccagaaatttcagctgcagttatgaagatttttgatgctgccaaagccctttgaagaccccaatagcagccggtcacccatctatgaatttactgctgcgcaaaacatttgacctttacgcgaatgtccgaccatgtgtctctatcgaaggctataaaaccccttacaccgatgtaaatattgtgaccattcgagagaacacagaaggagaatacagtggaattgagcatgtgattgttgatggagtcgtgcagagtatcaagctcatcaccgagggggcgagcaagcgcattgctgagtttgcctttgagtatgcccggaacaaccaccggagcaacgtcacggcggtgcacaaagccaacatcatgcggatgtcagatgggctttttctacaaaaatgcagggaagttgcagaaagctgtaaagatattaaatttaatgagatgtaccttgatacagtatgtttgaatatggtacaagatccttcccaatttgatgttcttgttatgccaaatttgtatggagacatccttagtgacttgtgtgcaggattgatcggaggtctcggtgtgacaccaagtggcaacattggagccaatggggttgcaatttttgagtcggttcatgggacggctccagacattgcaggcaaggacatggcgaatcccacagccctcctgctcagtgccgtgatgatgctgcgccacatgggactttttgaccatgctgcaagaattgaggctgcgtgttttgctacaattaaggacggaaagagcttgacaaaagatttgggaggcaatgcaaaatgctcagacttcacagaggaaatctgtcgccgagtaaaagatttagattaacacttctacaactggcatttacatcagtcactctaaat

SEQ ID NO: 14981 - DNA, 501 bp, Homo sapiens
  source 1..501: mol_type = unassigned DNA
gcgggaaacatggcggcattgagcggagtccgctggctgacccgagcgctggtctccgccgggaaccctggggcatggagaggtctgagtacctcggccgcggcgcacgctgcatcgcggagccaggccgaggacgtgagggtggagggctcctttcccgtgaccatgcttccgggagacggtgtggggcctgagctgatgcacgccgtcaaggaggtgttcaaggctgccgctgtcccagtggagttccaggagcaccacctgagtgaggtgcagaatatggcatctgaggagaagctggagcaggtgctgagttccatgaaggagaacaaagtggccatcattggaaagattcataccccgatggagtataagggggagctagcctcctatgatatgcggctgaggcgtaagttggacttatttgccaacgtagtccatgtgaagtcacttcctgggtatgactcggcacaacaatctagacctggtgatcattcgaga

SEQ ID NO: 14982 - DNA, 1545 bp, Homo sapiens
  source 1..1545: mol_type = unassigned DNA
gtcacttcccacgcgacttcctgcgggaaacatggcggcattgagcggagtccgctggctgacccgagcgctggtctccgccgggaaccctggggcatggagaggtctgagtacctcggccgcggcgcacgctgcatcgcggagccaggccgaggacgtgagggtggagggctcctttcccgtgaccatgcttccgggagacggtgtggggcctgagctgatgcacgccgtcaaggaggtgttcaaggctgccgctgtcccagtggagttccaggagcaccacctgagtgaggtgcagaatatggcatctgaggagaagctggagcaggtgctgagttccatgaaggagaacaaagtggccatcattggaaagattcataccccgatggagtataagggggagctagcctcctatgatatgcggctgaggcgtaagttggacttatttgccaacgtagtccatgtgaagtcacttcctgggtatatgactcggcacaacaatctagacctggtgatcattcgagagcagacagaaggggagtacagctctctggaacatgagagtgcaaggggtgtgattgagtgtttgaagattgtcacacgagccaagtctcagcggattgcaaagttcgcctttgactatgccaccaagaaggggcggggcaaggtcactgctgtccacaaggccaacatcatgaaacttggggatgggttgttcctgcagtgctgtgaggaagttgctgaactgtaccccaaaatcaaatttgagacaatgatcatagacaactgctgcatgcagctggtgcagaatccttaccagtttgatgtgcttgtgatgcccaatctctatgggaacattattgacaatctggctgctggcctggttgggggagctggtgtggtccctggtgagagctatagtgcagaatacgcagtctttgagacgggtgcccggcacccatttgcccaggcagtgggcaggaatatagccaatcccacggccatgctgctgtcggcttccaacatgctgcggcatcttaatcttgagtatcactccagcatgatcgcagatgcggtgaagaaggtgatcaaagttggcaaggtgcggactcgagacatgggcggctacagcaccacaaccgacttcatcaagtctgtcatcggtcacctgcagactaaagggagctagagccctttatttcttccaaccttgcaaggaccacactccccatacccttcagtgcagtgtaccagggaagagaccttgtgcctctaagcagtggaccatggtcaccttgctgggtagagcctaggttgtccttgggccggcttccttaggggacagactgttgggtggtgatggggattgttaggatggagcccaggccacatggatgatgatgattctcccccacaggttcgaacctctgacatgggtggctatgctacttgccatgacttcactgaggctgtcattgctgccttgccccacccataggccctgtccatacccatgtaaggtgttcaataaagaacatgaaccaa

SEQ ID NO: 14983 - DNA, 1230 bp, Homo sapiens
  source 1..1230: mol_type = unassigned DNA
gtcacttcccacgcgacttcctgcgggaaacatggcggcattgagcggagtccgctggctgacccgagcgctggtctccgccgggaaccctggggcatggagaggtctgagtacctcggccgcggcgcacgctgcatcgcggagccaggccgaggacgtgagggtggagggctcctttcccgtgaccatgcttccgggagacggtgtggggcctgagctgatgcacgccgtcaaggaggtgttcaaggctgccgctgtcccagtggagttccaggagcaccacctgagtgaggtgcagaatatggcatctgaggagaagctggagcaggtgctgagttccatgaaggagaacaaagtggccatcattggaaagattcataccccgatggagtataagggggagctagcctcctatgatatgcggctgaggcgtaagttggacttatttgccaacgtagtccatgtgaagtcacttcctgggtatatgactcggcacaacaatctagacctggtgatcattcgagagcagacagaaggggagtacagctctctggaacatgagagtgcaaggggtgtgattgagtgtttgaagattgtcacacgagccaagtctcagcggattgcaaagttcgcctttgactatgccaccaagaaggggcggggcaaggtcactgctgtccacaaggccaacatcatgaaacttggggatgggttgttcctgcagtgctgtgaggaagttgctgaactgtaccccaaaatcaaatttgagacaatgatcatagacaactgctgcatgcagctggtgcagaatccttaccagtttgatgtgcttgtgatgcccaatctctatgggaacattattgacaatctggctgctggcctggttgggggagctggtgtggtccctggtgagagctatagtgcagaatacgcagtctttgagacgggtgcccggcacccatttgcccaggcagtgggcaggaatatagccaatcccacggccatgctgctgtcggcttccaacatgctgcggcatcttaatcttgagtatcactccagcatgatcgcagatgcggtgaagaaggtgatcaaagttggcaaggttcgaacctctgacatgggtggctatgctacttgccatgacttcactgaggctgtcattgctgccttgccccacccataggccctgtccatacccatgtaaggtgttcaataaagaacatgaaccaa

SEQ ID NO: 14984 - DNA, 1627 bp, Homo sapiens
  source 1..1627: mol_type = unassigned DNA
gcgggaaacatggcggcattgagcggagtccgctggctgacccgagcgctggtctccgccgggaaccctggggcatggagaggtctgagtacctcggccgcggcgcacgctgcatcgcggagccaggccgaggacgtgagggtggagggctcctttcccgtgaccatgcttccgggagacggtgtggggcctgagctgatgcacgccgtcaaggaggtgttcaaggctgccgctgtcccagtggagttccaggagcaccacctgagtgaggtgcagaatatggcatctgaggagaagctggagcaggtgctgagttccatgaaggagaacaaagtggccatcattggaaagattcataccccgatggagtataagggggagctagcctcctatgatatgcggctgaggcgtaagttggacttatttgccaacgtagtccatgtgaagtcacttcctgggtatatgactcggcacaacaatctagacctggtgatcattcgagagcagacagaaggggagtacagctctctggaacatgaggtgaggccccagaaactgggggagggcaaggatgaagatgggagagaggtggagctccttgtttcccttcccagtgtcacctagctgctgctttcttcttacccagagtgcaaggggtgtgattgagtgtttgaagattgtcacacgagccaagtctcagcggattgcaaagttcgcctttgactatgccaccaagaaggggcggggcaaggtcactgctgtccacaaggccaacatcatgaaacttggggatgggttgttcctgcagtgctgtgaggaagttgctgaactgtaccccaaaatcaaatttgagacaatgatcatagacaactgctgcatgcagctggtgcagaatccttaccagtttgatgtgcttgtgatgcccaatctctatgggaacattattgacaatctggctgctggcctggttgggggagctggtgtggtccctggtgagagctatagtgcagaatacgcagtctttgagacgggtgcccggcacccatttgcccaggcagtgggcaggaatatagccaatcccacggccatgctgctgtcggcttccaacatgctgcggcatcttaatcttgagtatcactccagcatgatcgcagatgcggtgaagaaggtgatcaaagttggcaaggtgcggactcgagacatgggcggctacagcaccacaaccgacttcatcaagtctgtcatcggtcacctgcagactaaagggagctagagccctttatttcttccaaccttgcaaggaccacactccccatacccttcagtgcagtgtaccagggaagagaccttgtgcctctaagcagtggaccatggtcaccttgctgggtagagcctaggttgtccttgggccggcttccttaggggacagactgttgggtggtgatggggattgttaggatggagcccaggccacatggatgatgatgattctcccccacaggttcgaacctctgacatgggtggctatgctacttgccatgacttcactgaggctgtcattgctgccttgccccacccataggccctgtccatacccatgtaaggtgttcaataaagaacatgaacc

SEQ ID NO: 14985 - DNA, 1485 bp, Homo sapiens
  source 1..1485: mol_type = unassigned DNA
ggggcccagctggtcgcggtccccccctcaacatggcggcagcggtgctctaggcgccggaagggggcgtgaatcggtgcgaccgcgcgcgtgcgcagtaccgggtccgcgcctgtccccgaaacttcgcaccccgtcgaactctcgcgagagcggtatctgcgtgtcgggacgtgcggaggctctcactttccgtcatggcgctgaaggtagcgaccgtcgccggcagcgccgcgaaggcggtgctcgggccagcccttctctgccgtccctgggaggttctaggcgcccacgaggtcccctcgaggaacatcttttcagaacaaacaattcctccgtccgctaagtatggcgggcggcacacggtgaccatgatcccaggggatggcatcgggccagagctcatgctgcatgtcaagtccgtcttcaggcacgcatgtgtaccagtggactttgaagaggtgcacgtgagttccaatgctgatgaagaggacattcgcaatgccatcatggccatccgccggaaccgcgtggccctgaagggcaacatcgaaaccaaccataacctgccaccgtcgcacaaatctcgaaacaacatccttcgcaccagcctggacctctatgccaacgtcatccactgtaagagccttccaggcgtggtgacccggcacaaggacatagacatcctcattgtccgggagaacacagagggcgagtacagcagcctggagcatgagagtgtggcgggagtggtggagagcctgaagatcatcaccaaggccaagtccctgcgcattgccgagtatgccttcaagctggcgcaggagagcgggcgcaagaaagtgacggccgtgcacaaggccaacatcatgaaactgggcgatgggcttttcctccagtgctgcagggaggtggcagcccgctaccctcagatcaccttcgagaacatgattgtggataacaccaccatgcagctggtgtcccggccccagcagtttgatgtcatggtgatgcccaatctctatggcaacatcgtcaacaatgtctgcgcgggactggtcgggggcccaggccttgtggctggggccaactatggccatgtgtacgcggtgtttgaaacagctacgaggaacaccggcaagagtatcgccaataagaacatcgccaaccccacggccaccctgctggccagctgcatgatgctggaccacctcaagctgcactcctatgccacctccatccgtaaggctgtcctggcatccatggacaatgagaatatgcacactccggacatcgggggccagggcacaacatctgaagccatccaggacgtcatccgccacatccgcgtcatcaacggccgggccgtggaggcctaggctggccctaggaccttcttggtttgctccttggattccccttcccactccagcaccccagccagcctggtacgcagatcccagaataaagcaccttctccctaga

SEQ ID NO: 14986 - DNA, 1255 bp, Homo sapiens
  source 1..1255: mol_type = unassigned DNA
cgtgtcgggacgtgcggaggctctcactttccgtcatggcgctgaaggtagcgaccgtcgccggcagcgccgcgaaggcggtgctcgggccagcccttctctgccgtccctgggaggttctaggcgcccacgaggtcccctcgaggaacatcttttcagtaagtacctgccccctccgtccgctaagtatggcgggcggcacacggtgaccatgatcccaggggatggcatcgggccagagctcatgctgcatgtcaagtccgtcttcaggcacgcatgtgtaccagtggactttgaagaggtgcacgtgagttccaatgctgatgaagaggacattcgcaatgccatcatggccatccgccggaaccgcgtggccctgaagggcaacatcgaaaccaaccataacctgccaccgtcgcacaaatctcgaaacaacatccttcgcaccagcctggacctctatgccaacgtcatccactgtaagagccttccaggcgtggtgacccggcacaaggacatagacatcctcattgtccgggagaacacagagggcgagtacagcagcctggagcatgagagtgtggcgggagtggtggagagcctgaagatcatcaccaaggccaagtccctgcgcattgccgagtatgccttcaagctggcgcaggagagcgggcgcaagaaagtgacggccgtgcacaaggccaacatcatgaaactgggcgatgggcttttcctccagtgctgcagggaggtggcagcccgctaccctcagatcaccttcgagaacatgattgtggataacaccaccatgcagctggtgtcccggccccagcagtttgatgtcatggtgatgcccaatctctatggcaacatcgtcaacaatgtctgcgcgggactggtcgggggcccaggccttgtggctggggccaactatggccatgtgtacgcggtgtttgaaacagctacgaggaacaccggcaagagtatcgccaataagaacatcgccaaccccacggccaccctgctggccagctgcatgatgctggaccacctcaagctgcactcctatgccacctccatccgtaaggctgtcctggcatccatggacaatgagaatggcctggtgtgtgccgagcctgcctgtgtcctacagatgcacactccggacatcgggggccagggcacaacatctgaagccatccaggacgtcatccgccacatccgcgtcatcaacggccgggccgtggaggcctag

SEQ ID NO: 14987 - DNA, 1712 bp, Homo sapiens
  source 1..1712: mol_type = unassigned DNA
ggtcgcggtccccccctcaacatggcggcagcggtgctctaggcgccggaagggggcgtgaatcggtgcgaccgcgcgcgtgcgcagtaccgggtccgcgcctgtccccgaaacttcgcaccccgtcgaactctcgcgagagcggtatctgcgtgtcgggacgtgcggaggctctcactttccgtcatggcgctgaaggtagcgaccgtcgccggcagcgccgcgaaggcggtgctcgggccagcccttctctgccgtccctgggaggttctaggcgcccacgaggtcccctcgaggaacatcttttcagaacaaacaattcctccgtccgctaagtatggcgggcggcacacggtgaccatgatcccaggggatggcatcgggccagagctcatgctgcatgtcaagtccgtcttcaggcacgcatgtgtaccagtggactttgaagaggtgcacgtgagttccaatgctgatgaagaggacattcgcaatgccatcatggccatccgccggaaccgcgtggccctgaagggcaacatcgaaaccaaccataacctgccaccgtcgcacaaatctcgaaacaacatccttcgcaccagcctggacctctatgccaacgtcatccactgtaagagccttccaggcgtggtgacccggcacaaggacatagacatcctcattgtccgggagaacacagagggcgagtacagcagcctggagcatgagagtgtggcgggagtggtggagagcctgaagatcatcaccaaggccaagtccctgcgcattgccgagtatgccttcaagctggcgcaggagagcgggcgcaagaaagtgacggccgtgcacaaggccaacatcatgaaactgggcgatgggcttttcctccagtgctgcagggaggtggcagcccgctaccctcagatcaccttcgagaacatgattgtggataacaccaccatgcagctggtgtcccggccccagcagtttgatgtcatggtgatgcccaatctctatggcaacatcgtcaacaatgtctgcgcgggactggtcgggggcccaggccttgtggctggggccaactatggccatgtgtacgcggtgtttgaaacagctacgaggaacaccggcaagagtatcgccaataagaacatcgccaaccccacggccaccctgctggccagctgcatgatgctggaccacctcaagctgcactcctatgccacctccatccgtaaggctgtcctggcatccatggacaatgagaatgtgaggttcccctcgcaccctaccctgctgccccgcccagtctccccctgcagcctcctgtagcccgcctcatgcactgaccacagcccccaggggaggatggtactggatctggccccatcttctggcccttagctggtgccacttccctcctgtggcaatcccagtcctgcacgtcacaggagacagcggggggtggcagggcctggtgtgtgccgagcctgcctgtgtcctacagatgcacactccggacatcgggggccagggcacaacatctgaagccatccaggacgtcatccgccacatccgcgtcatcaacggccgggccgtggaggcctaggctggccctaggaccttcttggtttgctccttggattccccttcccactccagcaccccagccagcctggtacgcagatcccagaataaagcaccttctccctaga

SEQ ID NO: 14988 - DNA, 697 bp, Homo sapiens
  source 1..697: mol_type = unassigned DNA
ctgattaacagtgtagctgcttctccatagggaccattgttgtggaaggccatgaattgcacgatgaagacatccgcctcatgtacacctttgatcaggccacaggtgggactgcgcaatttgaagcacactcagatgctcaggctttggtcctcttagatgtcactcctgaccagtcaatggtagatgaaggaatggctcgggaagtcatcaatcgcatacagaaacttcgcaaaaagtgcaatctggttccaactgatgaaatcacagtgtactataaagcaaagtctgaaggaacatatctgaatagtgttattgaaagccacacagagttcatatttaccaccataaaggctcccttgaaaccatatccagtttctccatcggataaagtccttattcaagaaaaaacacagttgaagggatctgaactggaaattacactcaccagaggatcttcccttcctggtcctgcttgtgcatatgtcaatcttaacatttgtgcaaatggcagtgaacaaggcgagatgcagtggatcattcctgaaatctaccacttttggaagccaaggtggagtattgctcctggaaaatccaaaaggtgacaataggttggaccttttaaagctgaagagtgttgtcactagcatttttggtgtgaaaaatacagagctggctgtcttccatgatgaaacag

SEQ ID NO: 14989 - DNA, 4382 bp, Homo sapiens
  source 1..4382: mol_type = unassigned DNA
agcgtggacgccggatgagttgcttttaggcttgctggcccgcggggctgtccaggcacgcgaggcccctcagcaacaaaatgcttcaacaagttccagaaaacataaattttcctgctgaagaagagaaaatcttggagttttggactgaatttaattgttttcaggaatgcttaaagcaatcaaaacataaaccaaaatttaccttctatgatggtcctccttttgcaactggactgcctcactatggacatatacttgcgggtacaattaaagatatagttacaagatatgctcaccagagtgggtttcatgttgacagaagatttggatgggattgccatggcttacctgtggaatatgaaattgataagacactgggaatcagaggaccagaggatgtggccaaaatggggattacagagtataacaatcagtgccgagcaattgtgatgagatattctgctgagtggaagtctactgttagcagacttggccgatggattgactttgacaatgactataaaactctgtatccacaattcatggaatcagtctggtgggtcttcaaacaactctatgataaaggccttgtttatagaggtgtgaaagtcatgcccttctctacggcatgtaacactccactttccaacttcgagtcacaccagaattataaggatgttcaagatccttcagtatttgtaactttccctttggaagaagatgaaactgtatctttagttgcttggacaaccactccctggactctacctagtaaccttgctgtgtgtgttaatccagaaatgcaatatgtgaaaattaaagatgttgccagaggacgattactcattttaatggaagccagattgtcagccctctataaattggagagtgactatgagatccttgaaagatttcctggtgcctatcttaaaggcaagaagtacaggcccctgtttgactatttcctgaagtgtaaagagaatggcgctttcactgtgcttgttgacaactatgtgaaggaagaagaaggcacaggggttgtccaccaagctccttacttcggtgctgaggactatcgggtctgtatggactttaacattattcggaaagactcactccctgtttgccctgtggatgcttcaggctgcttcacaacggaggtgacagatttcgcaggacagtatgtgaaggatgctgacaaaagtatcatcaggactttgaaggaacaaggccgacttctggttgccaccaccttcactcacagctaccctttttgctggagatcagacactcctctaatttacaaagcagtgcccagctggtttgtgcgagtggagaacatggtggaccagctcctaaggaacaatgacctgtgctactgggtcccagagttggtacgagaaaaacgatttggaaattggctgaaagatgcacgtgactggacaatttccagaaacagatactggggcacccccatcccactgtgggtcagcgatgactttgaggaggtggtatgcattgggtcagtggcggaacttgaagaactgtcaggagcaaagatctcagatctccacagagagagtgttgaccacctgaccattccttcacgctgtgggaagggatccttgcaccgcatctctgaagtgtttgactgttggtttgagagtggcagcatgccctatgctcaggttcattacccgtttgaaaacaagagggagtttgaggatgcttttcctgcagatttcattgccgagggcatcgaccaaaccagaggatggttttataccctgctggtgctggccacggccctctttggacaaccgcctttcaagaacgtaattgtgaatgggcttgtcctggcaagtgatggccaaaaaatgagcaaacggaaaaagaattatccagatccagtttccatcatccagaagtatggtgctgatgccctcagattatatctgattaactcccctgtggtgagagcagaaaacctccgctttaaagaagagggtgtgcgggacgtccttaaggatgtactgctcccatggtacaatgcctatcgcttcttaatccagaacgttctgaggctccagaaggaggaagaaatagaatttctctacaatgagaacacggttagagaaagccccaacattacagaccggtggatcctgtccttcatgcagtctctcattggcttctttgagactgaaatggcagcttataggctttatactgtggtgcctcgcctggtcaagtttgtagatattctgaccaattggtatgttagaatgaaccgcagaagattaaagggtgaaaatgggatggaggattgtgtcatggccctagaaaccttgtttagtgttctgctttctctttgcagacttatggctccctacacaccttttctcactgaattgatgtaccagaatctaaaggtgctgattgaccctgtttctgttcaggacaaggacacactcagcattcactacctcatgctgccccgtgttcgagaagaattgattgacaagaaaacagagagtgcagtatctcagatgcagtctgtgattgaacttggaagagtgatcagagaccgaaaaactattcccataaagtatcctttgaaagaaattgtggttatccatcaagatccagaagctcttaaagatatcaagtctttggagaagtatatcattgaggaactcaatgttcgaaaagttacactgtctacagataaaaacaagtatggcattcggctaagggcagaaccagatcacatggtcctggggaagcgtctgaagggagcctttaaggcagtgatgacgtccatcaagcagttgagcagtgaggagctggagcagttccagaagactgggaccattgttgtggaaggccatgaattgcacgatgaagacatccgcctcatgtacacctttgatcaggccacaggtgggactgcgcaatttgaagcacactcagatgctcaggctttggtcctcttagatgtcactcctgaccagtcaatggtagatgaaggaatggctcgggaagtcatcaatcgcatacagaaacttcgcaaaaagtgcaatctggttccaactgatgaaatcacagtgtactataaagcaaagtctgaaggaacatatctgaatagtgttattgaaagccacacagagttcatatttaccaccataaaggctcccttgaaaccatatccagtttctccatcggataaagtccttattcaagaaaaaacacagttgaagggatctgaactggaaattacactcaccagaggatcttcccttcctggtcctgcttgtgcatatgtcaatcttaacatttgtgcaaatggcagtgaacaaggcgagatgcagtggatcattcctgaaatctaccacttttggaagccaaggtggagtattgctcctggaaaatccaaaaggtgacaataggttggaccttttaaagctgaagagtgttgtcactagcatttttggtgtgaaaaatacagagctggctgtcttccatgatgaaacagaaatacaaaaccaaactgacttactgagtcttagtggaaaaacactttgtgtgactgcaggatcggctccctctctgatcaacagttctagtactcttctttgtcagtatatcaacctacagctcctgaatgcaaagccacaagagtgtttaatggggacagtgggcactctcctgcttgaaaacccacttgggcagaatggactcacccaccaaggtcttctgtatgaagcagccaaggtgtttggccttcggagcaggaagctaaagctgtttctgaatgagacccaaacgcaggaaattacagaagacatccccgtgaagactttgaatatgaagactgtgtatgtttctgtgttaccaacaacagcagacttctagcatgtacttatcaatgttgttcggtcagcccttccctaattacacctatcccctacacatacatgcacatagacacacacatgaacacactgaagatatttccttcaggtgtgtgtaaaatatgctgcttggattgaaattcaaatgggattgattagtcaagtaacttgagacctcacagtaatcttcacacttaaccttagacacctatgcagtcatgttgggagcaggttacaatgttacttcagcccacagtttatttctatacttgagttcttaagtacagaagatagaagtgatttaaatggcatagtatatatatcattttctggccttttaaaatttatttgagacctcttgatgaaatggacatattatatatttctgccacctggattttcctggataatttgatggaatattttaagtttcagtaaatcagaacaataaacaaactcagatat

SEQ ID NO: 14990 - DNA, 4656 bp, Homo sapiens
  source 1..4656: mol_type = unassigned DNA
tccgtgcgcccggttgcagcgtggacgccggatgagttgcttttaggcttgctggcccgcggggctgtccaggcacgcgaggcccctcaggtacgccctctcttccctgcaggatccggccctcaaagacgagggtcacgcacgcgttacaaccccgaaacagtagcacaagatttaatttttaaaagagcgtgtttcttcggggcttgccgttcgttcgtttccagcctcaggaatttatggtcgcctttttgaatgagcaacaaaatgcttcaacaagttccagaaaacataaattttcctgctgaagaagagaaaatcttggagttttggactgaatttaattgttttcaggaatgcttaaagcaatcaaaacataaaccaaaatttaccttctatgatggtcctccttttgcaactggactgcctcactatggacatatacttgcgggtacaattaaagatatagttacaagatatgctcaccagagtgggtttcatgttgacagaagatttggatgggattgccatggcttacctgtggaatatgaaattgataagacactgggaatcagaggaccagaggatgtggccaaaatggggattacagagtataacaatcagtgccgagcaattgtgatgagatattctgctgagtggaagtctactgttagcagacttggccgatggattgactttgacaatgactataaaactctgtatccacaattcatggaatcagtctggtgggtcttcaaacaactctatgataaaggccttgtttatagaggtgtgaaagtcatgcccttctctacggcatgtaacactccactttccaacttcgagtcacaccagaattataaggatgttcaagatccttcagtatttgtaactttccctttggaagaagatgaaactgtatctttagttgcttggacaaccactccctggactctacctagtaaccttgctgtgtgtgttaatccagaaatgcaatatgtgaaaattaaagatgttgccagaggacgattactcattttaatggaagccagattgtcagccctctataaattggagagtgactatgagatccttgaaagatttcctggtgcctatcttaaaggcaagaagtacaggcccctgtttgactatttcctgaagtgtaaagagaatggcgctttcactgtgcttgttgacaactatgtgaaggaagaagaaggcacaggggttgtccaccaagctccttacttcggtgctgaggactatcgggtctgtatggactttaacattattcggaaagactcactccctgtttgccctgtggatgcttcaggctgcttcacaacggaggtgacagatttcgcaggacagtatgtgaaggatgctgacaaaagtatcatcaggactttgaaggaacaaggccgacttctggttgccaccaccttcactcacagctaccctttttgctggagatcagacactcctctaatttacaaagcagtgcccagctggtttgtgcgagtggagaacatggtggaccagctcctaaggaacaatgacctgtgctactgggtcccagagttggtacgagaaaaacgatttggaaattggctgaaagatgcacgtgactggacaatttccagaaacagatactggggcacccccatcccactgtgggtcagcgatgactttgaggaggtggtatgcattgggtcagtggcggaacttgaagaactgtcaggagcaaagatctcagatctccacagagagagtgttgaccacctgaccattccttcacgctgtgggaagggatccttgcaccgcatctctgaagtgtttgactgttggtttgagagtggcagcatgccctatgctcaggttcattacccgtttgaaaacaagagggagtttgaggatgcttttcctgcagatttcattgccgagggcatcgaccaaaccagaggatggttttataccctgctggtgctggccacggccctctttggacaaccgcctttcaagaacgtaattgtgaatgggcttgtcctggcaagtgatggccaaaaaatgagcaaacggaaaaagaattatccagatccagtttccatcatccagaagtatggtgctgatgccctcagattatatctgattaactcccctgtggtgagagcagaaaacctccgctttaaagaagagggtgtgcgggacgtccttaaggatgtactgctcccatggtacaatgcctatcgcttcttaatccagaacgttctgaggctccagaaggaggaagaaatagaatttctctacaatgagaacacggttagagaaagccccaacattacagaccggtggatcctgtccttcatgcagtctctcattggcttctttgagactgaaatggcagcttataggctttatactgtggtgcctcgcctggtcaagtttgtagatattctgaccaattggtatgttagaatgaaccgcagaagattaaagggtgaaaatgggatggaggattgtgtcatggccctagaaaccttgtttagtgttctgctttctctttgcagacttatggctccctacacaccttttctcactgaattgatgtaccagaatctaaaggtgctgattgaccctgtttctgttcaggacaaggacacactcagcattcactacctcatgctgccccgtgttcgagaagaattgattgacaagaaaacagagagtgcagtatctcagatgcagtctgtgattgaacttggaagagtgatcagagaccgaaaaactattcccataaagtatcctttgaaagaaattgtggttatccatcaagatccagaagctcttaaagatatcaagtctttggagaagtatatcattgaggaactcaatgttcgaaaagttacactgtctacagataaaaacaagtatggcattcggctaagggcagaaccagatcacatggtcctggggaagcgtctgaagggagcctttaaggcagtgatgacgtccatcaagcagttgagcagtgaggagctggagcagttccagaagactgggaccattgttgtggaaggccatgaattgcacgatgaagacatccgcctcatgtacacctttgatcaggccacaggtgggactgcgcaatttgaagcacactcagatgctcaggctttggtcctcttagatgtcactcctgaccagtcaatggtagatgaaggaatggctcgggaagtcatcaatcgcatacagaaacttcgcaaaaagtgcaatctggttccaactgatgaaatcacagtgtactataaagcaaagtctgaaggaacatatctgaatagtgttattgaaagccacacagagttcatatttaccaccataaaggctcccttgaaaccatatccagtttctccatcggataaagtccttattcaagaaaaaacacagttgaagggatctgaactggaaattacactcaccagaggatcttcccttcctggtcctgcttgtgcatatgtcaatcttaacatttgtgcaaatggcagtgaacaaggtggagtattgctcctggaaaatccaaaaggtgacaataggttggaccttttaaagctgaagagtgttgtcactagcatttttggtgtgaaaaatacagagctggctgtcttccatgatgaaacagaaatacaaaaccaaactgacttactgagtcttagtggaaaaacactttgtgtgactgcaggatcggctccctctctgatcaacagttctagtactcttctttgtcagtatatcaacctacagctcctgaatgcaaagccacaagagtgtttaatggggacagtgggcactctcctgcttgaaaacccacttgggcagaatggactcacccaccaaggtcttctgtatgaagcagccaaggtgtttggccttcggagcaggaagctaaagctgtttctgaatgagacccaaacgcaggaaattacagaagacatccccgtgaagactttgaatatgaagactgtgtatgtttctgtgttaccaacaacagcagacttctagcatgtacttatcaatgttgttcggtcagcccttccctaattacacctatcccctacacatacatgcacatagacacacacatgaacacactgaagatatttccttcaggtgtgtgtaaaatatgctgcttggattgaaattcaaatgggattgattagtcaagtaacttgagacctcacagtaatcttcacacttaaccttagacacctatgcagtcatgttgggagcaggttacaatgttacttcagcccacagtttatttctatacttgagttcttaagtacagaagatagaagtgatttaaatggcatagtatatatatcattttctggccttttaaaatttatttgagacctcttgatgaaatggacatattatatatttctgccacctggattttcctggataatttgatggaatattttaagtttcagtaaatcagaacaataaacaaactcagatataaatgtgttgaaagtaattcattctcccatagataaatgaaacttgaaatgtgtaaactttgaagaacataaaaacttcatggtggtttcttattaagacagtggactagacatctaataaaacttctttccaaaa

SEQ ID NO: 14991 - DNA, 4341 bp, Homo sapiens
  source 1..4341: mol_type = unassigned DNA
cgcccggttgcagcgtggacgccggatgagttgcttttaggcttgctggcccgcggggctgtccaggcacgcgaggcccctcagcaacaaaatgcttcaacaagttccagaaaacataaattttcctgctgaagaagagaaaatcttggagttttggactgaatttaattgttttcaggaatgcttaaagcaatcaaaacataaaccaaaatttaccttctatgatggtcctccttttgcaactggactgcctcactatggacatatacttgcgggtacaattaaagatatagttacaagatatgctcaccagagtgggtttcatgttgacagaagatttggatgggattgccatggcttacctgtggaatatgaaattgataagacactgggaatcagaggaccagaggatgtggccaaaatggggattacagagtataacaatcagtgccgagcaattgtgatgagatattctgctgagtggaagtctactgttagcagacttggccgatggattgactttgacaatgactataaaactctgtatccacaattcatggaatcagtctggtgggtcttcaaacaactctatgataaaggccttgtttatagaggtgtgaaagtcatgcccttctctacggcatgtaacactccactttccaacttcgagtcacaccagaattataaggatgttcaagatccttcagtatttgtaactttccctttggaagaagatgaaactgtatctttagttgcttggacaaccactccctggactctacctagtaaccttgctgtgtgtgttaatccagaaatgcaatatgtgaaaattaaagatgttgccagaggacgattactcattttaatggaagccagattgtcagccctctataaattggagagtgactatgagatccttgaaagatttcctggtgcctatcttaaaggcaagaagtacaggcccctgtttgactatttcctgaagtgtaaagagaatggcgctttcactgtgcttgttgacaactatgtgaaggaagaagaaggcacaggggttgtccaccaagctccttacttcggtgctgaggactatcgggtctgtatggactttaacattattcggaaagactcactccctgtttgccctgtggatgcttcaggctgcttcacaacggaggtgacagatttcgcaggacagtatgtgaaggatgctgacaaaagtatcatcaggactttgaaggaacaaggccgacttctggttgccaccaccttcactcacagctaccctttttgctggagatcagacactcctctaatttacaaagcagtgcccagctggtttgtgcgagtggagaacatggtggaccagctcctaaggaacaatgacctgtgctactgggtcccagagttggtacgagaaaaacgatttggaaattggctgaaagatgcacgtgactggacaatttccagaaacagatactggggcacccccatcccactgtgggtcagcgatgactttgaggaggtggtatgcattgggtcagtggcggaacttgaagaactgtcaggagcaaagatctcagatctccacagagagagtgttgaccacctgaccattccttcacgctgtgggaagggatccttgcaccgcatctctgaagtgtttgactgttggtttgagagtggcagcatgccctatgctcaggttcattacccgtttgaaaacaagagggagtttgaggatgcttttcctgcagatttcattgccgagggcatcgaccaaaccagaggatggttttataccctgctggtgctggccacggccctctttggacaaccgcctttcaagaacgtaattgtgaatgggcttgtcctggcaagtgatggccaaaaaatgagcaaacggaaaaagaattatccagatccagtttccatcatccagaagtatggtgctgatgccctcagattatatctgattaactcccctgtggtgagagcagaaaacctccgctttaaagaagagggtgtgcgggacgtccttaaggatgtactgctcccatggtacaatgcctatcgcttcttaatccagaacgttctgaggctccagaaggaggaagaaatagaatttctctacaatgagaacacggttagagaaagccccaacattacagaccggtggatcctgtccttcatgcagtctctcattggcttctttgagactgaaatggcagcttataggctttatactgtggtgcctcgcctggtcaagtttgtagatattctgaccaattggtatgttagaatgaaccgcagaagattaaagggtgaaaatgggatggaggattgtgtcatggccctagaaaccttgtttagtgttctgctttctctttgcagacttatggctccctacacaccttttctcactgaattgatgtaccagaatctaaaggtgctgattgaccctgtttctgttcaggacaaggacacactcagcattcactacctcatgctgccccgtgttcgagaagaattgattgacaagaaaacagagagtgcagtatctcagatgcagtctgtgattgaacttggaagagtgatcagagaccgaaaaactattcccataaagtatcctttgaaagaaattgtggttatccatcaagatccagaagctcttaaagatatcaagtctttggagaagtatatcattgaggaactcaatgttcgaaaagttacactgtctacagataaaaacaagtatggcattcggctaagggcagaaccagatcacatggtcctggggaagcgtctgaagggagcctttaaggcagtgatgacgtccatcaagcagttgagcagtgaggagctggagcagttccagaagactgggaccattgttgtggaaggccatgaattgcacgatgaagacatccgcctcatgtacacctttgatcaggccacaggtgggactgcgcaatttgaagcacactcagatgctcaggctttggtcctcttagatgtcactcctgaccagtcaatggtagatgaaggaatggctcgggaagtcatcaatcgcatacagaaacttcgcaaaaagtgcaatctggttccaactgatgaaatcacagtgtactataaagcaaagtctgaaggaacatatctgaatagtgttattgaaagccacacagagttcatatttaccaccataaaggctcccttgaaaccatatccagtttctccatcggataaagtccttattcaagaaaaaacacagttgaagggatctgaactggaaattacactcaccagaggatcttcccttcctggtcctgcttgtgcatatgtcaatcttaacatttgtgcaaatggcagtgaacaaggtggagtattgctcctggaaaatccaaaaggtgacaataggttggaccttttaaagctgaagagtgttgtcactagcatttttggtgtgaaaaatacagagctggctgtcttccatgatgaaacagaaatacaaaaccaaactgacttactgagtcttagtggaaaaacactttgtgtgactgcaggatcggctccctctctgatcaacagttctagtactcttctttgtcagtatatcaacctacagctcctgaatgcaaagccacaagagtgtttaatggggacagtgggcactctcctgcttgaaaacccacttgggcagaatggactcacccaccaaggtcttctgtatgaagcagccaaggtgtttggccttcggagcaggaagctaaagctgtttctgaatgagacccaaacgcaggaaattacagaagacatcccgtgaagactttgaatatgaagactgtgtatgtttctgtgttaccaacaacagcagacttctagcatgtacttatcaatgttgttcggtcagcccttccctaattacacctatcccctacacatacatgcacatagacacacacatgaacacactgaagatatttccttcaggtgtgtgtaaaatatgctgcttggattgaaattcaaatgggattgattagtcaagtaacttgagacctcacagtaatcttcacacttaaccttagacacctatgcagtcatgttgggagcaggttacaatgttacttcagcccacagtttatttctatacttgagttcttaagtacagaagatagaagtgatttaaatggcatagtatatatatcattttctggccttttaaaatttatttgagacctcttgatgaaatggacatattatatatttctgccacctggattttcctggataatttgatggaatattttaagtttcagtaaatcagaacaataaacaaactcagat

SEQ ID NO: 14992 - DNA, 1103 bp, Homo sapiens
  source 1..1103: mol_type = unassigned DNA
agcgcgttgcatcacctccgtgcgcccggttgcagcgtggacgccggatgagttgcttttaggcttgctggcccgcggggctgtccaggcacgcgaggcccctcagcaacaaaatgcttcaacaagttccagaaaacataaattttcctgctgaagaagagaaaatcttggagttttggactgaatttaattgttttcaggaatgcttaaagcaatcaaaacataaaccaaaatttaccttctatgatggtcctccttttgcaactggactgcctcactatggacatatacttgcgggtacaattaaagatatagttacaagatatgctcaccagagtgggtttcatgttgacagaagatttggatgggattgccatggcttacctgtggaatatgaaattgataagacactgggaatcagaggaccagaggatgtggccaaaatggggattacagagtataacaatcagtgccgagcaattgtgatgagatattctgctgagtggaagtctactgttagcagacttggccgatggattgactttgacaatgactataaaactctgtatccacaattcatggaatcagtctggtgggtcttcaaacaactctatgataaaggccttgtttatagaggtgtgaaagtcatgcccttctctacggcatgtaacactccactttccaacttcgagtcacaccagaattataaggatgttcaagatccttcagtatttgtaactttccctttggaagaagatgaaactgtatctttagttgcttggacaaccactccctggactctacctagtaaccttgctgtgtgtgttaatccagaaatgcaatatgtgaaaattaaagatgttgccagaggacgattactcattttaatggaagccagattgtcagccctctataaattggagagtgactatgagatccttgaaagatttcctggtgcctatcttaaaggcaagaagtacaggcccctgtttgactatttcctgaagtgtaaagagaatggcgctttcactgtgcttgttgacaactatgtgaaggaagaagaaggcacaggggttgtccaccaagctccttacttcggtgct

SEQ ID NO: 14993 - DNA, 583 bp, Homo sapiens
  source 1..583: mol_type = unassigned DNA
ggacgccggatgagttgcttttaggcttgctggcccgcggggctgtccaggcacgcgaggcccctcagacttatggctccctacacaccttttctcactgaattgatgtaccagaatctaaaggtgctgattgaccctgtttctgttcaggacaaggacacactcagcattcactacctcatgctgccccgtgttcgagaagaattgattgacaagaaaacagagagtgcagtatctcagatgcagtctgtgattgaacttggaagagtgatcagagaccgaaaaactattcccataaagttgaagggatctgaactggaaattacactcaccagaggatcttcccttcctggtcctgcttgtgcatatgtcaatcttaacatttgtgcaaatggcagtgaacaaggtggagtattgctcctggaaaatccaaaaggtgacaataggttggaccttttaaagctgaagagtgttgtcactagcatttttggtgtgaaaaatacagagctggctgtcttccatgatgaaacagaaatacaaaaccaaactgacttactgagtcttagtggaaaaacactttgtg

SEQ ID NO: 14994 - DNA, 4406 bp, Homo sapiens
  source 1..4406: mol_type = unassigned DNA
cggtgcggagcctgtctccttcactggatcccgcattttcagcgcgttgcatcacctccgtgcgcccggttgcagcgtggacgccggatgagttgcttttaggcttgctggcccgcggggctgtccaggcacgcgaggcccctcagcaacaaaatgcttcaacaagttccagaaaacataaattttcctgctgaagaagagaaaatcttggagttttggactgaatttaattgttttcaggaatgcttaaagcaatcaaaacataaaccaaaatttaccttctatgatggtcctccttttgcaactggactgcctcactatggacatatacttgcgggtacaattaaagatatagttacaagatatgctcaccagagtgggtttcatgttgacagaagatttggatgggattgccatggcttacctgtggaatatgaaattgataagacactgggaatcagaggaccagaggatgtggccaaaatggggattacagagtataacaatcagtgccgagcaattgtgatgagatattctgctgagtggaagtctactgttagcagacttggccgatggattgactttgacaatgactataaaactctgtatccacaattcatggaatcagtctggtgggtcttcaaacaactctatgataaaggccttgtttatagaggtgtgaaagtcatgcccttctctacggcatgtaacactccactttccaacttcgagtcacaccagaattataaggatgttcaagatccttcagtatttgtaactttccctttggaagaagatgaaactgtatctttagttgcttggacaaccactccctggactctacctagtaaccttgctgtgtgtgttaatccagaaatgcaatatgtgaaaattaaagatgttgccagaggacgattactcattttaatggaagccagattgtcagccctctataaattggagagtgactatgagatccttgaaagatttcctggtgcctatcttaaaggcaagaagtacaggcccctgtttgactatttcctgaagtgtaaagagaatggcgctttcactgtgcttgttgacaactatgtgaaggaagaagaaggcacaggggttgtccaccaagctccttacttcggtgctgaggactatcgggtctgtatggactttaacattattcggaaagactcactccctgtttgccctgtggatgcttcaggctgcttcacaacggaggtgacagatttcgcaggacagtatgtgaaggatgctgacaaaagtatcatcaggactttgaaggaacaaggccgacttctggttgccaccaccttcactcacagctaccctttttgctggagatcagacactcctctaatttacaaagcagtgcccagctggtttgtgcgagtggagaacatggtggaccagctcctaaggaacaatgacctgtgctactgggtcccagagttggtacgagaaaaacgatttggaaattggctgaaagatgcacgtgactggacaatttccagaaacagatactggggcacccccatcccactgtgggtcagcgatgactttgaggaggtggtatgcattgggtcagtggcggaacttgaagaactgtcaggagcaaagatctcagatctccacagagagagtgttgaccacctgaccattccttcacgctgtgggaagggatccttgcaccgcatctctgaagtgtttgactgttggtttgagagtggcagcatgccctatgctcaggttcattacccgtttgaaaacaagagggagtttgaggatgcttttcctgcagatttcattgccgagggcatcgaccaaaccagaggatggttttataccctgctggtgctggccacggccctctttggacaaccgcctttcaagaacgtaattgtgaatgggcttgtcctggcaagtgatggccaaaaaatgagcaaacggaaaaagaattatccagatccagtttccatcatccagaagtatggtgctgatgccctcagattatatctgattaactcccctgtggtgagagcagaaaacctccgctttaaagaagagggtgtgcgggacgtccttaaggatgtactgctcccatggtacaatgcctatcgcttcttaatccagaacgttctgaggctccagaaggaggaagaaatagaatttctctacaatgagaacacggttagagaaagccccaacattacagaccggtggatcctgtccttcatgcagtctctcattggcttctttgagactgaaatggcagcttataggctttatactgtggtgcctcgcctggtcaagtttgtagatattctgaccaattggtatgttagaatgaaccgcagaagattaaagggtgaaaatgggatggaggattgtgtcatggccctagaaaccttgtttagtgttctgctttctctttgcagacttatggctccctacacaccttttctcactgaattgatgtaccagaatctaaaggtgctgattgaccctgtttctgttcaggacaaggacacactcagcattcactacctcatgctgccccgtgttcgagaagaattgattgacaagaaaacagagagtgcagtatctcagatgcagtctgtgattgaacttggaagagtgatcagagaccgaaaaactattcccataaagtatcctttgaaagaaattgtggttatccatcaagatccagaagctcttaaagatatcaagtctttggagaagtatatcattgaggaactcaatgttcgaaaagttacactgtctacagataaaaacaagtatggcattcggctaagggcagaaccagatcacatggtcctggggaagcgtctgaagggagcctttaaggcagtgatgacgtccatcaagcagttgagcagtgaggagctggagcagttccagaagactgggaccattgttgtggaaggccatgaattgcacgatgaagacatccgcctcatgtacacctttgatcaggccacaggtgggactgcgcaatttgaagcacactcagatgctcaggctttggtcctcttagatgtcactcctgaccagtcaatggtagatgaaggaatggctcgggaagtcatcaatcgcatacagaaacttcgcaaaaagtgcaatctggttccaactgatgaaatcacagtgtactataaagcaaagtctgaaggaacatatctgaatagtgttattgaaagccacacagagttcatatttaccaccataaaggctcccttgaaaccatatccagtttctccatcggataaagtccttattcaagaaaaaacacagttgaagggatctgaactggaaattacactcaccagaggatcttcccttcctggtcctgcttgtgcatatgtcaatcttaacatttgtgcaaatggcagtgaacaaggtggagtattgctcctggaaaatccaaaaggtgacaataggttggaccttttaaagctgaagagtgttgtcactagcatttttggtgtgaaaaatacagagctggctgtcttccatgatgaaacagaaatacaaaaccaaactgacttactgagtcttagtggaaaaacactttgtgtgactgcaggatcggctccctctctgatcaacagttctagtactcttctttgtcagtatatcaacctacagctcctgaatgcaaagccacaagagtgtttaatggggacagtgggcactctcctgcttgaaaacccacttgggcagaatggactcacccaccaaggtcttctgtatgaagcagccaaggtgtttggccttcggagcaggaagctaaagctgtttctgaatgagacccaaacgcaggaaattacagaagacatccccgtgaagactttgaatatgaagactgtgtatgtttctgtgttaccaacaacagcagacttctagcatgtacttatcaatgttgttcggtcagcccttccctaattacacctatcccctacacatacatgcacatagacacacacatgaacacactgaagatatttccttcaggtgtgtgtaaaatatgctgcttggattgaaattcaaatgggattgattagtcaagtaacttgagacctcacagtaatcttcacacttaaccttagacacctatgcagtcatgttgggagcaggttacaatgttacttcagcccacagtttatttctatacttgagttcttaagtacagaagatagaagtgatttaaatggcatagtatatatatcattttctggccttttaaaatttatttgagacctcttgatgaaatggacatattatatatttctgccacctggattttcctggataatttgatggaatattttaagtttcagtaaatcagaacaataaacaaactcagatat

SEQ ID NO: 14995 - DNA, 4186 bp, Homo sapiens
  source 1..4186: mol_type = unassigned DNA
gcgcccggttgcagcgtggacgccggatgagttgcttttaggcttgctggcccgcggggctgtccaggcacgcgaggcccctcagcaacaaaatgcttcaacaagttccagaaaacataaattttcctgctgaagaagagaaaatcttggagttttggactgaatttaattgttttcaggaatgcttaaagcaatcaaaacataaaccaaagaatatgaaattgataagacactgggaatcagaggaccagaggatgtggccaaaatggggattacagagtataacaatcagtgccgagcaattgtgatgagatattctgctgagtggaagtctactgttagcagacttggccgatggattgactttgacaatgactataaaactctgtatccacaattcatggaatcagtctggtgggtcttcaaacaactctatgataaaggccttgtttatagaggtgtgaaagtcatgcccttctctacggcatgtaacactccactttccaacttcgagtcacaccagaattataaggatgttcaagatccttcagtatttgtaactttccctttggaagaagatgaaactgtatctttagttgcttggacaaccactccctggactctacctagtaaccttgctgtgtgtgttaatccagaaatgcaatatgtgaaaattaaagatgttgccagaggacgattactcattttaatggaagccagattgtcagccctctataaattggagagtgactatgagatccttgaaagatttcctggtgcctatcttaaaggcaagaagtacaggcccctgtttgactatttcctgaagtgtaaagagaatggcgctttcactgtgcttgttgacaactatgtgaaggaagaagaaggcacaggggttgtccaccaagctccttacttcggtgctgaggactatcgggtctgtatggactttaacattattcggaaagactcactccctgtttgccctgtggatgcttcaggctgcttcacaacggaggtgacagatttcgcaggacagtatgtgaaggatgctgacaaaagtatcatcaggactttgaaggaacaaggccgacttctggttgccaccaccttcactcacagctaccctttttgctggagatcagacactcctctaatttacaaagcagtgcccagctggtttgtgcgagtggagaacatggtggaccagctcctaaggaacaatgacctgtgctactgggtcccagagttggtacgagaaaaacgatttggaaattggctgaaagatgcacgtgactggacaatttccagaaacagatactggggcacccccatcccactgtgggtcagcgatgactttgaggaggtggtatgcattgggtcagtggcggaacttgaagaactgtcaggagcaaagatctcagatctccacagagagagtgttgaccacctgaccattccttcacgctgtgggaagggatccttgcaccgcatctctgaagtgtttgactgttggtttgagagtggcagcatgccctatgctcaggttcattacccgtttgaaaacaagagggagtttgaggatgcttttcctgcagatttcattgccgagggcatcgaccaaaccagaggatggttttataccctgctggtgctggccacggccctctttggacaaccgcctttcaagaacgtaattgtgaatgggcttgtcctggcaagtgatggccaaaaaatgagcaaacggaaaaagaattatccagatccagtttccatcatccagaagtatggtgctgatgccctcagattatatctgattaactcccctgtggtgagagcagaaaacctccgctttaaagaagagggtgtgcgggacgtccttaaggatgtactgctcccatggtacaatgcctatcgcttcttaatccagaacgttctgaggctccagaaggaggaagaaatagaatttctctacaatgagaacacggttagagaaagccccaacattacagaccggtggatcctgtccttcatgcagtctctcattggcttctttgagactgaaatggcagcttataggctttatactgtggtgcctcgcctggtcaagtttgtagatattctgaccaattggtatgttagaatgaaccgcagaagattaaagggtgaaaatgggatggaggattgtgtcatggccctagaaaccttgtttagtgttctgctttctctttgcagacttatggctccctacacaccttttctcactgaattgatgtaccagaatctaaaggtgctgattgaccctgtttctgttcaggacaaggacacactcagcattcactacctcatgctgccccgtgttcgagaagaattgattgacaagaaaacagagagtgcagtatctcagatgcagtctgtgattgaacttggaagagtgatcagagaccgaaaaactattcccataaagtatcctttgaaagaaattgtggttatccatcaagatccagaagctcttaaagatatcaagtctttggagaagtatatcattgaggaactcaatgttcgaaaagttacactgtctacagataaaaacaagtatggcattcggctaagggcagaaccagatcacatggtcctggggaagcgtctgaagggagcctttaaggcagtgatgacgtccatcaagcagttgagcagtgaggagctggagcagttccagaagactgggaccattgttgtggaaggccatgaattgcacgatgaagacatccgcctcatgtacacctttgatcaggccacaggtgggactgcgcaatttgaagcacactcagatgctcaggctttggtcctcttagatgtcactcctgaccagtcaatggtagatgaaggaatggctcgggaagtcatcaatcgcatacagaaacttcgcaaaaagtgcaatctggttccaactgatgaaatcacagtgtactataaagcaaagtctgaaggaacatatctgaatagtgttattgaaagccacacagagttcatatttaccaccataaaggctcccttgaaaccatatccagtttctccatcggataaagtccttattcaagaaaaaacacagttgaagggatctgaactggaaattacactcaccagaggatcttcccttcctggtcctgcttgtgcatatgtcaatcttaacatttgtgcaaatggcagtgaacaaggtggagtattgctcctggaaaatccaaaaggtgacaataggttggaccttttaaagctgaagagtgttgtcactagcatttttggtgtgaaaaatacagagctggctgtcttccatgatgaaacagaaatacaaaaccaaactgacttactgagtcttagtggaaaaacactttgtgtgactgcaggatcggctccctctctgatcaacagttctagtactcttctttgtcagtatatcaacctacagctcctgaatgcaaagccacaagagtgtttaatggggacagtgggcactctcctgcttgaaaacccacttgggcagaatggactcacccaccaaggtcttctgtatgaagcagccaaggtgtttggccttcggagcaggaagctaaagctgtttctgaatgagacccaaacgcaggaaattacagaagacatccccgtgaagactttgaatatgaagactgtgtatgtttctgtgttaccaacaacagcagacttctagcatgtacttatcaatgttgttcggtcagcccttccctaattacacctatcccctacacatacatgcacatagacacacacatgaacacactgaagatatttccttcaggtgtgtgtaaaatatgctgcttggattgaaattcaaatgggattgattagtcaagtaacttgagacctcacagtaatcttcacacttaaccttagacacctatgcagtcatgttgggagcaggttacaatgttacttcagcccacagtttatttctatacttgagttcttaagtacagaagatagaagtgatttaaatggcatagtatatatatcattttctggccttttaaaatttatttgagacctcttgatgaaatggacatattatatatttctgccacctggattttcctggataatttgatggaatattttaagtttcagtaaatcagaacaataaacaaactcagat

SEQ ID NO: 14996 - DNA, 854 bp, Homo sapiens
  source 1..854: mol_type = unassigned DNA
aagagaatggcgctttcactgtgcttgttgacaactatgtgaaggaagaagaaggcacaggggttgtccaccaagctccttacttcggtgctgaggactatcggacttatggctccctacacaccttttctcactgaattgatgtaccagaatctaaaggtgctgattgaccctgtttctgttcaggacaaggacacactcagcattcactacctcatgctgccccgtgttcgagaagaattgattgacaagaaaacagagagtgcagtatctcagatgcagtctgtgattgaacttggaagagtgatcagagaccgaaaaactattcccataaagtatcctttgaaagaaattgtggttatccatcaagatccagaagctcttaaagatatcaagtctttggagaagtatatcattgaggaactcaatgttcgaaaagttacactgtctacagataaaaacaagtatggcattcggctaagggcagaaccagatcacatggtcctggggaagcgtctgaagggagcctttaaggcagtgatgacgtccatcaagcagttgagcagtgaggagctggagcagttccagaagactgggaccattgttgtggaaggccatgaattgcacgatgaagacatccgcctcatgtacacctttgatcaggccacaggtgggactgcgcaatttgaagcacactcagatgctcaggctttggtcctcttagatgtcactcctgaccagtcaatggtagatgaaggaatggctcgggaagtcatcaatcgcatacagaaacttcgcaaaaagtgcaatctggttccaactgatgaaatcacagtgtactataaagcaaagtc

SEQ ID NO: 14997 - DNA, 3688 bp, Homo sapiens
  source 1..3688: mol_type = unassigned DNA
agcgtggacgccggatgagttgcttttaggcttgctggcccgcggggctgtccaggcacgcgaggcccctcagcaacaaaatgcttcaacaagttccagaaaacataaattttcctgctgaagaagagaaaatcttggagttttggactgaatttaattgttttcaggaatgcttaaagcaatcaaaacataaaccaaaatttaccttctatgatggtcctccttttgcaactggactgcctcactatggacatatacttgcgggtacaattaaagatatagttacaagatatgctcaccagagtgggtttcatgttgacagaagatttggatgggattgccatggcttacctgtggaatatgaaattgataagacactgggaatcagaggaccagaggatgtggccaaaatggggattacagagtataacaatcagtgccgagcaattgtgatgagatattctgctgagtggaagtctactgttagcagacttggccgatggattgactttgacaatgactataaaactctgtatccacaattcatggaatcagtctggtgggtcttcaaacaactctatgataaaggccttgtttatagaggtgtgaaagtcatgcccttctctacggcatgtaacactccactttccaacttcgagtcacaccagaattataaggatgttcaagatccttcagtatttgtaactttccctttggaagaagatgaaactgtatctttagttgcttggacaaccactccctggactctacctagtaaccttgctgtgtgtgttaatccagaaatgcaatatgtgaaaattaaagatgttgccagaggacgattactcattttaatggaagccagattgtcagccctctataaattggagagtgactatgagatccttgaaagatttcctggtgcctatcttaaaggcaagaagtacaggcccctgtttgactatttcctgaagtgtaaagagaatggcgctttcactgtgcttgttgacaactatgtgaaggaagaagaaggcacaggggttgtccaccaagctccttacttcggtgctgaggactatcgggtctgtatggactttaacattattcggaaagactcactccctgtttgccctgtggatgcttcaggctgcttcacaacggaggtgacagatttcgcaggacagtatgtgaaggatgctgacaaaagtatcatcaggactttgaaggaacaaggccgacttctggttgccaccaccttcactcacagctaccctttttgctggagatcagacactcctctaatttacaaagcagtgcccagctggtttgtgcgagtggagaacatggtggaccagctcctaaggaacaatgacctgtgctactgggtcccagagttggtacgagaaaaacgatttggaaattggctgaaagatgcacgtgactggacaatttccagaaacagatactggggcacccccatcccactgtgggtcagcgatgactttgaggaggtggtatgcattgggtcagtggcggaacttgaagaactgtcaggagcaaagatctcagatctccacagagagagtgttgaccacctgaccattccttcacgctgtgggaagggatccttgcaccgcatctctgaagtgtttgactgttggtttgagagtggcagcatgccctatgctcaggttcattacccgtttgaaaacaagagggagtttgaggatgcttttcctgcagatttcattgccgagggcatcgaccaaaccagaggatggttttataccctgctggtgctggccacggccctctttggacaaccgcctttcaagaacgtaattgtgaatgggcttgtcctggcaagtgatggccaaaaaatgagcaaacggaaaaagaattatccagatccagtttccatcatccagaagtatggtgctgatgccctcagattatatctgattaactcccctgtggtgagagcagaaaacctccgctttaaagaagagggtgtgcgggacgtccttaaggatgtactgctcccatggtacaatgcctatcgcttcttaatccagaacgttctgaggctccagaaggaggaagaaatagaatttctctacaatgagaacacggttagagaaagccccaacattacagaccggtggatcctgtccttcatgcagtctctcattggcttctttgagactgaaatggcagcttataggctttatactgtggtgcctcgcctggtcaagtttgtagatattctgaccaattggtatgttagaatgaaccgcagaagattaaagggtgaaaatgggatggaggattgtgtcatggccctagaaaccttgtttagtgttctgctttctctttgcagacttatggctccctacacaccttttctcactgaattgatgtaccagaatctaaaggtgctgattgaccctgtttctgttcaggacaaggacacactcagcattcactacctcatgctgccccgtgttcgagaagaattgattgacaagaaaacagagagtgcagtatctcagatgcagtctgtgattgaacttggaagagtgatcagagaccgaaaaactattcccataaagttgaagggatctgaactggaaattacactcaccagaggatcttcccttcctggtcctgcttgtgcatatgtcaatcttaacatttgtgcaaatggcagtgaacaaggtggagtattgctcctggaaaatccaaaaggtgacaataggttggaccttttaaagctgaagagtgttgtcactagcatttttggtgtgaaaaatacagagctggctgtcttccatgatgaaacagaaatacaaaaccaaactgacttactgagtcttagtggaaaaacactttgtgtgactgcaggatcggctccctctctgatcaacagttctagtactcttctttgtcagtatatcaacctacagctcctgaatgcaaagccacaagagtgtttaatggggacagtgggcactctcctgcttgaaaacccacttgggcagaatggactcacccaccaaggtcttctgtatgaagcagccaaggtgtttggccttcggagcaggaagctaaagctgtttctgaatgagacccaaacgcaggaaattacagaagacatccccgtgaagactttgaatatgaagactgtgtatgtttctgtgttaccaacaacagcagacttctagcatgtacttatcaatgttgttcggtcagcccttccctaattacacctatcccctacacatacatgcacatagacacacacatgaacacactgaagatatttccttcaggtgtgtgtaaaatatgctgcttggattgaaattcaaatgggattgattagtcaagtaacttgagacctcacagtaatcttcacacttaaccttagacacctatgcagtcatgttgggagcaggttacaatgttacttcagcccacagtttatttctatacttgagttcttaagtacagaagatagaagtgatttaaatggcatagtatatatatcattttctggccttttaaaatttatttgagacctcttgatgaaatggacatattatatatttctgccacctggattttcctggataatttgatggaatattttaagtttcagtaaatcagaacaataaacaaactcagatat

SEQ ID NO: 14998 - DNA, 1280 bp, Homo sapiens
  source 1..1280: mol_type = unassigned DNA
atgatggtcctccttttgcaactggactgcctcactatggacatatacttgcgggacaaggacacactcagcattcactacctcatgctgccccgtgttcgagaagaattgattgacaagaaaacagagagtgcagtatctcagatgcagtctgtgattgaacttggaagagtgatcagagaccgaaaaactattcccataaagttgaagggatctgaactggaaattacactcaccagaggatcttcccttcctggtcctgcttgtgcatatgtcaatcttaacatttgtgcaaatggcagtgaacaaggtggagtattgctcctggaaaatccaaaaggtgacaataggttggaccttttaaagctgaagagtgttgtcactagcatttttggtgtgaaaaatacagagctggctgtcttccatgatgaaacagaaatacaaaaccaaactgacttactgagtcttagtggaaaaacactttgtgtgactgcaggatcggctccctctctgatcaacagttctagtactcttctttgtcagtatatcaacctacagctcctgaatgcaaagccacaagagtgtttaatggggacagtgggcactctcctgcttgaaaacccacttgggcagaatggactcacccaccaaggtcttctgtatgaagcagccaaggtgtttggccttcggagcaggaagctaaagctgtttctgaatgagacccaaacgcaggaaattacagaagacatccccgtgaagactttgaatatgaagactgtgtatgtttctgtgttaccaacaacagcagacttctagcatgtacttatcaatgttgttcggtcagcccttccctaattacacctatcccctacacatacatgcacatagacacacacatgaacacactgaagatatttccttcaggtgtgtgtaaaatatgctgcttggattgaaattcaaatgggattgattagtcaagtaacttgagacctcacagtaatcttcacacttaaccttagacacctatgcagtcatgttgggagcaggttacaatgttacttcagcccacagtttatttctatacttgagttcttaagtacagaagatagaagtgatttaaatggcatagtatatatatcattttctggccttttaaaatttatttgagacctcttgatgaaatggacatattatatatttctgccacctggattttcctggataatttgatggaatattttaagtttcagtaaatcagaacaataaacaaactcagatat

SEQ ID NO: 14999 - DNA, 3542 bp, Homo sapiens
  source 1..3542: mol_type = unassigned DNA
ggagcgcgtgcgccctcttactcggctccccttggtttcctggggtcctgccccttcaagctggggcgggagcggaggaccccgctctcaggggttgccggaccatgcgttgggggctgcgccctcgcgggccgggcgcggccgccctggccactgcccgaagtttgtgggggacgccccgccttccctgcagcccgggatggcaaggggcgacgaagaggcttctggtgcggtcggtctccggggccagtaaccaccagccgaactcgaatagtggcagataccgggacacggtgctgctgccgcagacgagcttccccatgaagctgctgggccgccagcagccggacacggagctggagatccagcagaaatgtggattttcagaactttattcatggcaaagagaaagaaaagtaaagacagaattttgccttcatgatggacctccttatgcaaacggtgaccctcatgttggacatgctttaaataagattttgaaagacatagccaatcgattccatatgatgaatggctccaaaatacattttgtgcccggctgggattgtcatgggttgcccattgaaataaaagtattatcagaacttggtagagaagctcagaatctttcagctatggaaattagaaagaaagctagatcatttgctaaagcagccattgagaaacagaaatcagcatttattcgttggggaataatggcagattggaataattgctactatacatttgatgggaagtatgaagccaaacagttgagaactttttaccaaatgtatgataagggcttggtttatcgatcttacaaacctgtgttttggtctccgtcatctaggactgcattggctgaagcagaacttgaatataatcctgagcatgtcagtcgttcaatatatgtaaaatttcctctcttaaagccttctccaaaattggcatctcttatagatggttcatctcctgttagtattttggtctggaccacacaaccttggacgattccagccaatgaagctgtttgctatatgcctgaatcaaagtatgctgttgtgaaatgttctaagtctggagacctctacgtactggcggcagataaagtagcatctgttgcttctactttggaaacaacatttgagactatttcaacactttcaggtgtagatttggaaaatggtacttgcagtcatccattaattcctgataaagcctctcctcttttacctgcaaatcatgtgaccatggcaaaaggaacgggattggttcacacagccccagctcatggtatggaagactacggtgtagcgtctcagcacaacctgcccatggattgtctagtggacgaagatggagttttcacagatgttgcaggtcctgaacttcaaaacaaggctgtccttgaagagggaactgatgtggttataaagatgcttcagactgcaaagaatttgttgaaagaggagaaattggtgcatagctatccgtatgactggaggaccaagaaacctgtggttattcgtgccagcaagcagtggtttataaacatcacggatattaagactgcagccaaggaattgttaaaaaaggtgaaatttattcctggatcagcactgaatggcatggttgaaatgatggacaggcggccatattggtgtatatcaaggcaaagagtttggggtgttccaattcctgtgtttcatcataagaccaaggatgaatacttgatcaacagccaaaccactgagcatattgttaaactagtggaacaacacggcagtgatatctggtggactcttccccctgaacaacttcttccaaaagaagtcttatctgaggttggtggccctgatgccttggaatatgtgccaggtcaggatattttggacatctggtttgatagcggaacttcatggtcttatgttcttccaggtcctgaccaaagagcagatttgtacttggaaggaaaagaccagctcgggggttggtttcagtcatccttattaacaagtgtggcagcaaggaagagagcaccttataagacagtgattgttcatggatttacccttggagaaaagggagaaaagatgtccaagtctcttgggaatgtcattcatcctgatgttgtcgttaatggaggacaagatcaaagcaaagagcctccgtatggtgctgatgtccttcgctggtgggtagctgattccaatgtcttcaccgaagttgcaattggcccatccgtgctcaatgctgccagagatgatattagcaagcttaggaatacacttcgctttcttttgggaaatgtggctgatttcaacccagaaacagattccatccctgtaaacgatatgtatgtcatagaccagtacatgctacacttactgcaggatttggcaaacaagattaccgaattatacaaacaatatgattttggaaaagttgttcggctgttacggacgttttataccagagagctctctaacttttatttcagtataatcaaagataggctctattgtgaaaaggaaaatgaccccaaacgacgctcttgtcagactgcattagttgaaattttggatgtaatagttcgttcttttgctcccattcttcctcacctggctgaagaggtgttccagcacataccttatattaaagagcccaagagtgttttccgtactgggtggattagtactagttctatctggaaaaagcccgggttggaagaagctgtggagagtgcgtgtgcaatgcgagactcatttcttggaagcatccctggcaaaaatgcagctgagtacaaggttatcactgtgatagaacctggactgctttttgagataatagagatgctgcagtctgaagagacttccagcacctctcagttgaatgaattaatgatggcttctgagtcaactttactggctcaggaaccacgagagatgactgcagatgtaatcgagcttaaagggaaattcctcatcaacttagaaggtggtgatattcgtgaagagtcttcctataaagtaattgtcatgccgactacgaaagaaaaatgcccccgttgttggaagtatacagcggagtcttcagatacactgtgtcctcgatgtgcagaagttgtcagtggaaaatagtattaacagctcactcgagcaagaaccctcctgacagtactggctagaagtttggatggattatttacaatataggaaagaaagccaagatttaggtaatgagtggatgagtaaatggtggaggatgggagtcaaaatcagaattatagaagaagtatttcctgtaactatagaaagaattatgtatatatacatgcagaaatatatatgtgtgtgtgtatctgtggatggatatatgtatatctcttcctatatatatccatagtggacttattcagaacatagatatgtattcagcttgtcttcaaatacggccaagcagaaaatgttttatattttataaatcatcttttgactctgtatttaaattctatgatactgaaaataaaggcattctgg

SEQ ID NO: 15000 - DNA, 3557 bp, Homo sapiens
  source 1..3557: mol_type = unassigned DNA
cttccgctcccggagcgcgtgcgccctcttactcggctccccttggtttcctggggtcctgccccttcaagctggggcgggagcggaggaccccgctctcaggggttgccggaccatgcgttgggggctgcgccctcgcgggccgggcgcggccgccctggccactgcccgaagtttgtgggggacgccccgccttccctgcagcccgggatggcaaggggcgacgaagaggcttctggtgcggtcggtctccggggccagtaaccaccagccgaactcgaatagtggcagataccgggacacggtgctgctgccgcagacgagcttccccatgaagctgctgggccgccagcagccggacacggagctggagatccagcagaaatgtggattttcagaactttattcatggcaaagagaaagaaaagtaaagacagaattttgccttcatgatggacctccttatgcaaacggtgaccctcatgttggacatgctttaaataagattttgaaagacatagccaatcgattccatatgatgaatggctccaaaatacattttgtgcccggctgggattgtcatgggttgcccattgaaataaaagtattatcagaacttggtagagaagctcagaatctttcagctatggaaattagaaagaaagctagatcatttgctaaagcagccattgagaaacagaaatcagcatttattcgttggggaataatggcagattggaataattgctactatacatttgatgggaagtatgaagccaaacagttgagaactttttaccaaatgtatgataagggcttggtttatcgatcttacaaacctgtgttttggtctccgtcatctaggactgcattggctgaagcagaacttgaatataatcctgagcatgtcagtcgttcaatatatgtaaaatttcctctcttaaagccttctccaaaattggcatctcttatagatggttcatctcctgttagtattttggtctggaccacacaaccttggacgattccagccaatgaagctgtttgctatatgcctgaatcaaagtatgctgttgtgaaatgttctaagtctggagacctctacgtactggcggcagataaagtagcatctgttgcttctactttggaaacaacatttgagactatttcaacactttcaggtgtagatttggaaaatggtacttgcagtcatccattaattcctgataaagcctctcctcttttacctgcaaatcatgtgaccatggcaaaaggaacgggattggttcacacagccccagctcatggtatggaagactacggtgtagcgtctcagcacaacctgcccatggattgtctagtggacgaagatggagttttcacagatgttgcaggtcctgaacttcaaaacaaggctgtccttgaagagggaactgatgtggttataaagatgcttcagactgcaaagaatttgttgaaagaggagaaattggtgcatagctatccgtatgactggaggaccaagaaacctgtggttattcgtgccagcaagcagtggtttataaacatcacggatattaagactgcagccaaggaattgttaaaaaaggtgaaatttattcctggatcagcactgaatggcatggttgaaatgatggacaggcggccatattggtgtatatcaaggcaaagagtttggggtgttccaattcctgtgtttcatcataagaccaaggatgaatacttgatcaacagccaaaccactgagcatattgttaaactagtggaacaacacggcagtgatatctggtggactcttccccctgaacaacttcttccaaaagaagtcttatctgaggttggtggccctgatgccttggaatatgtgccaggtcaggatattttggacatctggtttgatagcggaacttcatggtcttatgttcttccaggtcctgaccaaagagcagatttgtacttggaaggaaaagaccagctcgggggttggtttcagtcatccttattaacaagtgtggcagcaaggaagagagcaccttataagacagtgattgttcatggatttacccttggagaaaagggagaaaagatgtccaagtctcttgggaatgtcattcatcctgatgttgtcgttaatggaggacaagatcaaagcaaagagcctccgtatggtgctgatgtccttcgctggtgggtagctgattccaatgtcttcaccgaagttgcaattggcccatccgtgctcaatgctgccagagatgatattagcaagcttaggaatacacttcgctttcttttgggaaatgtggctgatttcaacccagaaacagattccatccctgtaaacgatatgtatgtcatagaccagtacatgctacacttactgcaggatttggcaaacaagattaccgaattatacaaacaatatgattttggaaaagttgttcggctgttacggacgttttataccagagagctctctaacttttatttcagtataatcaaagataggctctattgtgaaaaggaaaatgaccccaaacgacgctcttgtcagactgcattagttgaaattttggatgtaatagttcgttcttttgctcccattcttcctcacctggctgaagaggtgttccagcacataccttatattaaagagcccaagagtgttttccgtactgggtggattagtactagttctatctggaaaaagcccgggttggaagaagctgtggagagtgcgtgtgcaatgcgagactcatttcttggaagcatccctggcaaaaatgcagctgagtacaaggttatcactgtgatagaacctggactgctttttgagataatagagatgctgcagtctgaagagacttccagcacctctcagttgaatgaattaatgatggcttctgagtcaactttactggctcaggaaccacgagagatgactgcagatgtaatcgagcttaaagggaaattcctcatcaacttagaaggtggtgatattcgtgaagagtcttcctataaagtaattgtcatgccgactacgaaagaaaaatgcccccgttgttggaagtatacagcggagtcttcagatacactgtgtcctcgatgtgcagaagttgtcagtggaaaatagtattaacagctcactcgagcaagaaccctcctgacagtactggctagaagtttggatggattatttacaatataggaaagaaagccaagatttaggtaatgagtggatgagtaaatggtggaggatgggagtcaaaatcagaattatagaagaagtatttcctgtaactatagaaagaattatgtatatatacatgcagaaatatatatgtgtgtgtgtatctgtggatggatatatgtatatctcttcctatatatatccatagtggacttattcagaacatagatatgtattcagcttgtcttcaaatacggccaagcagaaaatgttttatattttataaatcatcttttgactctgtatttaaattctatgatactgaaaataaaggcattctggaaaa

SEQ ID NO: 15001 - DNA, 4771 bp, Homo sapiens
  source 1..4771: mol_type = unassigned DNA
cgccgcccgctagtccgccgcccggcgccatggcgggctgcgcggcgcgggctccgccgggctctgaggcgcgtctcagcctcgccaccttcctgctgggcgcctcggtgctcgcgctgccgctgctcacgcgcgccggcctgcagggccgcaccgggctggcgctctacgtggccgggctcaacgcgctgctgctgctgctctatcggccgcctcgctaccagatagccatccgagcttgtttcctggggtttgtgttcggctgcggcacgctgctaagttttagccagtcttcttggagtcactttggctggtacatgtgctccctgtcattgttccactattctgaatacttggtgacagcagtcaataatcccaaaagtctgtccttggattcctttctcctgaatcacagcctggagtatacagtagctgctctttcttcttggttagagttcacacttgaaaatatcttttggccagaactgaagcagattacctggctcagtgtcacagggctgctgatggtggtcttcggagaatgtctgaggaaggcggccatgtttacagctggctccaatttcaaccacgtggtacagaatgaaaaatcagatacacatactctggtgaccagtggagtgtacgcttggtttcggcatccttcttacgtcgggtggttttactggagtattggaactcaggtgatgctgtgtaaccccatctgcggcgtcagctatgccctgacagtgtggcgattcttccgcgatcgaacagaagaagaagaaatctcactaattcacttttttggagaggagtacctggagtataagaagagggtgcccacgggcctgcctttcataaagggggtcaaggtggacctgtgacgggcagtggccccggtgaccttggggcctccgaccctgtgcagcctgggacaaaactgtttccggttggccgctgccacatggattttcttaatcgttttatgtcattagtcactcttctggaatgtcactcaagaccaagcggtcagaaggcctgaggacccaaggccccactggagcagtctgtccttatgccgaatcaaggcggaacatgggtgaaagacgagtaaggggcaaatcacagcaatattccacagcgccctccagagttacctggggaggaccgaggccacacgccactgcccccgaggccagagtgtaagtaaaggataaccaggactcgctgggagagatggactctgtcctcagcaacactccacagcagaaaggggtagcaggtaccccttcttatcagcggtaaaaatgcatttacaacctttcatttaaccgaaaaacacagaccgctttaacctctttatttctgtcccccactgcatgaacatctatacaattttaaaaatacttcctcataggatgctttggcccttcatctatttaatcatagctacatacctattttttataagtagcagtacacattcaaaggggtattcctagctcaatgcttggtgttctagttcaacttttatcctgcagcaagtaagcctagataactctacacgatttggctgagtggctttgtgtgaccgtggccccaggccaaggggatcatggccctggctggctttcccgggggtctcagctcctgttgtcagtgataggcggctcaaaggagcatcagtttcttttgatccaagaagtgcttactgaatgcctgccctgtgcgtggccttaaacattgagaagtgctgctctccgtttatttgggatttgattctcattttaccatagcttatattctcaatttcaatgccagtctcagaactcttgttttctgtgttctgttctcaaaattacattgtccctcatgtcatttcaaactgttttccaaagggatttgagcatatacaactacaaatccaagcagattgactctcaaaaataatcttaaatactgcaaatagtcccaactaagattcagtcagtatgtttgttttgcaagtttgggagagtaagttggctttgagtcacacatcgaagctttaagaggtgagacgctggcttcattctggactagacaggaacttggcctcagcgtgagatcctgccatgcagtgttgcggtggcactgaagaagtgtgaatgtgaaggcggcgtcggcgcggggccagagcaccactctgctgccccaccacgcggcctgtgaggagccactaaacctttccgtgcctagacctccccatctgtggaatggggtcaataccacctacctcacaggggtgttgtgaggactgagaagaacaatgtcaaatgtttttaatactcagatgtgggagcgacatcaatgaaatctgtactgtatgaaagctacacaaaaatgggcagacatttggttaattgtgccagatacctaaaatgtatgttcagaaaagcattttatcaactcagaaatatgacttatttctagatttcatggcttaatgaattttttcattgttatatataccaaagaggcttacgggttcattgattggtttgaaaaccagacagacggccgggcgcggtggctcacgcctgtaatcccagcaatttgggaggccaaggcgggtggatcatgaggtcaggcgttcgagaccagcctggccaacatgataaaaccccgtctctactaaaaatacaaaaaaatagctgggcgtgctggcgggtgcctgtaatcccagctactcaggaggctgagacaggagaatcctttgaacccaggaggcggaggttgcagtgagttgagatcgggcctttgcacttcagtctgggcaacagggcgagactccatctcaaaaaacaacaacaacaacaaaaaaaaccggacggacttgcccatcggccctcacgacacgcgtgcagtgggactctagccaaggcggtggccgagccatcattacaatttttctggagtaaaggatccacggtgggacatcaactggcacttactctgtttaggaacttgagttgaatcatttctaaacttgtcctttagaccacgcctagggcagcaaattccacttcctagaactgcaaaccgggagaggatgtagttagattctggcatcctgccccggctctttgagggaaaagttctttcccctgctctaagtagggcgggcccagcctccattcccattgggagccatgaagttgtcttgttgataggtctagggcagctgttggcagctgctggccttgtggatggtaagctgactgtgttggcatttaatgccatcctccatctgccagaggcccaggaagcccaccttcacaccaggcccaccagctggaaggagcccaggaggcaggtcttagggtttcatggtgaaatgctgtctgacaccagggaaaacttgacgtactctgctttggagaggaattccaggggtagggatggtgggagaacattcccaccctgtttataatcccagagcagaagtcagcaattacttagggataaaagatgaactccattttttttattttcttaagacagtcttgctctgtggcccaggctggaggctggagtgcagtggcaccatttcggctcaccgcaacctctgcctcccgggttcaagcgattctcctgcctcagcctcctgagtagctgggattacaggcttgggccaccatgcccagctaatttttttgtatttttagtagagacggggtttcaccatgatggccaggctggtctcgaactcctgacctcaagtgatccacgcgcctcggcctcccaaagtgctgggattacaggcgtgagccaccacgcccagccaagatgaactccttaaggacaggatttggtaagtgattgacttctttttagttccatgatcttgagattatttttagctttataaatttagcagtggcagggcccgtggagaatcaggttaatgaggtaaaggctttctgggtatttgctgccaaggccacatcaccaattttctcgatttaaaaaactgtcaagagatttatttttccattgcaggttttaaagtggagattctgaagtggaaaataggtactgtcagaacaaagctacctggaaacagcatagagtgaagcctttcgtgagggcttgcaggccgctgctgagtggcagtttacagaagaggtcgcggggtgagcctcttagcaggacagaaaacaaggcagcagcgcacctgccaccccttcacgagctgctccttgagcctaaaaagtaggctttattcatcccttctgttcatttaccaacctgggggattgatacgaccggggaaaatgttcctaaaccaggaagctgcgttagccgatcaggctttgtaagatctcgccaacagctagctgcttaggagtacccccacgatacgcacagcacaccactgtcccttcactgcactttcttcctgccttaggtagttgggcttgcccaccctagtttgcttttgtagtggtttggcaaggttagaaggcctcggcctctctgtcatgctgggaagtgcctactctctgggccactgctgcagaggccgtggcacttgtcatgggtttggaagacccagccatctgcagcagaggcagcctatcccattgcaaggagaggaactgaacggagtaattattctactcttctttttacataaatgtttatttaaatattctaaattggattttctttcacagatactgattattctttccagttcttaaataaaactgcacttgatttcactcaa

SEQ ID NO: 15002 - DNA, 380 bp, Homo sapiens
  source 1..380: mol_type = unassigned DNA
cgccgcccgctagtccgccgcccggcgccatggcgggctgcgcggcgcgggctccgccgggctctgaggcgcgtctcagcctcgccaccttcctgctgggcgcctcggtgctcgcgctgccgctgctcacgcgcgccggcctgcagggccgcaccgggctggcgctctacgtggccgggctcaacgcgctgctgctgctgctctatcggccgcctcgctaccagatagccatccgagcttgtttcctggggtttgtgttcggctgcggcacgctgctaagttttagccagtcttcttggagtcactttggctggtcacatctagtgcatccccacagccactgtaggatttttccctacactatgatttcagtcccttga

SEQ ID NO: 15003 - DNA, 2455 bp, Homo sapiens
  source 1..2455: mol_type = unassigned DNA
tttctccgggctacagccggcgccgccgcccgctagtccgccgcccggcgccatggcgggctgcgcggcgcgggctccgccgggctctgaggcgcgtctcagcctcgccaccttcctgctgggcgcctcggtgctcgcgctgccgctgctcacgtggccgggctcaacgcgctgctgctgctgctctatcggccgcctcgctaccagatagccatccgagcttgtttcctggggtttgtgttcggctgcggcacgctgctaagttttagccagtcttcttggagtcactttggctggtacatgtgctccctgtcattgttccactattctgaatacttggtgacagcagtcaataatcccaaaagtctgtccttggattcctttctcctgaatcacagcctggagtatacagtagctgctctttcttcttggttagagttcacacttgaaaatatcttttggccagaactgaagcagattacctggctcagtgtcacagggctgctgatggtggtcttcggagaatgtctgaggaaggcggccatgtttacagctggctccaatttcaaccacgtggtacagaatgaaaaatcagatacacatactctggtgaccagtggagtgtacgcttggtttcggcatccttcttacgtcgggtggttttactggagtattggaactcaggtgatgctgtgtaaccccatctgcggcgtcagctatgccctgacagtgtggcgattcttccgcgatcgaacagaagaagaagaaatctcactaattcacttttttggagaggagtacctggagtataagaagagggtgcccacgggcctgcctttcataaagggggtcaaggtggacctgtgacgggcagtggccccggtgaccttggggcctccgaccctgtgcagcctgggacaaaactgtttccggttggccgctgccacatggattttcttaatcgttttatgtcattagtcactcttctggaatgtcactcaagaccaagcggtcagaaggcctgaggacccaaggccccactggagcagtctgtccttatgccgaatcaaggcggaacatgggtgaaagacgagtaaggggcaaatcacagcaatattccacagcgccctccagagttacctggggaggaccgaggccacacgccactgcccccgaggccagagtgtaagtaaaggataaccaggactcgctgggagagatggactctgtcctcagcaacactccacagcagaaaggggtagcaggtaccccttcttatcagcggtaaaaatgcatttacaacctttcatttaaccgaaaaacacagaccgctttaacctctttatttctgtcccccactgcatgaacatctatacaattttaaaaatacttcctcataggatgctttggcccttcatctatttaatcatagctacatacctattttttataagtagcagtacacattcaaaggggtattcctagctcaatgcttggtgttctagttcaacttttatcctgcagcaagtaagcctagataactctacacgatttggctgagtggctttgtgtgaccgtggccccaggccaaggggatcatggccctggctggctttcccgggggtctcagctcctgttgtcagtgataggcggctcaaaggagcatcagtttcttttgatccaagaagtgcttactgaatgcctgccctgtgcgtggccttaaacattgagaagtgctgctctccgtttatttgggatttgattctcattttaccatagcttatattctcaatttcaatgccagtctcagaactcttgttttctgtgttctgttctcaaaattacattgtccctcatgtcatttcaaactgttttccaaagggatttgagcatatacaactacaaatccaagcagattgactctcaaaaataatcttaaatactgcaaatagtcccaactaagattcagtcagtatgtttgttttgcaagtttgggagagtaagttggctttgagtcacacatcgaagctttaagaggtgagacgctggcttcattctggactagacaggaacttggcctcagcgtgagatcctgccatgcagtgttgcggtggcactgaagaagtgtgaatgtgaaggcggcgtcggcgcggggccagagcaccactctgctgccccaccacgcggcctgtgaggagccactaaacctttccgtgcctagacctccccatctgtggaatggggtcaataccacctacctcacaggggtgttgtgaggactgagaagaacaatgtcaaatgtttttaatactcagatgtgggagcgacatcaatgaaatctgtactgtatgaaagctacacaaaaatgggcagacatttggttaattgtgccagatacctaaaatgtatgttcagaaaagcattttatcaactcagaaatatgacttatttctag

SEQ ID NO: 15004 - DNA, 4665 bp, Homo sapiens
  source 1..4665: mol_type = unassigned DNA
tttccgcagttaggggctgctatttcaacgcagggagataaaaagaaaaaaacacttgctcttctaccccgctaaaaacactcatcctagggagcacgccagcatttgcagcgttcggggcagggccactcggcctgcggccgttgcactggctggaagctggcaggcgatcacggttgattggctcgggtgcggtccaagggcagcaacgccttcggcgggccgcctagggtgattggctgctgcagcccaccccctagccggtttggtgggcggcgaagcctggattggtggagctaagagctggctcagtttcagcgctggctcttcgtgcatggcagagatggcgactgcgactcggctgctggggtggcgtgtggcgagctggaggctgcggccgccgcttgccggcttcgtttcccagcgggcccactcgcttttgcccgtggacgatgcaatcaatgggctaagcgaggagcagaggcagcttcgtcagaccatggctaagttccttcaggagcacctggcccccaaggcccaggagatcgatcgcagcaatgagttcaagaacctgcgagaattttggaagcagctggggaacctgggcgtattgggcatcacagcccctgttcagtatggcggctccggcctgggctacctggagcatgtgctggtgatggaggagatatcccgagcttccggagcagtggggctcagttacggtgcccactccaacctctgcatcaaccagcttgtacgcaatgggaatgaggcccagaaagagaagtatctcccgaagctgatcagtggtgagtacatcggagccctggccatgagtgagcccaatgcaggctctgatgttgtctctatgaagctcaaagcggaaaagaaaggaaatcactacatcctgaatggcaacaagttctggatcactaatggccctgatgctgacgtcctgattgtctatgccaagacagatctggctgctgtgccagcttctcggggcatcacagccttcattgtggagaagggtatgcctggctttagcacctctaagaagctggacaagctggggatgaggggctctaacacctgtgagctaatctttgaagactgcaagattcctgctgccaacatcctgggccatgagaataagggtgtctacgtgctgatgagtgggctggacctggagcggctggtgctggccggggggcctcttgggctcatgcaagcggtcctggaccacaccattccctacctgcacgtgagggaagcctttggccagaagatcggccacttccagttgatgcaggggaagatggctgacatgtacacccgcctcatggcgtgtcggcagtatgtctacaatgtcgccaaggcctgcgatgagggccattgcactgctaaggactgtgcaggtgtgattctttactcagctgagtgtgccacacaggtagccctggacggcattcagtgttttggtggcaatggctacatcaatgactttcccatgggccgctttcttcgagatgccaagctgtatgagataggggctgggaccagcgaggtgaggcggctggtcatcggcagagccttcaatgcagactttcactagtcctgagacccttcgcccccttttcctgcacctagtggcctttcttgggaagtagagatgtggcggctttcccaccctgcccacagcaggccctcctgcccagctgctcttgtcagccctctggcctctggatgaggttgagttctccacaacagctcccaagcatcatgggcctcgcagccgggcctgtgccacggctagtgttgtgtgatttaaaatggactcagcaggaagcatattgtctggggattgttgggacaggttttggtgactctgtgcccttgctctctaacttctgagcccacctcccagggtaggcacctgggggcatgcaggtgcccacctcccagggtaggcacctgggggcatgcaggtacccacctctttctcttgggtgaggctctggcaaggagatctctctgctcaagcacagcagaatcatggcccctctccatgaattggaacttggtacaggttaagtatccctaatcctgaaatctgaaacacttgtggttccaagcattttggataaggcaaattcaactttcagtctcttttctgggggaaaaaaataataaacctagcctagccaggcgtggtggctcatgcttgtaatcccagcacttcaggaggctgagatgggtggatcacctgaggtcaggagttcaagaccagcctggccaacatgtggaaacctcgcctcaactaaaaatagaaaaaaattagttgggcatggtggtgggcacctgtaatcccagctacttcaggaggctgaggcaggagaattacttgaacccaggaggcggacgttgcagtgagccgagcttgtgccattgcactccagcctgggcgacaagagcaaaactcttcaaaaaacaaaacaaaacaaaaaaaccctggcccttgtttcttccagtttctagaggtatcagctcctagcagcttatgaacacatatgcttgcttggccaggcaaggtggtgtgtgcctgtaatcccagcactttgggaggccaaggcaggtggatcacttgcagtcaggagttcaagaccagcctgtccaacgtggtgaaaccccatctctactaaaaatacaaaaattagccaggggtggtggtgcacgtctgtaatcccagctactcaggaggctgaggcaggagaatcacttgaacccgggaggtggaggttgcaatgagccaatatgacaccgctgcagtccagcctgggccatagagtgagactctgtctcaaaaaaggaaagaaaaataggctgggcacagtgactcatgcctgtaatcccaacactttgggaggccgaggcaggtggatcacgaggtcaggagttcaagaccagcctggccaagatggtaaaacctcgtctctactaaaaatacaaaaattagccaggtgtggtggcaggctcctgtaatcccagctactcaggaggctgaggcagagaattgcttgaacccgggaggcagagtttgcagtgagccaagatcacaccactgcactccagcttggacgacagagcgagactctgtctcaaaaaataataggccaggcatggtggctcaacgtctgtaatcccagcactttgggaggccgaggcgggcagatcacaaggtcaggagttcgagaccagcctgacgaccaacatggtgaaacctcgtctctactaaaaatacaaaaattagccaggcctggtggcacgcgcctgtaatcccagttacacagaagactgaggcaggagaatcgcttgaacgcaggaggcagaggttgcaggagctgagatcgcgccattgcactccagcctgggcaacagagtgagactctgtctcaaaaaataataataaaataaatgaacacacatgctgctgagtccgcagggggggcagagcagaggacagcgtgcttttgtgtactgttggaagactggctcctcctgtacagcacctctgagcccttgtgcaccgccctgccacgggcaccatccagtcctggccgtgtgaccacccacagctgactgggcagcaggcacaggccctacccgagcaggccggagttggctcgcatgactccagctgaggctgcctgtgtacatttctccagataccctatggctaattttgttataactgcacagtggctgctgccattttgtattaaatatattgtgaaacaaacctatctggggagaagcaatctacttgccgctgcttcctgtctggatccagcttgtgtccttggagagtggctggcccaggtcctattcctgtcctccagcccgttctttcatgagggacaggaaggtaaaatcagcccttaggagagaggtctcagcctccctttcccagatctcccagtgagttttaaaggaagcagggagcccagagtgctaagttcttacagccagaaggaagcttatagatttctgaaaaccgcccctttgtttttaaaaagatcaacacaatttgactttctcaaggtcaaaacgaactagaatccagatctgctcatggcaaaaatgggggtgttctgagaattccagctttgggccgcactgtacagcagtctggatagagtgtgatctgagaagggaatgggtctgggttgttccaccccttccgagttccaaaaagagggaactggttttcttggttctcagcccagcagcacctatcctggctcttggtcctggcctgcagccaagtgctgttcctagcctgaggcttgagacaggtggggttggctcctcaccaaccccagttccgtcccatcctgagggcaagatcctgggctcataggcagtccctttcacttccttgtcttgctccctgctatgttggagatgaatgtgactaaaagggccatcttgctggcttaatgtgtggctggagagaccagcctggagacaatgtggcaaaatggggcgcttcatccagtctgtctaagccctgtcgacttggggaggtgatttctttcctggttctatatgtgaagcaaaataaatgttttaaaattaaaagcaaaaaaaacaaaatgaaccatg

SEQ ID NO: 15005 - DNA, 4251 bp, Homo sapiens
  source 1..4251: mol_type = unassigned DNA
agtttcagcgctggctcttcgtgcatggcagagatggcgactgcgactcggctgctggggtggcgtgtggcgagctggaggctgcggccgccgcttgccggcttcgtttcccagcgggcccactcgcttttgcccgtggacgatgcaatcaatgggctaagcgaggagcagaggcaggaattttggaagcagctggggaacctgggcgtattgggcatcacagcccctgttcagtatggcggctccggcctgggctacctggagcatgtgctggtgatggaggagatatcccgagcttccggagcagtggggctcagttacggtgcccactccaacctctgcatcaaccagcttgtacgcaatgggaatgaggcccagaaagagaagtatctcccgaagctgatcagtggtgagtacatcggagccctggccatgagtgagcccaatgcaggctctgatgttgtctctatgaagctcaaagcggaaaagaaaggaaatcactacatcctgaatggcaacaagttctggatcactaatggccctgatgctgacgtcctgattgtctatgccaagacagatctggctgctgtgccagcttctcggggcatcacagccttcattgtggagaagggtatgcctggctttagcacctctaagaagctggacaagctggggatgaggggctctaacacctgtgagctaatctttgaagactgcaagattcctgctgccaacatcctgggccatgagaataagggtgtctacgtgctgatgagtgggctggacctggagcggctggtgctggccggggggcctcttgggctcatgcaagcggtcctggaccacaccattccctacctgcacgtgagggaagcctttggccagaagatcggccacttccagttgatgcaggggaagatggctgacatgtacacccgcctcatggcgtgtcggcagtatgtctacaatgtcgccaaggcctgcgatgagggccattgcactgctaaggactgtgcaggtgtgattctttactcagctgagtgtgccacacaggtagccctggacggcattcagtgttttggtggcaatggctacatcaatgactttcccatgggccgctttcttcgagatgccaagctgtatgagataggggctgggaccagcgaggtgaggcggctggtcatcggcagagccttcaatgcagactttcactagtcctgagacccttcgcccccttttcctgcacctagtggcctttcttgggaagtagagatgtggcggctttcccaccctgcccacagcaggccctcctgcccagctgctcttgtcagccctctggcctctggatgaggttgagttctccacaacagctcccaagcatcatgggcctcgcagccgggcctgtgccacggctagtgttgtgtgatttaaaatggactcagcaggaagcatattgtctggggattgttgggacaggttttggtgactctgtgcccttgctctctaacttctgagcccacctcccagggtaggcacctgggggcatgcaggtgcccacctcccagggtaggcacctgggggcatgcaggtacccacctctttctcttgggtgaggctctggcaaggagatctctctgctcaagcacagcagaatcatggcccctctccatgaattggaacttggtacaggttaagtatccctaatcctgaaatctgaaacacttgtggttccaagcattttggataaggcaaattcaactttcagtctcttttctgggggaaaaaaataataaacctagcctagccaggcgtggtggctcatgcttgtaatcccagcacttcaggaggctgagatgggtggatcacctgaggtcaggagttcaagaccagcctggccaacatgtggaaacctcgcctcaactaaaaatagaaaaaaattagttgggcatggtggtgggcacctgtaatcccagctacttcaggaggctgaggcaggagaattacttgaacccaggaggcggacgttgcagtgagccgagcttgtgccattgcactccagcctgggcgacaagagcaaaactcttcaaaaaacaaaacaaaacaaaaaaaccctggcccttgtttcttccagtttctagaggtatcagctcctagcagcttatgaacacatatgcttgcttggccaggcaaggtggtgtgtgcctgtaatcccagcactttgggaggccaaggcaggtggatcacttgcagtcaggagttcaagaccagcctgtccaacgtggtgaaaccccatctctactaaaaatacaaaaattagccaggggtggtggtgcacgtctgtaatcccagctactcaggaggctgaggcaggagaatcacttgaacccgggaggtggaggttgcaatgagccaatatgacaccgctgcagtccagcctgggccatagagtgagactctgtctcaaaaaaggaaagaaaaataggctgggcacagtgactcatgcctgtaatcccaacactttgggaggccgaggcaggtggatcacgaggtcaggagttcaagaccagcctggccaagatggtaaaacctcgtctctactaaaaatacaaaaattagccaggtgtggtggcaggctcctgtaatcccagctactcaggaggctgaggcagagaattgcttgaacccgggaggcagagtttgcagtgagccaagatcacaccactgcactccagcttggacgacagagcgagactctgtctcaaaaaataataggccaggcatggtggctcaacgtctgtaatcccagcactttgggaggccgaggcgggcagatcacaaggtcaggagttcgagaccagcctgacgaccaacatggtgaaacctcgtctctactaaaaatacaaaaattagccaggcctggtggcacgcgcctgtaatcccagttacacagaagactgaggcaggagaatcgcttgaacgcaggaggcagaggttgcaggagctgagatcgcgccattgcactccagcctgggcaacagagtgagactctgtctcaaaaaataataataaaataaatgaacacacatgctgctgagtccgcagggggggcagagcagaggacagcgtgcttttgtgtactgttggaagactggctcctcctgtacagcacctctgagcccttgtgcaccgccctgccacgggcaccatccagtcctggccgtgtgaccacccacagctgactgggcagcaggcacaggccctacccgagcaggccggagttggctcgcatgactccagctgaggctgcctgtgtacatttctccagataccctatggctaattttgttataactgcacagtggctgctgccattttgtattaaatatattgtgaaacaaacctatctggggagaagcaatctacttgccgctgcttcctgtctggatccagcttgtgtccttggagagtggctggcccaggtcctattcctgtcctccagcccgttctttcatgagggacaggaaggtaaaatcagcccttaggagagaggtctcagcctccctttcccagatctcccagtgagttttaaaggaagcagggagcccagagtgctaagttcttacagccagaaggaagcttatagatttctgaaaaccgcccctttgtttttaaaaagatcaacacaatttgactttctcaaggtcaaaacgaactagaatccagatctgctcatggcaaaaatgggggtgttctgagaattccagctttgggccgcactgtacagcagtctggatagagtgtgatctgagaagggaatgggtctgggttgttccaccccttccgagttccaaaaagagggaactggttttcttggttctcagcccagcagcacctatcctggctcttggtcctggcctgcagccaagtgctgttcctagcctgaggcttgagacaggtggggttggctcctcaccaaccccagttccgtcccatcctgagggcaagatcctgggctcataggcagtccctttcacttccttgtcttgctccctgctatgttggagatgaatgtgactaaaagggccatcttgctggcttaatgtgtggctggagagaccagcctggagacaatgtggcaaaatggggcgcttcatccagtctgtctaagccctgtcgacttggggaggtgatttctttcctggttctatatgtgaagcaaaataaatgttttaaaattaaaagcaaaaaaaa

SEQ ID NO: 15006 - DNA, 1809 bp, Homo sapiens
  source 1..1809: mol_type = unassigned DNA
agtttcagcgctggctcttcgtgcatggcagagatggcgactgcgactcggctgctggggtggcgtgtggcgagctggaggctgcggccgccgcttgccggcttcgtttcccagcgggcccactcgcttttgcccgtggacgatgcaatcaatgggctaagcgaggagcagaggcagcttcgtcagaccatggctaagttccttcaggagcacctggcccccaaggcccaggagatcgatcgcagcaatgagttcaagaacctgcgagaattttggaagcagctggggaacctgggcgtattgggcatcacagcccctgttcagtatggcggctccggcctgggctacctggagcatgtgctggtgatggaggagatatcccgagcttccggagcagtggggctcagttacggtgcccactccaacctctgcatcaaccagcttgtacgcaatgggaatgaggcccagaaagagaagtatctcccgaagctgatcagtggtgagtacatcggagccctggccatgagtgagcccaatgcaggctctgatgttgtctctatgaagctcaaagcggaaaagaaaggaaatcactacatcctgaatggcaacaagttctggatcactaatggccctgatgctgacgtcctgattgtctatgccaagacagatctggctgctgtgccagcttctcggggcatcacagccttcattgtggagaagggtatgcctggctttagcacctctaagaagctggacaagctggggatgaggggctctaacacctgtgagctaatctttgaagactgcaagattcctgctgccaacatcctgggccatgagaataagggtgtctacgtgctgatgagtgggctggacctggagcggctggtgctggccggggggcctcttgggctcatgcaagcggtcctggaccacaccattccctacctgcacgtgagggaagcctttggccagaagatcggccacttccagttgatgcaggggaagatggctgacatgtacacccgcctcatggcgtgtcggcagtatgtctacaatgtcgccaaggcctgcgatgagggccattgcactgctaaggactgtgcaggtgtgattctttactcagctgagtgtgccacacaggtagccctggacggcattcagtgttttggtggcaatggctacatcaatgactttcccatgggccgctttcttcgagatgccaagctgtatgagataggggctgggaccagcgaggtgaggcggctggtcatcggcagagccttcaatgcagactttcactagtcctgagacccttcgcccccttttcctgcacctagtggcctttcttgggaagtagagatgtggcggctttcccaccctgcccacagcaggccctcctgcccagctgctcttgtcagccctctggcctctggatgaggttgagttctccacaacagctcccaagcatcatgggcctcgcagccgggcctgtgccacggctagtgttgtgtgatttaaaatggactcagcaggaagcatattgtctggggattgttgggacaggttttggtgactctgtgcccttgctctctaacttctgagcccacctcccagggtaggcacctgggggcatgcaggtgcccacctcccagggtaggcacctgggggcatgcaggtacccacctctttctcttgggtgaggctctggcaaggagatctctctgctcaagcacagcagaatcatggcccctctccatgaattggaacttggtacaggttaagtatccctaatcctgaaatctgaaa

SEQ ID NO: 15007 - DNA, 2971 bp, Homo sapiens
  source 1..2971: mol_type = unassigned DNA
gactgggttcgcggccgcgtgcagaggtgcaggcagagcagcctcggaaccgagacgatgcgtgcgctccgcgaccgagccgggctcctcctctgcgtgctgctgctggcggcgctgctggaggcggcgctagggctccccgtgaagaagccgcggctccgcggaccacggcctgggagcctcacgaggctcgcagaggtctcagcctccccagatcctaggcctctgaaggaagaggaggaggcaccactgctccccagaacccacctgcaggcagagccacaccaacatggatgctggactgtcactgagccagcagccatgaccccaggcaacgccacccctcccaggaccccagaggttactccgttgcggctggagctgcagaagctgccgggattggccaacacaaccttgagtacccctaaccctgatacccaggcttcagcctccccagatcctaggcctctgagggaagaggaggaggcacgactgctccccagaacccacctgcaggcagagctacaccaacatggatgttggactgtcactgagccagcagccctgaccccagggaatgccacgcctcccaggacccaggaggttactcccttgctgctggagctgcagaagctgccagaattggtccacgcaaccttgagtacccctaaccctgataaccaggtgaccatcaaggtggtggaggacccccaggccgaggtgtcgatagacctgttggctgagcccagcaatcccccgccccaggatacccttagctggctgcccgccctctggtccttcctctggggagactacaaaggagaggaaaaagacagggccccaggggagaagggggaggaaaaggaggaagacgaggactatccttcagaggatatcgagggtgaggatcaagaggacaaagaggaagatgaggaagagcaggcgctctggttcaatggaactacagacaactgggaccagggctggctggcccccggggattgggtcttcaaggattctgtcagctacgactatgagcctcagaaggagtggagtccctggtctccctgcagtgggaactgcagcactggcaagcagcagaggactcggccctgtggctatggctgcactgccaccgagacccgtacctgtgacctgccctcctgtcctggcactgaggacaaggacaccttgggcctccccagtgaggagtggaagctcctggcccgcaatgctacggacatgcatgatcaagatgtggacagctgtgagaagtggctgaactgcaagagcgacttcctaatcaagtatctgagccagatgctgcgggacctgcccagctgcccgtgtgcctacccactggaggccatggacagccctgtgagcctacaggacgagcaccagggccgcagcttccggtggagggatgccagtggccctcgcgagcgcctggacatctaccagcccacggcgcgcttctgcctgcgttccatgctgtctggggagagcagcacactggccgcccagcactgctgctatgacgaggacagccggctgctgacccgtggcaagggcgccggcatgcccaacctcatcagcaccgacttctcacctaagctgcacttcaagttcgacacgacgccctggatcctgtgcaagggggactggagccgcctccacgctgtgctccctcccaacaacggccgagcctgcaccgacaaccccctggaggaggagtacctagcacagttgcaggaggccaaggagtactagtgacggggttgctgaacagacactgcagggagagggcaggcggctgctgctgttgcacgggagaactttcctcacccgcccctgcccagacagggtgaggaaagggctcccccagtgaggttggtccgaggctgtgtgccctctgccagcgaccccgaagcagatatctcagtggggttagtgagaaggttgaagggtatgtagggcccagggtgggtgtccctgggagccctggaaatgtgcatatgtgcatgtgtctgccggggcctccctctgctgcctgctgggaccctggccactcatttttctcctccttgggagctgggctcttctgccctggctctgcacataagtgttagccagcagctccagaaaaatcccgattcccgggatctgccacgagtcactcctactccaccctgatggccagcagaggaagggccactcttctcatgggcacagccatcctttgccggggggggcatccagcctgggtggccacccctccttatctctgggtggtgcacatgcccttctttccccactccctgccacgagccactgcacaggaggctatctgtagccccaagctgcctttctgttggacaccaactttagtcttgggctgcaagccagcccagctgaggcgaagtggactccaggcagggaatgggttgcccaattctggtccctttcctttgctcagccccctctgttctgctgattgtagggatgtgcagggctgggagttggcactccccccgagtggggaggtgacagcttgtcacagtagccaggcttgggtgggttcagcactagctcgggacggtgtgtcacacgtctatagtaaaccagttctctgggaggggaaaaaagccctgatttattgcatttgggcagcttctgtggtgtaaattctcccagcagtgtcccatgtcatgctgccagcatcactgaatgcactgaactcagagttgggaagagatgcacataatcgctctcccggcacacctcatgcctcttccctgcctccccattcccctggctgcacttccttgccttctatggggttgaaatattgaagtctcaactgtctctgttcacaagagccaccaaaagttaggggacttcagtcctagcccccagatggccgccctgaagctctctgggctcctcagcaataaagcactttattttc

SEQ ID NO: 15008 - DNA, 3042 bp, Homo sapiens
  source 1..3042: mol_type = unassigned DNA
agagcagcctcggaaccgagacgatgcgtgcgctccgcgaccgagccgggctcctcctctgcgtgctgctgctggcggcgctgctggaggcggcgctagggctccccgtgaagaagccgcggctccgcggaccacggcctgggagcctcacgaggctcgcagagccccctttccaggtgcgcgctagctcggagaggagtcccgccggtgcgaggaatctggcgctttgcggagtggcgggccagggccgctgaggttcaaacggtcaggtctcagcctccccagatcctaggcctctgaaggaagaggaggaggcaccactgctccccagaacccacctgcaggcagagccacaccaacatggatgctggactgtcactgagccagcagccatgaccccaggcaacgccacccctcccaggaccccagaggttactccgttgcggctggagctgcagaagctgccgggattggccaacacaaccttgagtacccctaaccctgatacccaggcttcagcctccccagatcctaggcctctgagggaagaggaggaggcacgactgctccccagaacccacctgcaggcagagctacaccaacatggatgttggactgtcactgagccagcagccctgaccccagggaatgccacgcctcccaggacccaggaggttactcccttgctgctggagctgcagaagctgccagaattggtccacgcaaccttgagtacccctaaccctgataaccaggtgaccatcaaggtggtggaggacccccaggccgaggtgtcgatagacctgttggctgagcccagcaatcccccgccccaggatacccttagctggctgcccgccctctggtccttcctctggggagactacaaaggagaggaaaaagacagggccccaggggagaagggggaggaaaaggaggaagacgaggactatccttcagaggatatcgagggtgaggatcaagaggacaaagaggaagatgaggaagagcaggcgctctggttcaatggaactacagacaactgggaccagggctggctggcccccggggattgggtcttcaaggattctgtcagctacgactatgagcctcagaaggagtggagtccctggtctccctgcagtgggaactgcagcactggcaagcagcagaggactcggccctgtggctatggctgcactgccaccgagacccgtacctgtgacctgccctcctgtcctggcactgaggacaaggacaccttgggcctccccagtgaggagtggaagctcctggcccgcaatgctacggacatgcatgatcaagatgtggacagctgtgagaagtggctgaactgcaagagcgacttcctaatcaagtatctgagccagatgctgcgggacctgcccagctgcccgtgtgcctacccactggaggccatggacagccctgtgagcctacaggacgagcaccagggccgcagcttccggtggagggatgccagtggccctcgcgagcgcctggacatctaccagcccacggcgcgcttctgcctgcgttccatgctgtctggggagagcagcacactggccgcccagcactgctgctatgacgaggacagccggctgctgacccgtggcaagggcgccggcatgcccaacctcatcagcaccgacttctcacctaagctgcacttcaagttcgacacgacgccctggatcctgtgcaagggggactggagccgcctccacgctgtgctccctcccaacaacggccgagcctgcaccgacaaccccctggaggaggagtacctagcacagttgcaggaggccaaggagtactagtgacggggttgctgaacagacactgcagggagagggcaggcggctgctgctgttgcacgggagaactttcctcacccgcccctgcccagacagggtgaggaaagggctcccccagtgaggttggtccgaggctgtgtgccctctgccagcgaccccgaagcagatatctcagtggggttagtgagaaggttgaagggtatgtagggcccagggtgggtgtccctgggagccctggaaatgtgcatatgtgcatgtgtctgccggggcctccctctgctgcctgctgggaccctggccactcatttttctcctccttgggagctgggctcttctgccctggctctgcacataagtgttagccagcagctccagaaaaatcccgattcccgggatctgccacgagtcactcctactccaccctgatggccagcagaggaagggccactcttctcatgggcacagccatcctttgccggggggggcatccagcctgggtggccacccctccttatctctgggtggtgcacatgcccttctttccccactccctgccacgagccactgcacaggaggctatctgtagccccaagctgcctttctgttggacaccaactttagtcttgggctgcaagccagcccagctgaggcgaagtggactccaggcagggaatgggttgcccaattctggtccctttcctttgctcagccccctctgttctgctgattgtagggatgtgcagggctgggagttggcactccccccgagtggggaggtgacagcttgtcacagtagccaggcttgggtgggttcagcactagctcgggacggtgtgtcacacgtctatagtaaaccagttctctgggaggggaaaaaagccctgatttattgcatttgggcagcttctgtggtgtaaattctcccagcagtgtcccatgtcatgctgccagcatcactgaatgcactgaactcagagttgggaagagatgcacataatcgctctcccggcacacctcatgcctcttccctgcctccccattcccctggctgcacttccttgccttctatggggttgaaatattgaagtctcaactgtctctgttcacaagagccaccaaaagttaggggacttcagtcctagcccccagatggccgccctgaagctctctgggctcctcagcaataaagcactttattttc

SEQ ID NO: 15009 - DNA, 2745 bp, Homo sapiens
  source 1..2745: mol_type = unassigned DNA
gaggcgaggcggggcgcgactgggttcgcggccgcgtgcagaggtgcaggcagagcagcctcggaaccgagacgatgcgtgcgctccgcgaccgagccgggctcctcctctgcgtgctgctgctggcggcgctgctggaggcggcgctagggctccccgtgaagaagccgcggctccgcggaccacggcctgggagcctcacgaggctcgcagaggtctcagcctccccagatcctaggcctctgaaggaagaggaggaggcaccactgctccccagaacccacctgcaggcagagccacaccaacatggatgctggactgtcactgagccagcagccatgaccccaggcaacgccacccctcccaggaccccagaggttactccgttgcggctggagctgcagaagctgccgggattggccaacacaaccttgagtacccctaaccctgatacccaggtgaccatcaaggtggtggaggacccccaggccgaggtgtcgatagacctgttggctgagcccagcaatcccccgccccaggatacccttagctggctgcccgccctctggtccttcctctggggagactacaaaggagaggaaaaagacagggccccaggggagaagggggaggaaaaggaggaagacgaggactatccttcagaggatatcgagggtgaggatcaagaggacaaagaggaagatgaggaagagcaggcgctctggttcaatggaactacagacaactgggaccagggctggctggcccccggggattgggtcttcaaggattctgtcagctacgactatgagcctcagaaggagtggagtccctggtctccctgcagtgggaactgcagcactggcaagcagcagaggactcggccctgtggctatggctgcactgccaccgagacccgtacctgtgacctgccctcctgtcctggcactgaggacaaggacaccttgggcctccccagtgaggagtggaagctcctggcccgcaatgctacggacatgcatgatcaagatgtggacagctgtgagaagtggctgaactgcaagagcgacttcctaatcaagtatctgagccagatgctgcgggacctgcccagctgcccgtgtgcctacccactggaggccatggacagccctgtgagcctacaggacgagcaccagggccgcagcttccggtggagggatgccagtggccctcgcgagcgcctggacatctaccagcccacggcgcgcttctgcctgcgttccatgctgtctggggagagcagcacactggccgcccagcactgctgctatgacgaggacagccggctgctgacccgtggcaagggcgccggcatgcccaacctcatcagcaccgacttctcacctaagctgcacttcaagttcgacacgacgccctggatcctgtgcaagggggactggagccgcctccacgctgtgctccctcccaacaacggccgagcctgcaccgacaaccccctggaggaggagtacctagcacagttgcaggaggccaaggagtactagtgacggggttgctgaacagacactgcagggagagggcaggcggctgctgctgttgcacgggagaactttcctcacccgcccctgcccagacagggtgaggaaagggctcccccagtgaggttggtccgaggctgtgtgccctctgccagcgaccccgaagcagatatctcagtggggttagtgagaaggttgaagggtatgtagggcccagggtgggtgtccctgggagccctggaaatgtgcatatgtgcatgtgtctgccggggcctccctctgctgcctgctgggaccctggccactcatttttctcctccttgggagctgggctcttctgccctggctctgcacataagtgttagccagcagctccagaaaaatcccgattcccgggatctgccacgagtcactcctactccaccctgatggccagcagaggaagggccactcttctcatgggcacagccatcctttgccggggggggcatccagcctgggtggccacccctccttatctctgggtggtgcacatgcccttctttccccactccctgccacgagccactgcacaggaggctatctgtagccccaagctgcctttctgttggacaccaactttagtcttgggctgcaagccagcccagctgaggcgaagtggactccaggcagggaatgggttgcccaattctggtccctttcctttgctcagccccctctgttctgctgattgtagggatgtgcagggctgggagttggcactccccccgagtggggaggtgacagcttgtcacagtagccaggcttgggtgggttcagcactagctcgggacggtgtgtcacacgtctatagtaaaccagttctctgggaggggaaaaaagccctgatttattgcatttgggcagcttctgtggtgtaaattctcccagcagtgtcccatgtcatgctgccagcatcactgaatgcactgaactcagagttgggaagagatgcacataatcgctctcccggcacacctcatgcctcttccctgcctccccattcccctggctgcacttccttgccttctatggggttgaaatattgaagtctcaactgtctctgttcacaagagccaccaaaagttaggggacttcagtcctagcccccagatggccgccctgaagctctctgggctcctcagcaataaagcactttattttc

SEQ ID NO: 15010 - DNA, 2745 bp, Homo sapiens
  source 1..2745: mol_type = unassigned DNA
gaggcgaggcggggcgcgactgggttcgcggccgcgtgcagaggtgcaggcagagcagcctcggaaccgagacgatgcgtgcgctccgcgaccgagccgggctcctcctctgcgtgctgctgctggcggcgctgctggaggcggcgctagggctccccgtgaagaagccgcggctccgcggaccacggcctgggagcctcacgaggctcgcagaggcttcagcctccccagatcctaggcctctgagggaagaggaggaggcacgactgctccccagaacccacctgcaggcagagctacaccaacatggatgttggactgtcactgagccagcagccctgaccccagggaatgccacgcctcccaggacccaggaggttactcccttgctgctggagctgcagaagctgccagaattggtccacgcaaccttgagtacccctaaccctgataaccaggtgaccatcaaggtggtggaggacccccaggccgaggtgtcgatagacctgttggctgagcccagcaatcccccgccccaggatacccttagctggctgcccgccctctggtccttcctctggggagactacaaaggagaggaaaaagacagggccccaggggagaagggggaggaaaaggaggaagacgaggactatccttcagaggatatcgagggtgaggatcaagaggacaaagaggaagatgaggaagagcaggcgctctggttcaatggaactacagacaactgggaccagggctggctggcccccggggattgggtcttcaaggattctgtcagctacgactatgagcctcagaaggagtggagtccctggtctccctgcagtgggaactgcagcactggcaagcagcagaggactcggccctgtggctatggctgcactgccaccgagacccgtacctgtgacctgccctcctgtcctggcactgaggacaaggacaccttgggcctccccagtgaggagtggaagctcctggcccgcaatgctacggacatgcatgatcaagatgtggacagctgtgagaagtggctgaactgcaagagcgacttcctaatcaagtatctgagccagatgctgcgggacctgcccagctgcccgtgtgcctacccactggaggccatggacagccctgtgagcctacaggacgagcaccagggccgcagcttccggtggagggatgccagtggccctcgcgagcgcctggacatctaccagcccacggcgcgcttctgcctgcgttccatgctgtctggggagagcagcacactggccgcccagcactgctgctatgacgaggacagccggctgctgacccgtggcaagggcgccggcatgcccaacctcatcagcaccgacttctcacctaagctgcacttcaagttcgacacgacgccctggatcctgtgcaagggggactggagccgcctccacgctgtgctccctcccaacaacggccgagcctgcaccgacaaccccctggaggaggagtacctagcacagttgcaggaggccaaggagtactagtgacggggttgctgaacagacactgcagggagagggcaggcggctgctgctgttgcacgggagaactttcctcacccgcccctgcccagacagggtgaggaaagggctcccccagtgaggttggtccgaggctgtgtgccctctgccagcgaccccgaagcagatatctcagtggggttagtgagaaggttgaagggtatgtagggcccagggtgggtgtccctgggagccctggaaatgtgcatatgtgcatgtgtctgccggggcctccctctgctgcctgctgggaccctggccactcatttttctcctccttgggagctgggctcttctgccctggctctgcacataagtgttagccagcagctccagaaaaatcccgattcccgggatctgccacgagtcactcctactccaccctgatggccagcagaggaagggccactcttctcatgggcacagccatcctttgccggggggggcatccagcctgggtggccacccctccttatctctgggtggtgcacatgcccttctttccccactccctgccacgagccactgcacaggaggctatctgtagccccaagctgcctttctgttggacaccaactttagtcttgggctgcaagccagcccagctgaggcgaagtggactccaggcagggaatgggttgcccaattctggtccctttcctttgctcagccccctctgttctgctgattgtagggatgtgcagggctgggagttggcactccccccgagtggggaggtgacagcttgtcacagtagccaggcttgggtgggttcagcactagctcgggacggtgtgtcacacgtctatagtaaaccagttctctgggaggggaaaaaagccctgatttattgcatttgggcagcttctgtggtgtaaattctcccagcagtgtcccatgtcatgctgccagcatcactgaatgcactgaactcagagttgggaagagatgcacataatcgctctcccggcacacctcatgcctcttccctgcctccccattcccctggctgcacttccttgccttctatggggttgaaatattgaagtctcaactgtctctgttcacaagagccaccaaaagttaggggacttcagtcctagcccccagatggccgccctgaagctctctgggctcctcagcaataaagcactttattttc

SEQ ID NO: 15011 - DNA, 1739 bp, Homo sapiens
  source 1..1739: mol_type = unassigned DNA
agagcagcctcggaaccgagacgatgcgtgcgctccgcgaccgagccgggctcctcctctgcgtgctgctgctggcggcgctgctggaggcggcgctagggctccccgtgaagaagccgcggctccgcggaccacggcctgggagcctcacgaggctcgcagaggtctcagcctccccagatcctaggcctctgaaggaagaggaggaggcaccactgctccccagaacccacctgcaggcagagccacaccaacatggatgctggactgtcactgagccagcagccatgaccccaggcaacgccacccctcccaggaccccagaggttactccgttgcggctggagctgcagaagctgccgggattggccaacacaaccttgagtacccctaaccctgatacccaggcttcagcctccccagatcctaggcctctgagggaagaggaggaggcacgactgctccccagaacccacctgcaggcagagctacaccaacatggatgttggactgtcactgagccagcagccctgaccccagggaatgccacgcctcccaggacccaggaggttactcccttgctgctggagctgcagaagctgccagaattggtccacgcaaccttgagtacccctaaccctgataaccagactatgagcctcagaaggagtggagtccctggtctccctgcagtgggaactgcagcactggcaagcagcagaggactcggccctgtggctatggctgcactgccaccgagacccgtacctgtgacctgccctcctgtcctggcactgaggacaaggacaccttgggcctccccagtgaggagtggaagctcctggcccgcaatgctacggacatgcatgatcaagatgtggacagctgtgagaagtggctgaactgcaagagcgacttcctaatcaagtatctgagccagatgctgcgggacctgcccagctgcccgtgtgcctacccactggaggccatggacagccctgtgagcctacaggacgagcaccagggccgcagcttccggtggagggatgccagtggccctcgcgagcgcctggacatctaccagcccacggcgcgcttctgcctgcgttccatgctgtctggggagagcagcacactggccgcccagcactgctgctatgacgaggacagccggctgctgacccgtggcaagggcgccggcatgcccaacctcatcagcaccgacttctcacctaagctgcacttcaagttcgacacgacgccctggatcctgtgcaagggggactggagccgcctccacgctgtgctccctcccaacaacggccgagcctgcaccgacaaccccctggaggaggagtacctagcacagttgcaggaggccaaggagtactagtgacggggttgctgaacagacactgcagggagagggcaggcggctgctgctgttgcacgggagaactttcctcacccgcccctgcccagacagggtgaggaaagggctcccccagtgaggttggtccgaggctgtgtgccctctgccagcgaccccgaagcagatatctcagtggggttagtgagaaggttgaagggtatgtagggcccagggtgggtgtccctgggagccctggaaatgtgcatatgtgcatgtgtctgccggggcctccctctgctgcctgctgggaccctggccactcatttttctcctccttgggagctgggctcttctgccctggctctgc

SEQ ID NO: 15012 - DNA, 1704 bp, Homo sapiens
  source 1..1704: mol_type = unassigned DNA
cggcgtcttctgggcctgtggagtttcttggacaggggccgcggggctccaggacggcgcccttagcgacaccatggcccgaaatgcagaaaaggccatgacggccttagcaagatttcgccaggctcagctggaagagggaaaagtgaaggaacgaagaccctttctggcctcagaatgtactgaactgcctaaagctgagaagtggagacgacagatcattggagagatctctaaaaaagtggctcagattcagaatgctggtttaggtgaatttcgaattcgtgacctgaatgatgaaattaacaagctgctaagggagaaaggacactgggaggtccggataaaggagctgggaggtcctgattatggaaaagttggccctaaaatgctggatcatgaaggaaaagaagtcccaggaaaccgaggttacaagtactttggagcagcaaaagatttgcctggtgttagagagctgtttgaaaaagaacgccaggtgcggtggctcatgcctgtaatcccagcactttgggaggctgaggcgggcggatcacaagctcttcctcctcccagaaagacacgtgctgagctcatgaaggcaatcgattttgagtactatggttacctagatgaagatgatggtgttattgtgcctttggaacaggaatatgaaaagaaactcagagccgagttagtggaaaagtggaaagcagagagagaggctcggctggcaagaggagaaaaggaagaggaggaggaagaggaggaagagatcaacatctatgcagtcaccgaggaggagtcggacgaggaaggcagccaggagaaaggaggggacgacagccagcagaagttcattgctcacgtccctgttccctcgcagcaagagattgaggaggcactggtgcgaaggaagaaaatggaactcctccagaagtatgcaagcgagaccctgcaggcccaaagtgaagaagccagaaggctcctggggtattaggacccagctggggctctccttggagttcttccatcccccagtggtacctcaggacccagggctgcagacacaggctggtgctgcaagggctcctgccccattctcagccttccttccctctccttgtctcatgttgaccggagggtaggggtctgtccctggtcttcctggtaggttttgtacacatattttgctactgtgtggatccatttatttttattgtggagtgtatacaacaggttgcgaactggctgcctgtgtcttattttgacttgcactgccattttgaggggagaagaatcaattagtggcaaacatttaaaaatgcaattttttgcagaccaaagtataattttaaaaaatgcaaattttctaaaagacacatctcttgaaaaatgagatgatgtggccaggcgcagtggctcacgcctgtaaccccagcactttgggaggccgaggcgggcgggtcacgaggtcaagagatggagaccatcctggccaacatggtgaaaccccatgtctactaaaaatacaaaaaaattagctgggcgtactggcatgcacctgtagtcccagctgcttgggaggctgaggcaggagaatcacttgaacccgagaggtggaggttgaagtgagccaagatcgtgccattgcactccagcctggcgacagagtgagactctgtcccaaaaaaaaaaaaaaaaaaa

SEQ ID NO: 15013 - DNA, 3842 bp, Homo sapiens
  source 1..3842: mol_type = unassigned DNA
tcctcagttcctgcgagcgtcggcttcgtccgggcacttccagtactctcattcacttcctgtccctttcttttacgtttccgacaaaacagtgtctgtgggcagttagaatcttcagtttctgtgagcgtccgcttcgtctgggcacttccggtactcccattcagttccggtccctgtcttttacgtttccggcaaaacatcagtgtctgtgggtagttggaatcttcagttcctgtgagcgtcggcgtcttctgggcctgtggagtttcttggacaggggccgcggggctccaggacggcgcccttagcgacaccatggcccgaaatgcagaaaaggccatgacggccttagcaagatttcgccaggctcagctggaagagggaaaagtgaaggaacgaagaccctttctggcctcagaatgtactgaactgcctaaagctgagaagtggagacgacagatcattggagagatctctaaaaaagtggctcagattcagaatgctggtttaggtgaatttcgaattcgtgacctgaatgatgaaattaacaagctgctaagggagaaaggacactgggaggtccggataaaggagctgggaggtcctgattatggaaaagttggccctaaaatgctggatcatgaaggaaaagaagtcccaggaaaccgaggttacaagtactttggagcagcaaaagatttgcctggtgttagagagctgtttgaaaaagaacctcttcctcctcccagaaagacacgtgctgagctcatgaaggcaatcgattttgagtactatggttacctagatgaagatgatggtgttattgtgcctttggaacaggaatatgaaaagaaactcagagccgagttagtggaaaagtggaaagcagagagagaggctcggctggcaagaggagaaaaggaagaggaggaggaagaggaggaagagatcaacatctatgcagtcaccgaggaggagtcggacgaggaaggcagccaggagaaaggaggggacgacagccagcagaagttcattgctcacgtccctgttccctcgcagcaagagattgaggaggcactggtgcgaaggaagaaaatggaactcctccagaagtatgcaagcgagaccctgcaggcccaaagtgaagaagccagaaggctcctggggtattaggacccagctggggctctccttggagttcttccatcccccagtggtacctcaggacccagggctgcagacacaggctggtgctgcaagggctcctgccccattctcagccttccttccctctccttgtctcatgttgaccggagggtaggggtctgtccctggtcttcctggtaggttttgtacacatattttgctactgtgtggatccatttatttttattgtggagtgtatacaacaggttgcgaactggctgcctgtgtcttattttgacttgcactgccattttgaggggagaagaatcaattagtggcaaacatttaaaaatgcaattttttgcagaccaaagtataattttaaaaaatgcaaattttctaaaagacacatctcttgaaaaatgagatgatgtggccaggcgcagtggctcacgcctgtaaccccagcactttgggaggccgaggcgggcgggtcacgaggtcaagagatggagaccatcctggccaacatggtgaaaccccatgtctactaaaaatacaaaaaaattagctgggcgtactggcatgcacctgtagtcccagctgcttgggaggctgaggcaggagaatcacttgaacccgagaggtggaggttgaagtgagccaagatcgtgccattgcactccagcctggcgacagagtgagactctgtcccaaaaaaaaaaaaaaaaaaagatgcacgcaacccacaagtcaatgaccaggtccctctgtgttggttgctgctctgggctctccgttagcccccctccacctgctccactcgctcctgcctgggtggcaggaatttgagtttgctattcctgttttataacctgttctgcagaaacctatttttattaaagatttttataagaaagggaaacctccatgtcttcagcttgttccctgggccaacggctctgaggtgacagtggcattaggatgtgaccagtcactaaggggcactgccttcctgcaggggagtccctgaagccccagccccaagtgtggcaaagacaggaccagatcccaggagtctaggtgggagtgagccgacccaccatggcgtccgtggccacagctgtagacagggctccttgcagtgggctgcaccgtggcctgctgaaagcacacagtggacacgagctgagtccagagcttcctctgaactggggcttagctctccagtggggaaccatggtcagcggctgtagcccctgggcaagatggtgcctggcttcctgccctctgcagggtcatgggagtgtctgggaactcagggtcagggccagatggctgttcctggggcctggggctccagctcaggctgtttgggaataggaggaactcttggcttggagaagcccatcacacagcgggaggcctgggatggttggtctgcggggagcagctcagactgggggtggcagagccgtgtgtggctgtgtgtggccaagtcgggagagtggccagtgctgggccctctctaaggagcccgagggccacaaggactgtggaaaaggtctgagtgagggagtcgggagctagtggctaagggacttgcttgaggacgctccgtgcggccacaaggagaggcccaggcaggaccaggtcaggaggaggctggggcagaggccctggcaggaggtgggtgggcttggtggggatgggagtagccagggtgtaggtgaggatggggaaggggcccccctgcctcctggcttccctgagggctgggctggccaatcccagccctcagtcaagcccggaggcaaatgtgtgcagggaggagaggtgtccaggttgaagctttgggagcccttggaggcagcaaggcagactcgcctctgggacccagcacccagcttgggcctgcaggtggggactcaggagtgaatatcgtgggggctttgagcaagaccctctgggcccagcctcaccttccatactttgaagtcaaggagtggacctgtgctgtctcagtttgctctggggtctgggcagtcctgtggtttgggcagaggcctcagagggccctagggacagactgacccaggtctgagcctcttgggagcgtgcggatggccggcctcagacaggcctggttgtgggtttgtcttccaaggggcacacgcgcactctggtgcttcctggcattcagaagagaatggggaatccagacatcaggccttccttctccctgggaaggatggcaggtgcttggagccaggcctgtcttgagagccagggctctgggtcttcctcctccagtgccctgttccacgccttcagtgcacaaagcactcccctcctgggatctcttcagggatccccgggatgcaaactggccagggattagaattccacatttgagcaaacagactgagagtggagaagcacccagctggacatcctctaggtgttcctggcagaggcccttgctacttgtctgtgcccaaaggccctagagggtcctagatgtgggacaaggtctcagcagggctccagtcccaggcctggaaacagctgggggtgggggaagctggctgggtgggtgtggttatcttttcccagcttgtggctccgaggtgacagaaccaatctcaggaggctttgtttggttaataaaatctactgaatggtttatttta

SEQ ID NO: 15014 - DNA, 3730 bp, Homo sapiens
  source 1..3730: mol_type = unassigned DNA
gtctagggactgaggagtcgccgccgccccgagtcccggtaccatgcatttcacggtggccttgtggagacaacgccttaacccaaggaagtgactcaaactgtgagaacttcaggttttccaacctattggtggtatgtctgacagtggatcacaacttggttcaatgggtagcctcaccatgaaatcacagcttcagatcactgtcatctcagcaaaacttaaggaaaataagaagaattggtttggaccaagtccttacgtagaggtcacagtagatggacagtcaaagaagacagaaaaatgcaacaacacaaacagtcccaagtggaagcaaccccttacagttatcgttacccctgtgagtaaattacattttcgtgtgtggagtcaccagacactgaaatctgatgttttgttgggaactgctgcattagatatttatgaaacattaaagtcaaacaatatgaaacttgaagaagtagttgtgactttgcagcttggaggtgacaaagagccaacagagacaataggagacttgtcaatttgtcttgatgggctacagttagagtctgaagttgttaccaatggtgaaactacatgttcagaaaatggggtttcgctctgtttgcccaggctggagtgcaatagtgcgatctcggctcactgcaacctctgcctcccgggtttaagtgattctcctatctcagcctcccgagtagctgggtttacaggtgcttctcagaatgatgatggctccagatccaaggatgaaacaagagtgagcacaaatggatcagatgaccctgaagatgcaggagctggtgaaaataggagagtcagtgggaataattctccatcactctcaaatggtggttttaaaccttctagacctccaagaccttcacgaccaccaccacccaccccacgtagaccagcatctgtcaatggttcaccatctgccacttctgaaagtgatgggtctagtacaggctctctgccgccgacaaatacaaatacaaatacatctgaaggagcaacatctggattaataattcctcttactatatctggaggctcaggccctaggccattaaatcctgtaactcaagctcccttgccacctggttgggagcagagagtggaccagcacgggcgagtttactatgtagatcatgttgagaaaagaacaacatgggatagaccagaacctctacctcctggctgggaacggcgggttgacaacatgggacgtatttattatgttgaccatttcacaagaacaacaacgtggcagaggccaacactggaatccgtccggaactatgaacaatggcagctacagcgtagtcagcttcaaggagcaatgcagcagtttaaccagagattcatttatgggaatcaagatttatttgctacatcacaaagtaaagaatttgatcctcttggtccattgccacctggatgggagaagagaacagacagcaatggcagagtatatttcgtcaaccacaacacacgaattacacaatgggaagaccccagaagtcaaggtcaattaaatgaaaagcccttacctgaaggttgggaaatgagattcacagtggatggaattccatattttgtggaccacaatagaagaactaccacctatatagatccccgcacaggaaaatctgccctagacaatggacctcagatagcctatgttcgggacttcaaagcaaaggttcagtatttccggttctggtgtcagcaactggccatgccacagcacataaagattacagtgacaagaaaaacattgtttgaggattcctttcaacagataatgagcttcagtccccaagatctgcgaagacgtttgtgggtgatttttccaggagaagaaggtttagattatggaggtgtagcaagagaatggttctttcttttgtcacatgaagtgttgaacccaatgtattgcctgtttgaatatgcagggaaggataactactgcttgcagataaaccccgcttcttacatcaatccagatcacctgaaatattttcgttttattggcagatttattgccatggctctgttccatgggaaattcatagacacgggtttttctttaccattctataagcgtatcttgaacaaaccagttggactcaaggatttagaatctattgatccagaattttacaattctctcatctgggttaaggaaaacaatattgaggaatgtgatttggaaatgtacttctccgttgacaaagaaattctaggtgaaattaagagtcatgatctgaaacctaatggtggcaatattcttgtaacagaagaaaataaagaggaatacatcagaatggtagctgagtggaggttgtctcgaggtgttgaagaacagacacaagctttctttgaaggctttaatgaaattcttccccagcaatatttgcaatactttgatgcaaaggaattagaggtccttttatgtggaatgcaagagattgatttgaatgactggcaaagacatgccatctaccgtcattatgcaaggaccagcaaacaaatcatgtggttttggcagtttgttaaagaaattgataatgagaagagaatgagacttctgcagtttgttactggaacctgccgattgccagtaggaggatttgctgatctcatggggagcaatggaccacagaaattctgcattgaaaaagttgggaaagaaaattggctacccagaagtcatacctgttttaatcgcctggacctgccaccatacaagagctatgagcaactgaaggaaaagctgttgtttgccatagaagaaacagaaggatttggacaagagtaacttctgagaacttgcaccatgaatgggcaagaacttatttgcaatgtttgtccttctctgcctgttgcacatcttgtaaaattggacaatggctctttagagagttatctgagtgtaagtaaattaatgttctcatttagatttatctcccagtgatttctactcagcgtttccagaaatcaggtctgcaaatgactagtcagaaccttgcttaacatgagattttaacacaacaatgaaatttgccttgtcttattccactagtttattcctttaacaacaatattttatgtgtgtcaaaagtctcacttgggagtagtgtttttttcttttagacattctgcagacatgcagggaagtcctttggtaactgcaatatacaagattttcctattaagcctcttggtaagaggcatttgttaaaagtgcaagcttactcctgcttctggggatgtgagcaaaattcgggcttgtgttctccctctcattttagtctgacttgactattgtttttcctttctggcgcatgaatccatacatcattcctggaagtgaggcaagactcttgcatctctacaaagtagttttgtcaatttgaattcagggaaaagttggtcacagcctgcaaatgacttcatttggaagtctgattgtttcagttgcctgacaaatactacactttacaaacaatgttaacactgtgattccttcattgttttaagaagttaacctagggccgggcatggtggctcatacctgtaatcctagcactctgggaggccgaggcaggaggatccctttagcccaggagttaaagaccagcctgggcaacatagggagaccctgtcttttttttgggcagcgtggtgggggataaataaa

SEQ ID NO: 15015 - DNA, 6401 bp, Homo sapiens
  source 1..6401: mol_type = unassigned DNA
gcgctcaggcgcctgcgctttagctgctaactcgctctagtagctgtggtcggggctcgggaccggctgccatcttagtctagggactgaggagtcgccgccgccccgagtcccggtaccatgcatttcacggtggccttgtggagacaacgccttaacccaaggaagtgactcaaactgtgagaacttcaggttttccaacctattggtggtatgtctgacagtggatcacaacttggttcaatgggtagcctcaccatgaaatcacagcttcagatcactgtcatctcagcaaaacttaaggaaaataagaagaattggtttggaccaagtccttacgtagaggtcacagtagatggacagtcaaagaagacagaaaaatgcaacaacacaaacagtcccaagtggaagcaaccccttacagttatcgttacccctgtgagtaaattacattttcgtgtgtggagtcaccagacactgaaatctgatgttttgttgggaactgctgcattagatatttatgaaacattaaagtcaaacaatatgaaacttgaagaagtagttgtgactttgcagcttggaggtgacaaagagccaacagagacaataggagacttgtcaatttgtcttgatgggctacagttagagtctgaagttgttaccaatggtgaaactacatgttcagaaagtgcttctcagaatgatgatggctccagatccaaggatgaaacaagagtgagcacaaatggatcagatgaccctgaagatgcaggagctggtgaaaataggagagtcagtgggaataattctccatcactctcaaatggtggttttaaaccttctagacctccaagaccttcacgaccaccaccacccaccccacgtagaccagcatctgtcaatggttcaccatctgccacttctgaaagtgatgggtctagtacaggctctctgccgccgacaaatacaaatacaaatacatctgaaggagcaacatctggattaataattcctcttactatatctggaggctcaggccctaggccattaaatcctgtaactcaagctcccttgccacctggttgggagcagagagtggaccagcacgggcgagtttactatgtagatcatgttgagaaaagaacaacatgggatagaccagaacctctacctcctggctgggaacggcgggttgacaacatgggacgtatttattatgttgaccatttcacaagaacaacaacgtggcagaggccaacactggaatccgtccggaactatgaacaatggcagctacagcgtagtcagcttcaaggagcaatgcagcagtttaaccagagattcatttatgggaatcaagatttatttgctacatcacaaagtaaagaatttgatcctcttggtccattgccacctggatgggagaagagaacagacagcaatggcagagtatatttcgtcaaccacaacacacgaattacacaatgggaagaccccagaagtcaaggtcaattaaatgaaaagcccttacctgaaggttgggaaatgagattcacagtggatggaattccatattttgtggaccacaatagaagaactaccacctatatagatccccgcacaggaaaatctgccctagacaatggacctcagatagcctatgttcgggacttcaaagcaaaggttcagtatttccggttctggtgtcagcaactggccatgccacagcacataaagattacagtgacaagaaaaacattgtttgaggattcctttcaacagataatgagcttcagtccccaagatctgcgaagacgtttgtgggtgatttttccaggagaagaaggtttagattatggaggtgtagcaagagaatggttctttcttttgtcacatgaagtgttgaacccaatgtattgcctgtttgaatatgcagggaaggataactactgcttgcagataaaccccgcttcttacatcaatccagatcacctgaaatattttcgttttattggcagatttattgccatggctctgttccatgggaaattcatagacacgggtttttctttaccattctataagcgtatcttgaacaaaccagttggactcaaggatttagaatctattgatccagaattttacaattctctcatctgggttaaggaaaacaatattgaggaatgtgatttggaaatgtacttctccgttgacaaagaaattctaggtgaaattaagagtcatgatctgaaacctaatggtggcaatattcttgtaacagaagaaaataaagaggaatacatcagaatggtagctgagtggaggttgtctcgaggtgttgaagaacagacacaagctttctttgaaggctttaatgaaattcttccccagcaatatttgcaatactttgatgcaaaggaattagaggtccttttatgtggaatgcaagagattgatttgaatgactggcaaagacatgccatctaccgtcattatgcaaggaccagcaaacaaatcatgtggttttggcagtttgttaaagaaattgataatgagaagagaatgagacttctgcagtttgttactggaacctgccgattgccagtaggaggatttgctgatctcatggggagcaatggaccacagaaattctgcattgaaaaagttgggaaagaaaattggctacccagaagtcatacctgttttaatcgcctggacctgccaccatacaagagctatgagcaactgaaggaaaagctgttgtttgccatagaagaaacagaaggatttggacaagagtaacttctgagaacttgcaccatgaatgggcaagaacttatttgcaatgtttgtccttctctgcctgttgcacatcttgtaaaattggacaatggctctttagagagttatctgagtgtaagtaaattaatgttctcatttagatttatctcccagtgatttctactcagcgtttccagaaatcaggtctgcaaatgactagtcagaaccttgcttaacatgagattttaacacaacaatgaaatttgccttgtcttattccactagtttattcctttaacaacaatattttatgtgtgtcaaaagtctcacttgggagtagtgtttttttcttttagacattctgcagacatgcagggaagtcctttggtaactgcaatatacaagattttcctattaagcctcttggtaagaggcatttgttaaaagtgcaagcttactcctgcttctggggatgtgagcaaaattcgggcttgtgttctccctctcattttagtctgacttgactattgtttttcctttctggcgcatgaatccatacatcattcctggaagtgaggcaagactcttgcatctctacaaagtagttttgtcaatttgaattcagggaaaagttggtcacagcctgcaaatgacttcatttggaagtctgattgtttcagttgcctgacaaatactacactttacaaacaatgttaacactgtgattccttcattgttttaagaagttaacctagggccgggcatggtggctcatacctgtaatcctagcactctgggaggccgaggcaggaggatccctttagcccaggagttaaagaccagcctgggcaacatagggagaccctgtcttttttttgggcagcgtggtgggggataaataaataaaaggaaaaaaaacttagcctagaattagaattaatttaattgaattcatctaaagatgtctctggtgatttttatatgttccgctatataattgatgctttatagttttatcataatccaacaacttcagttatatttaattattgttaaggagtttaagactagaaagactagagtgctttctagtccaaatagaggtcagtgaaacagcttttgacatcagattttcatttgagagggagagctgtggtactggctaaaaagaaaggaagataacatccagtaaccacaggaatatattctctgtgaattaaaagtcttcaaagttatcatttctctgacatatgttggagtagtcatttccattctttacattgtcatgaactggattgataaccctcatctgcaatattttcacccctaaaatttttaacagggtttcctttttttctcacgactatttaagtttagattgctccattattaactgattaatgcactttgaagttctctggaattaattattttaacttggcctagcttcgactgtcaaggtggctgttataaatttgacttcattggcagtggatgaagcctaagccagctgagtctctatcatagctgaaccctgaggacagcctcatagctcatgtatcagggacttttgccacatttcagaggcatagcatgaacaagtaatattaagccaagaataagcagcagaaccctgttccatatggaaaaaagaaaaacaattttttgtccctaatgttcttccttttacatcctggaacaacaataaaaacatttttttaaacttgtctactgtaagatactgccatcataaagcagagacttacatgagtgaaagggttgcctcatcaagcagctcagtgtaaatggggaggctaggctctccccagccctatggtttttttatttcatgtaccccaggaaatactgtgtggtttctaaaagccctggttgttaaaagtagggactctgcctttttgttggtagggagaaaaaacgctattgctttgtcttacagagcgaatgtctgccaactacccgttcattatataagtctgaacttggtaatatatggctaatgaagattaagccctctataaagacttcctgttgaggtgaattctcatactgaaatgtagttacctacaatatttactagagatttatgaaattaaattaagagataatgtaagaaaatacatttttttggttctatataatgcttcatgattcatttagggacctagaaatattgtgtgaaaatatataaatatcacccaaaaggctttctgccctatatttttaaaatacagaatagttatatttgaagtagccctggccctagttctatagggcttggctatttaatatttttatggaagaagtgtttagttctggaaaaggtaaatgcttgtatatatttttgcagcctgggatctccctactccattttttcctttaatttaagtggccacatgtatatgtcttccctgctgtgttaggaaaatgggggctggatatcccaagaatcagaggttatataaaaatactgcaaatagaccgcagacataaatatctaccaaatgctatcttaaattttggtccaaactgaacatatggaaatagatttattgtaagtatttacttagagctttttcttaaatctgaactaacttgcttttagaagtctttttctttgtaagcattgtaaatgctaataaatcctgttaatttttttttttttttttttttttttttactgcatgttacattgaaataaaaacaaagtaaaatgagcaattgccttattgttctgctcttttgcagggggtgggggttggggaagacagcattccacagcctggtcaggagggaaggacctcacttgtttcatcaaatggagtggtttaaaactgatcaagcagctcataataatgaattcctgctctgtcttttattatcttatgtcagagtgcagcaaaatctcatttcataagacttacaataactctatttaaaattcaggtattgtactcgggaggctgaggtgggaggatcccaggagttcaaatcctgcctgggcaacatagcaagaccctgtctcttaaaaaaacaaaaagacatattcaggtactgatttttcatcaagagattgacataccaatgatcagaaattttagtgaaacttgactcaactatacacaaagttctcatcctaaatgaactatttcagtcaagcccactctaccactttttacttatctggttaataatccgaaatgttaccggggttgactcacggaattaaatttttcctctatttttatatcctttcctgttgtggatgtaacttacctttctaaactcctttagagttaacgacttctatttagtattgttggtatctccagcccccctcctttttttgtttttcttttagttatttactttgtttgtataatttgctttcattaactaaaaatggaattggcagcactggattgtatattactgtattaagagtacctttgttttcttgatctgttacttttaatactcaggtaatgctacaaatattacagggagtcaaatgcttttataaagttccttcagtggttgcctcacttgcgttttcctacaagatgtaagactgtttataattaaacttttttggtccttca

SEQ ID NO: 15016 - DNA, 2940 bp, Homo sapiens
  source 1..2940: mol_type = unassigned DNA
agctgtggtcggggctcgggaccggctgccatcttagtctagggactgaggagtcgccgccgccccgagtcccggtaccatgcatttcacggtggccttgtggagacaacgccttaacccaaggaagtgactcaaactgtgagaacttcaggttttccaacctattggtggtatgtctgacagtggatcacaacttggttcaatgggtagcctcaccatgaaatcacagcttcagatcactgtatcgttacccctgtgagtaaattacattttcgtgtgtggagtcaccagacactgaaatctgatgttttgttgggaactgctgcattagatatttatgaaacattaaagtcaaacaatatgaaacttgaagaagtagttgtgactttgcagcttggaggtgacaaagagccaacagagacaataggagacttgtcaatttgtcttgatgggctacagttagagtctgaagttgttaccaatggtgaaactacatgttcagaaagtgcttctcagaatgatgatggctccagatccaaggatgaaacaagagtgagcacaaatggatcagatgaccctgaagatgcaggagctggtgaaaataggagagtcagtgggaataattctccatcactctcaaatggtggttttaaaccttctagacctccaagaccttcacgaccaccaccacccaccccacgtagaccagcatctgtcaatggttcaccatctgccacttctgaaagtgatgggtctagtacaggctctctgccgccgacaaatacaaatacaaatacatctgaaggagcaacatctggattaataattcctcttactatatctggaggctcaggccctaggccattaaatcctgtaactcaagctcccttgccacctggttgggagcagagagtggaccagcacgggcgagtttactatgtagatcatgttgagaaaagaacaacatgggatagaccagaacctctacctcctggctgggaacggcgggttgacaacatgggacgtatttattatgttgaccatttcacaagaacaacaacgtggcagaggccaacactggaatccgtccggaactatgaacaatggcagctacagcgtagtcagcttcaaggagcaatgcagcagtttaaccagagattcatttatgggaatcaagatttatttgctacatcacaaagtaaagaatttgatcctcttggtccattgccacctggatgggagaagagaacagacagcaatggcagagtatatttcgtcaaccacaacacacgaattacacaatgggaagaccccagaagtcaaggtcaattaaatgaaaagcccttacctgaaggttgggaaatgagattcacagtggatggaattccatattttgtggaccacaatagaagaactaccacctatatagatccccgcacaggaaaatctgccctagacaatggacctcagatagcctatgttcgggacttcaaagcaaaggttcagtatttccggttctggtgtcagcaactggccatgccacagcacataaagattacagtgacaagaaaaacattgtttgaggattcctttcaacagataatgagcttcagtccccaagatctgcgaagacgtttgtgggtgatttttccaggagaagaaggtttagattatggaggtgtagcaagagaatggttctttcttttgtcacatgaagtgttgaacccaatgtattgcctgtttgaatatgcagggaaggataactactgcttgcagataaaccccgcttcttacatcaatccagatcacctgaaatattttcgttttattggcagatttattgccatggctctgttccatgggaaattcatagacacgggtttttctttaccattctataagcgtatcttgaacaaaccagttggactcaaggatttagaatctattgatccagaattttacaattctctcatctgggttaaggaaaacaatattgaggaatgtgatttggaaatgtacttctccgttgacaaagaaattctaggtgaaattaagagtcatgatctgaaacctaatggtggcaatattcttgtaacagaagaaaataaagaggaatacatcagaatggtagctgagtggaggttgtctcgaggtgttgaagaacagacacaagctttctttgaaggctttaatgaaattcttccccagcaatatttgcaatactttgatgcaaaggaattagaggtccttttatgtggaatgcaagagattgatttgaatgactggcaaagacatgccatctaccgtcattatgcaaggaccagcaaacaaatcatgtggttttggcagtttgttaaagaaattgataatgagaagagaatgagacttctgcagtttgttactggaacctgccgattgccagtaggaggatttgctgatctcatggggagcaatggaccacagaaattctgcattgaaaaagttgggaaagaaaattggctacccagaagtcatacctgttttaatcgcctggacctgccaccatacaagagctatgagcaactgaaggaaaagctgttgtttgccatagaagaaacagaaggatttggacaagagtaacttctgagaacttgcaccatgaatgggcaagaacttatttgcaatgtttgtccttctctgcctgttgcacatcttgtaaaattggacaatggctctttagagagttatctgagtgtaagtaaattaatgttctcatttagatttatctcccagtgatttctactcagcgtttccagaaatcaggtctgcaaatgactagtcagaaccttgcttaacatgagattttaacacaacaatgaaatttgccttgtcttattccactagtttattcctttaacaacaatattttatgtgtgtcaaaagtctcacttgggagtagtg

SEQ ID NO: 15017 - DNA, 5835 bp, Homo sapiens
  source 1..5835: mol_type = unassigned DNA
ctcatgcatatgcaggtgcgcgggtgacgaatgggcgagcgagctgtcagtctcgttccgaacttgttggctgcggtgccgggagcgcgggcgcgcagagccgaggccgggacccgctgccttcaccgccgccgccgtcgccgccgggtgggagccgggccgggcagccggagcgcggccgccagcgagccggagctgccgccgcccctgcacgcccgccgcccaggcccgcgcgccgcggcgctgcgctcgaccccgcccgcgccgccgccgccgccgcctctgccgctgccgctgcctctgcgggcgctcggagggcgggcgggcgctgggaggccggcgcggcggctgggagccgggcgcgggcggcggcggcggggccgggcgggcgggtcgcgggggcaatgcgggcgcagggccgggggcgccttccccggcggctgctgctgctgctggcgctctgggtgcaggcggcgcggcccatgggctatttcgagctgcagctgagcgcgctgcggaacgtgaacggggagctgctgagcggcgcctgctgtgacggcgacggccggacaacgcgcgcggggggctgcggccacgacgagtgcgacacgtacgtgcgcgtgtgccttaaggagtaccaggccaaggtgacgcccacggggccctgcagctacggccacggcgccacgcccgtgctgggcggcaactccttctacctgccgccggcgggcgctgcgggggaccgagcgcgggcgcgggcccgggccggcggcgaccaggacccgggcctcgtcgtcatccccttccagttcgcctggccgcgctcctttaccctcatcgtggaggcctgggactgggacaacgataccaccccgaatgaggagctgctgatcgagcgagtgtcgcatgccggcatgatcaacccggaggaccgctggaagagcctgcacttcagcggccacgtggcgcacctggagctgcagatccgcgtgcgctgcgacgagaactactacagcgccacttgcaacaagttctgccggccccgcaacgactttttcggccactacacctgcgaccagtacggcaacaaggcctgcatggacggctggatgggcaaggagtgcaaggaagctgtgtgtaaacaagggtgtaatttgctccacgggggatgcaccgtgcctggggagtgcaggtgcagctacggctggcaagggaggttctgcgatgagtgtgtcccctaccccggctgcgtgcatggcagttgtgtggagccctggcagtgcaactgtgagaccaactggggcggcctgctctgtgacaaagacctgaactactgtggcagccaccacccctgcaccaacggaggcacgtgcatcaacgccgagcctgaccagtaccgctgcacctgccctgacggctactcgggcaggaactgtgagaaggctgagcacgcctgcacctccaacccgtgtgccaacgggggctcttgccatgaggtgccgtccggcttcgaatgccactgcccatcgggctggagcgggcccacctgtgcccttgacatcgatgagtgtgcttcgaacccgtgtgcggccggtggcacctgtgtggaccaggtggacggctttgagtgcatctgccccgagcagtgggtgggggccacctgccagctggacgccaatgagtgtgaagggaagccatgccttaacgctttttcttgcaaaaacctgattggcggctattactgtgattgcatcccgggctggaagggcatcaactgccatatcaacgtcaacgactgtcgcgggcagtgtcagcatgggggcacctgcaaggacctggtgaacgggtaccagtgtgtgtgcccacggggcttcggaggccggcattgcgagctggaacgagacgagtgtgccagcagcccctgccacagcggcggcctctgcgaggacctggccgacggcttccactgccactgcccccagggcttctccgggcctctctgtgaggtggatgtcgacctttgtgagccaagcccctgccggaacggcgctcgctgctataacctggagggtgactattactgcgcctgccctgatgactttggtggcaagaactgctccgtgccccgcgagccgtgccctggcggggcctgcagagtgatcgatggctgcgggtcagacgcggggcctgggatgcctggcacagcagcctccggcgtgtgtggcccccatggacgctgcgtcagccagccagggggcaacttttcctgcatctgtgacagtggctttactggcacctactgccatgagaacattgacgactgcctgggccagccctgccgcaatgggggcacatgcatcgatgaggtggacgccttccgctgcttctgccccagcggctgggagggcgagctctgcgacaccaatcccaacgactgccttcccgatccctgccacagccgcggccgctgctacgacctggtcaatgacttctactgtgcgtgcgacgacggctggaagggcaagacctgccactcacgcgagttccagtgcgatgcctacacctgcagcaacggtggcacctgctacgacagcggcgacaccttccgctgcgcctgcccccccggctggaagggcagcacctgcgccgtcgccaagaacagcagctgcctgcccaacccctgtgtgaatggtggcacctgcgtgggcagcggggcctccttctcctgcatctgccgggacggctgggagggtcgtacttgcactcacaataccaacgactgcaaccctctgccttgctacaatggtggcatctgtgttgacggcgtcaactggttccgctgcgagtgtgcacctggcttcgcggggcctgactgccgcatcaacatcgacgagtgccagtcctcgccctgtgcctacggggccacgtgtgtggatgagatcaacgggtatcgctgtagctgcccacccggccgagccggcccccggtgccaggaagtgatcgggttcgggagatcctgctggtcccggggcactccgttcccacacggaagctcctgggtggaagactgcaacagctgccgctgcctggatggccgccgtgactgcagcaaggtgtggtgcggatggaagccttgtctgctggccggccagcccgaggccctgagcgcccagtgcccactggggcaaaggtgcctggagaaggccccaggccagtgtctgcgaccaccctgtgaggcctggggggagtgcggcgcagaagagccaccgagcaccccctgcctgccacgctccggccacctggacaataactgtgcccgcctcaccttgcatttcaaccgtgaccacgtgccccagggcaccacggtgggcgccatttgctccgggatccgctccctgccagccacaagggctgtggcacgggaccgcctgctggtgttgctttgcgaccgggcgtcctcgggggccagtgctgtggaggtggccgtgtccttcagccctgccagggacctgcctgacagcagcctgatccagggcgcggcccacgccatcgtggccgccatcacccagcgggggaacagctcactgctcctggctgtcaccgaggtcaaggtggagacggttgttacgggcggctcttccacaggtctgctggtgcctgtgctgtgtggtgccttcagcgtgctgtggctggcgtgcgtggtcctgtgcgtgtggtggacacgcaagcgcaggaaagagcgggagaggagccggctgccgcgggaggagagcgccaacaaccagtgggccccgctcaaccccatccgcaaccccattgagcggccggggggccacaaggacgtgctctaccagtgcaagaacttcacgccgccgccgcgcagggcggacgaggcgctgcccgggccggccggccacgcggccgtcagggaggatgaggaggacgaggatctgggccgcggtgaggaggactccctggaggcggagaagttcctctcacacaaattcaccaaagatcctggccgctcgccggggaggccggcccactgggcctcaggccccaaagtggacaaccgcgcggtcaggagcatcaatgaggcccgctacgccggcaaggagtaggggcggctgccagctgggccgggacccagggccctcggtgggagccatgccgtctgccggacccggaggccgaggccatgtgcatagtttctttattttgtgtaaaaaaaccaccaaaaacaaaaaccaaatgtttattttctacgtttctttaaccttgtataaattattcagtaactgtcaggctgaaaacaatggagtattctcggatagttgctatttttgtaaagtttccgtgcgtggcactcgctgtatgaaaggagagagcaaagggtgtctgcgtcgtcaccaaatcgtagcgtttgttaccagaggttgtgcactgtttacagaatcttccttttattcctcactcgggtttctctgtggctccaggccaaagtgccggtgagacccatggctgtgttggtgtggcccatggctgttggtgggacccgtggctgatggtgtggcctgtggctgtcggtgggactcgtggctgtcaatgggacctgtggctgtcggtgggacctacggtggtcggtgggaccctggttattgatgtggccctggctgccggcacggcccgtggctgttgacgcacctgtggttgttagtggggcctgaggtcatcggcgtggcccaaggctggcaggtcaacctcgcgcttgctggccagtccaccctgcctgccgtctgtgcttcctcctgcccagaacgcccgctccagcgatctctccactgtgctttcagaagtgcccttcctgctgcgcagttctcccatcctgggacggcggcagtattgaagctcgtgacaagtgccttcacacagacccctcgcaactgtccacgcgtgccgtggcaccaggcgctgcccacctgccggccccggccgcccctcctcgtgaaagtgcatttttgtaaatgtgtacatattaaaggaagcactctgtatatttgattgaataatgccaccattccggcctcccttgttctttcggtgctgtcccttttgtattgagagtgaggttgggggagagccacgccggcagagaggcttggggcagtggggcgcgtgctgggtattggcccacgtggctgtggtggctgtagagggcgagacggttctgttgagtcggggcctgccagggcctcgaatgcgttggcatgccaaggtggtggatgcaggtttggccaaaaccttcctgggaatggggaggggggtgtctaggtgcctggcacccgaccctgactaaaacagctgaaaacagttttataaaatagtataaaattgcttacccacgaatacgtatcaaggtcttaaggaattaacaggtcaaaatttttattcattcatttattcctttgttttgcttggtcattcagaggcaaggtcagcatttgatggaggcaggagagaagcagcccttccacctggccctggagctggttttgcccctcactgcttgagccaactggaacgtggcatggtggcctcagggctgggcatggaaggccgactccaaggctgactccgagccgcctgtcagtgatgtgcaagtctttaccctgctgtgaggggtaggaggtcaactgagtcaaggagcaaagccaagaaccagatctgtacaaaagagaaaaaaaaagtcctgctgacagcctgggagtgaggctgccttgcacaggcagaacaaatgaataaatgaatgaacgaataaaaattttgacctggtaa

SEQ ID NO: 15018 - DNA, 5720 bp, Homo sapiens
  source 1..5720: mol_type = unassigned DNA
ctcatgcatatgcaggtgcgcgggtgacgaatgggcgagcgagctgtcagtctcgttccgaacttgttggctgcggtgccgggagcgcgggcgcgcagagccgaggccgggacccgctgccttcaccgccgccgccgtcgccgccgggtgggagccgggccgggcagccggagcgcggccgccagcgagccggagctgccgccgcccctgcacgcccgccgcccaggcccgcgcgccgcggcgctgcgctcgaccccgcccgcgccgccgccgccgccgcctctgccgctgccgctgcctctgcgggcgctcggagggcgggcgggcgctgggaggccggcgcggcggctgggagccgggcgcgggcggcggcggcggggccgggcgggcgggtcgcgggggcaatgcgggcgcagggccgggggcgccttccccggcggctgctgctgctgctggcgctctgggtgcaggcggcgcggcccatgggctatttcgagctgcagctgagcgcgctgcggaacgtgaacggggagctgctgagcggcgcctgctgtgacggcgacggccggacaacgcgcgcggggggctgcggccacgacgagtgcgacacgtacgtgcgcgtgtgccttaaggagtaccaggccaaggtgacgcccacggggccctgcagctacggccacggcgccacgcccgtgctgggcggcaactccttctacctgccgccggcgggcgctgcgggggaccgagcgcgggcgcgggcccgggccggcggcgaccaggacccgggcctcgtcgtcatccccttccagttcgcctggccgcgctcctttaccctcatcgtggaggcctgggactgggacaacgataccaccccgaatgaggagctgctgatcgagcgagtgtcgcatgccggcatgatcaacccggaggaccgctggaagagcctgcacttcagcggccacgtggcgcacctggagctgcagatccgcgtgcgctgcgacgagaactactacagcgccacttgcaacaagttctgccggccccgcaacgactttttcggccactacacctgcgaccagtacggcaacaaggcctgcatggacggctggatgggcaaggagtgcaaggaagctgtgtgtaaacaagggtgtaatttgctccacgggggatgcaccgtgcctggggagtgcaggtgcagctacggctggcaagggaggttctgcgatgagtgtgtcccctaccccggctgcgtgcatggcagttgtgtggagccctggcagtgcaactgtgagaccaactggggcggcctgctctgtgacaaagacctgaactactgtggcagccaccacccctgcaccaacggaggcacgtgcatcaacgccgagcctgaccagtaccgctgcacctgccctgacggctactcgggcaggaactgtgagaaggctgagcacgcctgcacctccaacccgtgtgccaacgggggctcttgccatgaggtgccgtccggcttcgaatgccactgcccatcgggctggagcgggcccacctgtgcccttgacatcgatgagtgtgcttcgaacccgtgtgcggccggtggcacctgtgtggaccaggtggacggctttgagtgcatctgccccgagcagtgggtgggggccacctgccagctggacgtcaacgactgtcgcgggcagtgtcagcatgggggcacctgcaaggacctggtgaacgggtaccagtgtgtgtgcccacggggcttcggaggccggcattgcgagctggaacgagacgagtgtgccagcagcccctgccacagcggcggcctctgcgaggacctggccgacggcttccactgccactgcccccagggcttctccgggcctctctgtgaggtggatgtcgacctttgtgagccaagcccctgccggaacggcgctcgctgctataacctggagggtgactattactgcgcctgccctgatgactttggtggcaagaactgctccgtgccccgcgagccgtgccctggcggggcctgcagagtgatcgatggctgcgggtcagacgcggggcctgggatgcctggcacagcagcctccggcgtgtgtggcccccatggacgctgcgtcagccagccagggggcaacttttcctgcatctgtgacagtggctttactggcacctactgccatgagaacattgacgactgcctgggccagccctgccgcaatgggggcacatgcatcgatgaggtggacgccttccgctgcttctgccccagcggctgggagggcgagctctgcgacaccaatcccaacgactgccttcccgatccctgccacagccgcggccgctgctacgacctggtcaatgacttctactgtgcgtgcgacgacggctggaagggcaagacctgccactcacgcgagttccagtgcgatgcctacacctgcagcaacggtggcacctgctacgacagcggcgacaccttccgctgcgcctgcccccccggctggaagggcagcacctgcgccgtcgccaagaacagcagctgcctgcccaacccctgtgtgaatggtggcacctgcgtgggcagcggggcctccttctcctgcatctgccgggacggctgggagggtcgtacttgcactcacaataccaacgactgcaaccctctgccttgctacaatggtggcatctgtgttgacggcgtcaactggttccgctgcgagtgtgcacctggcttcgcggggcctgactgccgcatcaacatcgacgagtgccagtcctcgccctgtgcctacggggccacgtgtgtggatgagatcaacgggtatcgctgtagctgcccacccggccgagccggcccccggtgccaggaagtgatcgggttcgggagatcctgctggtcccggggcactccgttcccacacggaagctcctgggtggaagactgcaacagctgccgctgcctggatggccgccgtgactgcagcaaggtgtggtgcggatggaagccttgtctgctggccggccagcccgaggccctgagcgcccagtgcccactggggcaaaggtgcctggagaaggccccaggccagtgtctgcgaccaccctgtgaggcctggggggagtgcggcgcagaagagccaccgagcaccccctgcctgccacgctccggccacctggacaataactgtgcccgcctcaccttgcatttcaaccgtgaccacgtgccccagggcaccacggtgggcgccatttgctccgggatccgctccctgccagccacaagggctgtggcacgggaccgcctgctggtgttgctttgcgaccgggcgtcctcgggggccagtgctgtggaggtggccgtgtccttcagccctgccagggacctgcctgacagcagcctgatccagggcgcggcccacgccatcgtggccgccatcacccagcgggggaacagctcactgctcctggctgtcaccgaggtcaaggtggagacggttgttacgggcggctcttccacaggtctgctggtgcctgtgctgtgtggtgccttcagcgtgctgtggctggcgtgcgtggtcctgtgcgtgtggtggacacgcaagcgcaggaaagagcgggagaggagccggctgccgcgggaggagagcgccaacaaccagtgggccccgctcaaccccatccgcaaccccattgagcggccggggggccacaaggacgtgctctaccagtgcaagaacttcacgccgccgccgcgcagggcggacgaggcgctgcccgggccggccggccacgcggccgtcagggaggatgaggaggacgaggatctgggccgcggtgaggaggactccctggaggcggagaagttcctctcacacaaattcaccaaagatcctggccgctcgccggggaggccggcccactgggcctcaggccccaaagtggacaaccgcgcggtcaggagcatcaatgaggcccgctacgccggcaaggagtaggggcggctgccagctgggccgggacccagggccctcggtgggagccatgccgtctgccggacccggaggccgaggccatgtgcatagtttctttattttgtgtaaaaaaaccaccaaaaacaaaaaccaaatgtttattttctacgtttctttaaccttgtataaattattcagtaactgtcaggctgaaaacaatggagtattctcggatagttgctatttttgtaaagtttccgtgcgtggcactcgctgtatgaaaggagagagcaaagggtgtctgcgtcgtcaccaaatcgtagcgtttgttaccagaggttgtgcactgtttacagaatcttccttttattcctcactcgggtttctctgtggctccaggccaaagtgccggtgagacccatggctgtgttggtgtggcccatggctgttggtgggacccgtggctgatggtgtggcctgtggctgtcggtgggactcgtggctgtcaatgggacctgtggctgtcggtgggacctacggtggtcggtgggaccctggttattgatgtggccctggctgccggcacggcccgtggctgttgacgcacctgtggttgttagtggggcctgaggtcatcggcgtggcccaaggctggcaggtcaacctcgcgcttgctggccagtccaccctgcctgccgtctgtgcttcctcctgcccagaacgcccgctccagcgatctctccactgtgctttcagaagtgcccttcctgctgcgcagttctcccatcctgggacggcggcagtattgaagctcgtgacaagtgccttcacacagacccctcgcaactgtccacgcgtgccgtggcaccaggcgctgcccacctgccggccccggccgcccctcctcgtgaaagtgcatttttgtaaatgtgtacatattaaaggaagcactctgtatatttgattgaataatgccaccattccggcctcccttgttctttcggtgctgtcccttttgtattgagagtgaggttgggggagagccacgccggcagagaggcttggggcagtggggcgcgtgctgggtattggcccacgtggctgtggtggctgtagagggcgagacggttctgttgagtcggggcctgccagggcctcgaatgcgttggcatgccaaggtggtggatgcaggtttggccaaaaccttcctgggaatggggaggggggtgtctaggtgcctggcacccgaccctgactaaaacagctgaaaacagttttataaaatagtataaaattgcttacccacgaatacgtatcaaggtcttaaggaattaacaggtcaaaatttttattcattcatttattcctttgttttgcttggtcattcagaggcaaggtcagcatttgatggaggcaggagagaagcagcccttccacctggccctggagctggttttgcccctcactgcttgagccaactggaacgtggcatggtggcctcagggctgggcatggaaggccgactccaaggctgactccgagccgcctgtcagtgatgtgcaagtctttaccctgctgtgaggggtaggaggtcaactgagtcaaggagcaaagccaagaaccagatctgtacaaaagagaaaaaaaaagtcctgctgacagcctgggagtgaggctgccttgcacaggcagaacaaatgaataaatgaatgaacgaataaaaattttgacctggta

SEQ ID NO: 15019 - DNA, 5047 bp, Homo sapiens
  source 1..5047: mol_type = unassigned DNA
tgcagacagtgcgggcctgcgcccagtcccggctgtcctcgccgcgacccctcctcagccctgggcgcgcgcacgctggggccccgcggggctggccgcctagcgagcctgccggtcgaccccagccagcgcagcgacggggcgctgcctggcccaggcgcacacggaagtgcgcttctctgaagtagctttggaaagtagagaagaaaatccagtttgcttcttggagaacactggacagctgaataaatgcagtatctaaatataaaagaggactgcaatgccatggctttctgtgctaaaatgaggagctccaagaagactgaggtgaacctggaggcccctgagccaggggtggaagtgatcttctatctgtcggacagggagcccctccggctgggcagtggagagtacacagcagaggaactgtgcatcagggctgcacaggcatgccgtatctctcctctttgtcacaacctctttgccctgtatgacgagaacaccaagctctggtatgctccaaatcgcaccatcaccgttgatgacaagatgtccctccggctccactaccggatgaggttctatttcaccaattggcatggaaccaacgacaatgagcagtcagtgtggcgtcattctccaaagaagcagaaaaatggctacgagaaaaaaaagattccagatgcaacccctctccttgatgccagctcactggagtatctgtttgctcagggacagtatgatttggtgaaatgcctggctcctattcgagaccccaagaccgagcaggatggacatgatattgagaacgagtgtctagggatggctgtcctggccatctcacactatgccatgatgaagaagatgcagttgccagaactgcccaaggacatcagctacaagcgatatattccagaaacattgaataagtccatcagacagaggaaccttctcaccaggatgcggataaataatgttttcaaggatttcctaaaggaatttaacaacaagaccatttgtgacagcagcgtgtccacgcatgacctgaaggtgaaatacttggctaccttggaaactttgacaaaacattacggtgctgaaatatttgagacttccatgttactgatttcatcagaaaatgagatgaattggtttcattcgaatgacggtggaaacgttctctactacgaagtgatggtgactgggaatcttggaatccagtggaggcataaaccaaatgttgtttctgttgaaaaggaaaaaaataaactgaagcggaaaaaactggaaaataaacacaagaaggatgaggagaaaaacaagatccgggaagagtggaacaatttttcttacttccctgaaatcactcacattgtaataaaggagtctgtggtcagcattaacaagcaggacaacaagaaaatggaactgaagctctcttcccacgaggaggccttgtcctttgtgtccctggtagatggctacttccggctcacagcagatgcccatcattacctctgcaccgacgtggcccccccgttgatcgtccacaacatacagaatggctgtcatggtccaatctgtacagaatacgccatcaataaattgcggcaagaaggaagcgaggaggggatgtacgtgctgaggtggagctgcaccgactttgacaacatcctcatgaccgtcacctgctttgagaagtctgagcaggtgcagggtgcccagaagcagttcaagaactttcagatcgaggtgcagaagggccgctacagtctgcacggttcggaccgcagcttccccagcttgggagacctcatgagccacctcaagaagcagatcctgcgcacggataacatcagcttcatgctaaaacgctgctgccagcccaagccccgagaaatctccaacctgctggtggctactaagaaagcccaggagtggcagcccgtctaccccatgagccagctgagtttcgatcggatcctcaagaaggatctggtgcagggcgagcaccttgggagaggcacgagaacacacatctattctgggaccctgatggattacaaggatgacgaaggaacttctgaagagaagaagataaaagtgatcctcaaagtcttagaccccagccacagggatatttccctggccttcttcgaggcagccagcatgatgagacaggtctcccacaaacacatcgtgtacctctatggcgtctgtgtccgcgacgtggagaatatcatggtggaagagtttgtggaagggggtcctctggatctcttcatgcaccggaaaagcgatgtccttaccacaccatggaaattcaaagttgccaaacagctggccagtgccctgagctacttggaggataaagacctggtccatggaaatgtgtgtactaaaaacctcctcctggcccgtgagggcatcgacagtgagtgtggcccattcatcaagctcagtgaccccggcatccccattacggtgctgtctaggcaagaatgcattgaacgaatcccatggattgctcctgagtgtgttgaggactccaagaacctgagtgtggctgctgacaagtggagctttggaaccacgctctgggaaatctgctacaatggcgagatccccttgaaagacaagacgctgattgagaaagagagattctatgaaagccggtgcaggccagtgacaccatcatgtaaggagctggctgacctcatgacccgctgcatgaactatgaccccaatcagaggcctttcttccgagccatcatgagagacattaataagcttgaagagcagaatccagatattgtttcagaaaaaaaaccagcaactgaagtggaccccacacattttgaaaagcgcttcctaaagaggatccgtgacttgggagagggccactttgggaaggttgagctctgcaggtatgaccccgaaggggacaatacaggggagcaggtggctgttaaatctctgaagcctgagagtggaggtaaccacatagctgatctgaaaaaggaaatcgagatcttaaggaacctctatcatgagaacattgtgaagtacaaaggaatctgcacagaagacggaggaaatggtattaagctcatcatggaatttctgccttcgggaagccttaaggaatatcttccaaagaataagaacaaaataaacctcaaacagcagctaaaatatgccgttcagatttgtaaggggatggactatttgggttctcggcaatacgttcaccgggacttggcagcaagaaatgtccttgttgagagtgaacaccaagtgaaaattggagacttcggtttaaccaaagcaattgaaaccgataaggagtattacaccgtcaaggatgaccgggacagccctgtgttttggtatgctccagaatgtttaatgcaatctaaattttatattgcctctgacgtctggtcttttggagtcactctgcatgagctgctgacttactgtgattcagattctagtcccatggctttgttcctgaaaatgataggcccaacccatggccagatgacagtcacaagacttgtgaatacgttaaaagaaggaaaacgcctgccgtgcccacctaactgtccagatgaggtttatcaacttatgaggaaatgctgggaattccaaccatccaatcggacaagctttcagaaccttattgaaggatttgaagcacttttaaaataagaagcatgaataacatttaaattccacagattatcaagtccttctcctgcaacaaatgcccaagtcattttttaaaaatttctaatgaaagaagtttgtgttctgtccaaaaagtcactgaactcatacttcagtacatatacatgtataaggcacactgtagtgcttaatatgtgtaaggacttcctctttaaatttggtaccagtaacttagtgacacataatgacaaccaaaatatttgaaagcacttaagcactcctccttgtggaaagaatataccaccatttcatctggctagttcaccatcacaactgcattaccaaaaggggatttttgaaaacgaggagttgaccaaaataatatctgaagatgattgcttttccctgctgccagctgatctgaaatgttttgctggcacattaatcatagataaagaaagattgatggacttagccctcaaatttcagtatctatacagtactagaccatgcattcttaaaatattagataccaggtagtatatattgtttctgtacaaaaatgactgtattctctcaccagtaggacttaaactttgtttctccagtggcttagctcctgttcctttgggtgatcactagcacccatttttgagaaagctggttctacatggggggatagctgtggaatagataatttgctgcatgttaattctcaagaactaagcctgtgccagtgctttcctaagcagtatacctttaatcagaactcattcccagaacctggatgctattacacatgcttttaagaaacgtcaatgtatatccttttataactctaccactttggggcaagctattccagcactggttttgaatgctgtatgcaaccagtctgaataccacatacgctgcactgttcttagagggtttccatacttaccaccgatctacaagggttgatccctgtttttaccatcaatcatcaccctgtggtgcaacacttgaaagacccggctagaggcactatggacttcaggatccactagacagttttcagtttgcttggaggtagctgggtaatcaaaaatgtttagtcattgattcaatgtgaacgattacggtctttatgaccaagagtctgaaaatctttttgttatgctgtttagtattcgtttgatattgttacttttcacctgttgagcccaaattcaggattggttcagtggcagcaatgaagttgccatttaaatttgttcatagcctacatcaccaaggtctctgtgtcaaacctgtggccactctatatgcactttgtttactctttatacaaataaatatactaaagacttta

SEQ ID NO: 15020 - DNA, 2803 bp, Homo sapiens
  source 1..2803: mol_type = unassigned DNA
cccggctctgcccgcccttcgaaagtccagggtccctgcccgctaggactgaggggctttttctctctgtgccccaggcaagttgcactcatggcacctccaagtgaagagacgcccctgatccctcagcgttcatgcagcctcttgtccacggaggctggtgccctgcatgtgctgctgcccgctcggggccccgggcccccccagcgcctatctttctcctttggggaccacttggctgaggacctgtgcgtgcaggctgccaaggccagcggcatcctgcctgtgtaccactccctctttgctctggccacggaggacctgtcctgctggttccccccgagccacatcttctccgtggaggatgccagcacccaagtcctgctgtacaggattcgcttttacttccccaattggtttgggctggagaagtgccaccgcttcgggctacgcaaggatttggccagtgctatccttgacctgccagtcctggagcacctctttgcccagcaccgcagtgacctggtgagtgggcgcctccccgtgggcctcagtctcaaggagcagggtgagtgtctcagcctggccgtgttggacctggcccggatggcgcgagagcaggcccagcggccgggagagctgctgaagactgtcagctacaaggcctgcctacccccaagcctgcgcgacctgatccagggcctgagcttcgtgacgcggaggcgtattcggaggacggtgcgcagagccctgcgccgcgtggccgcctgccaggcagaccggcactcgctcatggccaagtacatcatggacctggagcggctggatccagccggggccgccgagaccttccacgtgggcctccctggggcccttggtggccacgacgggctggggctgctccgcgtggctggtgacggcggcatcgcctggacccagggagaacaggaggtcctccagcccttctgcgactttccagaaatcgtagacattagcatcaagcaggccccgcgcgttggcccggccggagagcaccgcctggtcactgttaccaggacagacaaccagattttagaggccgagttcccagggctgcccgaggctctgtcgttcgtggcgctcgtggacggctacttccggctgaccacggactcccagcacttcttctgcaaggaggtggcaccgccgaggctgctggaggaagtggccgagcagtgccacggccccatcactctggactttgccatcaacaagctcaagactgggggctcacgtcctggctcctatgttctccgccgcagcccccaggactttgacagcttcctcctcactgtctgtgtccagaacccccttggtcctgattataagggctgcctcatccggcgcagccccacaggaaccttccttctggttggcctcagccgaccccacagcagtcttcgagagctcctggcaacctgctgggatggggggctgcacgtagatggggtggcagtgaccctcacttcctgctgtatccccagacccaaagaaaagtccaacctgatcgtggtccagagaggtcacagcccacccacatcatccttggttcagccccaatcccaataccagctgagtcagatgacatttcacaagatccctgctgacagcctggagtggcatgagaacctgggccatgggtccttcaccaagatttaccggggctgtcgccatgaggtggtggatggggaggcccgaaagacagaggtgctgctgaaggtcatggatgccaagcacaagaactgcatggagtcattcctggaagcagcgagcttgatgagccaagtgtcgtaccggcatctcgtgctgctccacggcgtgtgcatggctggagacagtgagagccccccacccacccaccccacccctgcctcacccaagtctaggctgttcttcccacctctgttctgagccgctatatgacagccccagcaacacactgggccaccctggatgggagccgtgttcattaccctttatttatgtctctccatcatcactccttggaaagcggctccaggttctcacccatatccagccccagaatgacctgaagtcagacaaacctggctttctaatctctgcagctttgtacaggtcacgtaacctttctgagccttggtttcattggttgggagtctaggatgggccaggagctgggacagagcctagaatgtgacaggcagggtgtgatgaggtgtgaggagggcagcacggagcactgtggatggtcagaaaggcattcctggcagagggaacagcatgccaagcgtgagaaggctcagagtaaggaggttaagagcccaagtattggagcctacagttttgccccttccatgcagtgtgacagtgggcaagttcctttccctctctgggtctcagttctgtcccctgcaaaatggtcagagcttaccccttggctgtgcagggtcaactttctgactggtgagagggattctcatgcaggttaagcttctgctgctcctcctcacctgcaaagcttttctgccacttttgcctccttggaaaactcttatccatctctcaaaactccagctaccacatccttgcagccttccctcatatacccccactactactgtagccctgtccttccctccagccccactctggccctggggctggggaagtgtctgtgtccagctgtctcccctgacctcagggttccttgggggctgggctgaggcctcagtacagagggggctctggaaatgtttgttgactgaataaaggaattcagtgg

SEQ ID NO: 15021 - DNA, 5432 bp, Homo sapiens
  source 1..5432: mol_type = unassigned DNA
cacacaggaaggagccgagtgggactttcctctcgctgcctcccggctctgcccgcccttcgaaagtccagggtccctgcccgctaggcaagttgcactcatggcacctccaagtgaagagacgcccctgatccctcagcgttcatgcagcctcttgtccacggaggctggtgccctgcatgtgctgctgcccgctcggggccccgggcccccccagcgcctatctttctcctttggggaccacttggctgaggacctgtgcgtgcaggctgccaaggccagcggcatcctgcctgtgtaccactccctctttgctctggccacggaggacctgtcctgctggttccccccgagccacatcttctccgtggaggatgccagcacccaagtcctgctgtacaggattcgcttttacttccccaattggtttgggctggagaagtgccaccgcttcgggctacgcaaggatttggccagtgctatccttgacctgccagtcctggagcacctctttgcccagcaccgcagtgacctggtgagtgggcgcctccccgtgggcctcagtctcaaggagcagggtgagtgtctcagcctggccgtgttggacctggcccggatggcgcgagagcaggcccagcggccgggagagctgctgaagactgtcagctacaaggcctgcctacccccaagcctgcgcgacctgatccagggcctgagcttcgtgacgcggaggcgtattcggaggacggtgcgcagagccctgcgccgcgtggccgcctgccaggcagaccggcactcgctcatggccaagtacatcatggacctggagcggctggatccagccggggccgccgagaccttccacgtgggcctccctggggcccttggtggccacgacgggctggggctgctccgcgtggctggtgacggcggcatcgcctggacccagggagaacaggaggtcctccagcccttctgcgactttccagaaatcgtagacattagcatcaagcaggccccgcgcgttggcccggccggagagcaccgcctggtcactgttaccaggacagacaaccagattttagaggccgagttcccagggctgcccgaggctctgtcgttcgtggcgctcgtggacggctacttccggctgaccacggactcccagcacttcttctgcaaggaggtggcaccgccgaggctgctggaggaagtggccgagcagtgccacggccccatcactctggactttgccatcaacaagctcaagactgggggctcacgtcctggctcctatgttctccgccgcagcccccaggactttgacagcttcctcctcactgtctgtgtccagaacccccttggtcctgattataagggctgcctcatccggcgcagccccacaggaaccttccttctggttggcctcagccgaccccacagcagtcttcgagagctcctggcaacctgctgggatggggggctgcacgtagatggggtggcagtgaccctcacttcctgctgtatccccagacccaaagaaaagtccaacctgatcgtggtccagagaggtcacagcccacccacatcatccttggttcagccccaatcccaataccagctgagtcagatgacatttcacaagatccctgctgacagcctggagtggcatgagaacctgggccatgggtccttcaccaagatttaccggggctgtcgccatgaggtggtggatggggaggcccgaaagacagaggtgctgctgaaggtcatggatgccaagcacaagaactgcatggagtcattcctggaagcagcgagcttgatgagccaagtgtcgtaccggcatctcgtgctgctccacggcgtgtgcatggctggagacagcaccatggtgcaggaatttgtacacctgggggccatagacatgtatctgcgaaaacgtggccacctggtgccagccagctggaagctgcaggtggtcaaacagctggcctacgccctcaactatctggaggacaaaggcctgccccatggcaatgtctctgcccggaaggtgctcctggctcgggagggggctgatgggagcccgcccttcatcaagctgagtgaccctggggtcagccccgctgtgttaagcctggagatgctcaccgacaggatcccctgggtggcccccgagtgtctccgggaggcgcagacacttagcttggaagctgacaagtggggcttcggcgccacggtctgggaagtgtttagtggcgtcaccatgcccatcagtgccctggatcctgctaagaaactccaattttatgaggaccggcagcagctgccggcccccaagtggacagagctggccctgctgattcaacagtgcatggcctatgagccggtccagaggccctccttccgagccgtcattcgtgacctcaatagcctcatctcttcagactatgagctcctctcagaccccacacctggtgccctggcacctcgtgatgggctgtggaatggtgcccagctctatgcctgccaagaccccacgatcttcgaggagagacacctcaagtacatctcacagctgggcaagggcaactttggcagcgtggagctgtgccgctatgacccgctaggcgacaatacaggtgccctggtggccgtgaaacagctgcagcacagcgggccagaccagcagagggactttcagcgggagattcagatcctcaaagcactgcacagtgatttcattgtcaagtatcgtggtgtcagctatggcccgggccgccagagcctgcggctggtcatggagtacctgcccagcggctgcttgcgcgacttcctgcagcggcaccgcgcgcgcctcgatgccagccgcctccttctctattcctcgcagatctgcaagggcatggagtacctgggctcccgccgctgcgtgcaccgcgacctggccgcccgaaacatcctcgtggagagcgaggcacacgtcaagatcgctgacttcggcctagctaagctgctgccgcttgacaaagactactacgtggtccgcgagccaggccagagccccattttctggtatgcccccgaatccctctcggacaacatcttctctcgccagtcagacgtctggagcttcggggtcgtcctgtacgagctcttcacctactgcgacaaaagctgcagcccctcggccgagttcctgcggatgatgggatgtgagcgggatgtccccgccctctgccgcctcttggaactgctggaggagggccagaggctgccggcgcctcctgcctgccctgctgaggttcacgagctcatgaagctgtgctgggcccctagcccacaggaccggccatcattcagcgccctgggcccccagctggacatgctgtggagcggaagccgggggtgtgagactcatgccttcactgctcacccagagggcaaacaccactccctgtccttttcatagctcctgcccgcagacctctggattaggtctctgttgactggctgtgtgaccttaggcccggagctgcccctctctgggcctcagaggccttatgagggtcctctacttcaggaacacccccatgacattgcatttgggggggctcccgtggcctgtagaatagcctgtggcctttgcaatttgttaaggttcaagacagatgggcatatgtgtcagtggggctctctgagtcctggcccaaagaagcaaggaaccaaatttaagactctcgcatcttcccaaccccttaagccctggccccctgagtttccttttctgtctctctctttttattttttttatttttatttttatttttgagacagagcctcgctctgttacccagggtggagtgcagtggtgcgatctcggctcagtgcaacctctgcttcccaggttcaagcgattctcctgcctcagcctcccgagtagctgggattacaggtgtgcaccaccacacccggctaattttttttatttttaatagagatgaggtttcaccatgatggccaggctgatctcgaactcctaacctcaagtgatcctcccacctcagcctcccaaagtgttggaataataggcatgagccactgcacccaggcttttttttttttaaatttattattattatttttaagagacaggatcttgctacgttgcccaggctggtcttgaactcctgggctacagtgatcctcctgccttatcctcctaaatagctgggactacagcacctagttttgagtttcctgtcttatttccaatggggacattcatgtagctttttttttttttttttttttgagacggagtctcgctctgtcgcccaggctggagtacagtggcgcaatctaggctcactgcaagctccgcctcctgggttcacaccattctctcgcctcagcctcccaagtagctgggactacaggcgcccgccaccacacccggctaattttttgtatttttagtagagacggggtttcaccttgttagccaggatggtttccatctcctgacctcgtgatctgcccgtctcggcctcccaaagtgctgggattacaggcatgagccactgcgcccggccctcatgtagctttaaatgtatgatctgacttctgctccccgatctctgtttctctggaggaagccaaggacaagagcagttgctgtggctgggactctgccttttaggggagcccgtgtatctctttgggatcctgaaagggggcaggaaaggctggggtcccagtccaccctaatggtatctgagtgtcctagggcttcagttttcccacctgtccaatgggaccctttctgtcctcaccctacaaggggcacaaagggatgacaccaaacctggcaggaacttttcacgcaatcaagggaaggaaaggcattcctggcagagggaacagcatgccaagcgtgagaaggctcagagtaaggaggttaagagcccaagtattggagcctacagttttgccccttccatgcagtgtgacagtgggcaagttcctttccctctctgggtctcagttctgtcccctgcaaaatggtcagagcttaccccttggctgtgcagggtcaactttctgactggtgagagggattctcatgcaggttaagcttctgctgctcctcctcacctgcaaagcttttctgccacttttgcctccttggaaaactcttatccatctctcaaaactccagctaccacatccttgcagccttccctcatatacccccactactactgtagccctgtccttccctccagccccactctggccctggggctggggaagtgtctgtgtccagctgtctcccctgacctcagggttccttgggggctgggctgaggcctcagtacagagggggctctggaaatgtttgttgactgaataaaggaattcagtgg

SEQ ID NO: 15022 - DNA, 3996 bp, Homo sapiens
  source 1..3996: mol_type = unassigned DNA
ttctctctgtgccccaggcaagttgcactcatggcacctccaagtgaagagacgcccctgatccctcagcgttcatgcagcctcttgtccacggaggctggtgccctgcatgtgctgctgcccgctcggggccccgggcccccccagcgcctatctttctcctttggggaccacttggctgaggacctgtgcgtgcaggctgccaaggccagcggcatcctgcctgtgtaccactccctctttgctctggccacggaggacctgtcctgctggttccccccgagccacatcttctccgtggaggatgccagcacccaagtcctgctgtacaggattcgcttttacttccccaattggtttgggctggagaagtgccaccgcttcgggctacgcaaggatttggccagtgctatccttgacctgccagtcctggagcacctctttgcccagcaccgcagtgacctggtgagtgggcgcctccccgtgggcctcagtctcaaggagcagggtgagtgtctcagcctggccgtgttggacctggcccggatggcgcgagagcaggcccagcggccgggagagctgctgaagactgtcagctacaaggcctgcctacccccaagcctgcgcgacctgatccagggcctgagcttcgtgacgcggaggcgtattcggaggacggtgcgcagagccctgcgccgcgtggccgcctgccaggcagaccggcactcgctcatggccaagtacatcatggacctggagcggctggatccagccggggccgccgagaccttccacgtgggcctccctggggcccttggtggccacgacgggctggggctgctccgcgtggctggtgacggcggcatcgcctggacccagggagaacaggaggtcctccagcccttctgcgactttccagaaatcgtagacattagcatcaagcaggccccgcgcgttggcccggccggagagcaccgcctggtcactgttaccaggacagacaaccagattttagaggccgagttcccagggctgcccgaggctctgtcgttcgtggcgctcgtggacggctacttccggctgaccacggactcccagcacttcttctgcaaggaggtggcaccgccgaggctgctggaggaagtggccgagcagtgccacggccccatcactctggactttgccatcaacaagctcaagactgggggctcacgtcctggctcctatgttctccgccgcagcccccaggactttgacagcttcctcctcactgtctgtgtccagaacccccttggtcctgattataagggctgcctcatccggcgcagccccacaggaaccttccttctggttggcctcagccgaccccacagcagtcttcgagagctcctggcaacctgctgggatggggggctgcacgtagatggggtggcagtgaccctcacttcctgctgtatccccagacccaaagaaaagtccaacctgatcgtggtccagagaggtcacagcccacccacatcatccttggttcagccccaatcccaataccagctgagtcagatgacatttcacaagatccctgctgacagcctggagtggcatgagaacctgggccatgggtccttcaccaagatttaccggggctgtcgccatgaggtggtggatggggaggcccgaaagacagaggtgctgctgaaggtcatggatgccaagcacaagaactgcatggagtcattcctggaagcagcgagcttgatgagccaagtgtcgtaccggcatctcgtgctgctccacggcgtgtgcatggctggagacagcaccatggtgcaggaatttgtacacctgggggccatagacatgtatctgcgaaaacgtggccacctggtgccagccagctggaagctgcaggtggtcaaacagctggcctacgccctcaactatctggaggacaaaggcctgccccatggcaatgtctctgcccggaaggtgctcctggctcgggagggggctgatgggagcccgcccttcatcaagctgagtgaccctggggtcagccccgctgtgttaagcctggagatgctcaccgacaggatcccctgggtggcccccgagtgtctccgggaggcgcagacacttagcttggaagctgacaagtggggcttcggcgccacggtctgggaagtgtttagtggcgtcaccatgcccatcagtgccctggatcctgctaagaaactccaattttatgaggaccggcagcagctgccggcccccaagtggacagagctggccctgctgattcaacagtgcatggcctatgagccggtccagaggccctccttccgagccgtcattcgtgacctcaatagcctcatctcttcagactatgagctcctctcagaccccacacctggtgccctggcacctcgtgatgggctgtggaatggtgcccagctctatgcctgccaagaccccacgatcttcgaggagagacacctcaagtacatctcacagctgggcaagggcaactttggcagcgtggagctgtgccgctatgacccgctaggcgacaatacaggtgccctggtggccgtgaaacagctgcagcacagcgggccagaccagcagagggactttcagcgggagattcagatcctcaaagcactgcacagtgatttcattgtcaagtatcgtggtgtcagctatggcccgggccgccagagcctgcggctggtcatggagtacctgcccagcggctgcttgcgcgacttcctgcagcggcaccgcgcgcgcctcgatgccagccgcctccttctctattcctcgcagatctgcaagggcatggagtacctgggctcccgccgctgcgtgcaccgcgacctggccgcccgaaacatcctcgtggagagcgaggcacacgtcaagatcgctgacttcggcctagctaagctgctgccgcttgacaaagactactacgtggtccgcgagccaggccagagccccattttctggtatgcccccgaatccctctcggacaacatcttctctcgccagtcagacgtctggagcttcggggtcgtcctgtacgagctcttcacctactgcgacaaaagctgcagcccctcggccgagttcctgcggatgatgggatgtgagcgggatgtccccgccctctgccgcctcttggaactgctggaggagggccagaggctgccggcgcctcctgcctgccctgctgaggttcacgagctcatgaagctgtgctgggcccctagcccacaggaccggccatcattcagcgccctgggcccccagctggacatgctgtggagcggaagccgggggtgtgagactcatgccttcactgctcacccagagggcaaacaccactccctgtccttttcatagctcctgcccgcagacctctggattaggtctctgttgactggctgtgtgaccttaggcccggagctgcccctctctgggcctcagaggccttatgagggtcctctacttcaggaacacccccatgacattgcatttgggggggctcccgtggcctgtagaatagcctgtggcctttgcaatttgttaaggttcaagacagatgggcatatgtgtcagtggggctctctgagtcctggcccaaagaagcaaggaaccaaatttaagactctcgcatcttcccaaccccttaagccctggccccctgagtttccttttctgtctctctctttttattttttttatttttatttttatttttgagacagagcctcgctctgttacccagggtggagtgcagtggtgcgatctcggctcagtgcaacctctgcttcccaggttcaagcgattctcctgcctcagcctcccgagtagctgggattacaggtgtgcaccaccacacccggctaattttttttatttttaatagagatgaggtttcaccatgatggccaggctgatctcgaactcctaacctcaagtgatcctcccacc

SEQ ID NO: 15023 - DNA, 3612 bp, Homo sapiens
  source 1..3612: mol_type = unassigned DNA
cgagtgggactttcctctcgctgcctcccggctctgcccgcccttcgaaagtccagggtccctgcccgctaggcaagttgcactcatggcacctccaagtgaagagacgcccctgatccctcagcgttcatgcagcctcttgtccacggaggctggtgccctgcatgtgctgctgcccgctcggggccccgggcccccccagcgcctatctttctcctttggggaccacttggctgaggacctgtgcgtgcaggctgccaaggccagcggcatcctgcctgtgtaccactccctctttgctctggccacggaggacctgtcctgctggttccccccgagccacatcttctccgtggaggatgccagcacccaagtcctgctgtacaggattcgcttttacttccccaattggtttgggctggagaagtgccaccgcttcgggctacgcaaggatttggccagtgctatccttgacctgccagtcctggagcacctctttgcccagcaccgcagtgacctggtgagtgggcgcctccccgtgggcctcagtctcaaggagcagggtgagtgtctcagcctggccgtgttggacctggcccggatggcgcgagagcaggcccagcggccgggagagctgctgaagactgtcagctacaaggcctgcctacccccaagcctgcgcgacctgatccagggcctgagcttcgtgacgcggaggcgtattcggaggacggtgcgcagagccctgcgccgcgtggccgcctgccaggcagaccggcactcgctcatggccaagtacatcatggacctggagcggctggatccagccggggccgccgagaccttccacgtgggcctccctggggcccttggtggccacgacgggctggggctgctccgcgtggctggtgacggcggcatcgcctggacccagggagaacaggaggtcctccagcccttctgcgactttccagaaatcgtagacattagcatcaagcaggccccgcgcgttggcccggccggagagcaccgcctggtcactgttaccaggacagacaaccagattttagaggccgagttcccagggctgcccgaggctctgtcgttcgtggcgctcgtggacggctacttccggctgaccacggactcccagcacttcttctgcaaggaggtggcaccgccgaggctgctggaggaagtggccgagcagtgccacggccccatcactctggactttgccatcaacaagctcaagactgggggctcacgtcctggctcctatgttctccgccgcagcccccaggactttgacagcttcctcctcactgtctgtgtccagaacccccttggtcctgattataagggctgcctcatccggcgcagccccacaggaaccttccttctggttggcctcagccgaccccacagcagtcttcgagagctcctggcaacctgctgggatggggggctgcacgtagatggggtggcagtgaccctcacttcctgctgtatccccagacccaaagaaaagtccaacctgatcgtggtccagagaggtcacagcccacccacatcatccttggttcagccccaatcccaataccagctgagtcagatgacatttcacaagatccctgctgacagcctggagtggcatgagaacctgggccatgggtccttcaccaagatttaccggggctgtcgccatgaggtggtggatggggaggcccgaaagacagaggtgctgctgaaggtcatggatgccaagcacaagaactgcatggagtcattcctggaagcagcgagcttgatgagccaagtgtcgtaccggcatctcgtgctgctccacggcgtgtgcatggctggagacagcaccatggtgcaggaatttgtacacctgggggccatagacatgtatctgcgaaaacgtggccacctggtgccagccagctggaagctgcaggtggtcaaacagctggcctacgccctcaactatctggaggacaaaggcctgccccatggcaatgtctctgcccggaaggtgctcctggctcgggagggggctgatgggagcccgcccttcatcaagctgagtgaccctggggtcagccccgctgtgttaagcctggagatgctcaccgacaggatcccctgggtggcccccgagtgtctccgggaggcgcagacacttagcttggaagctgacaagtggggcttcggcgccacggtctgggaagtgtttagtggcgtcaccatgcccatcagtgccctggatcctgctaagaaactccaattttatgaggaccggcagcagctgccggcccccaagtggacagagctggccctgctgattcaacagtgcatggcctatgagccggtccagaggccctccttccgagccgtcattcgtgacctcaatagcctcatctcttcagactatgagctcctctcagaccccacacctggtgccctggcacctcgtgatgggctgtggaatggtgcccagctctatgcctgccaagaccccacgatcttcgaggagagacacctcaagtacatctcacagctgggcaagggcaactttggcagcgtggagctgtgccgctatgacccgctaggcgacaatacaggtgccctggtggccgtgaaacagctgcagcacagcgggccagaccagcagagggactttcagcgggagattcagatcctcaaagcactgcacagtgatttcattgtcaagtatcgtggtgtcagctatggcccgggccgccagagcctgcggctggtcatggagtacctgcccagcggctgcttgcgcgacttcctgcagcggcaccgcgcgcgcctcgatgccagccgcctccttctctattcctcgcagatctgcaagggcatggagtacctgggctcccgccgctgcgtgcaccgcgacctggccgcccgaaacatcctcgtggagagcgaggcacacgtcaagatcgctgacttcggcctagctaagctgctgccgcttgacaaagactactacgtggtccgcgagccaggccagagccccattttctggtatgcccccgaatccctctcggacaacatcttctctcgccagtcagacgtctggagcttcggggtcgtcctgtacgagctcttcacctactgcgacaaaagctgcagcccctcggccgagttcctgcggatgatgggatgtgagcgggatgtccccgccctctgccgcctcttggaactgctggaggagggccagaggctgccggcgcctcctgcctgccctgctgaggtgagcgccgcagggctagcctcagtttcccagtctgtagattgggccggggtctcgggcaagccagctggcgcctgagtctctgtactgagaagaaaggctagagtgtgaggccgatgaggatcctggcccccacttggctactctctcactgtgtggcaagtcagagcactttcagagcctcagtttacccttttccaaaatgagaatagtaatgccttatagggtgagggaagattagactcctgaacacctgtgcctatgagggctcagctcaaagccgagcacacagtcgatgctccataaatggtggtgacgtt

SEQ ID NO: 15024 - DNA, 2855 bp, Homo sapiens
  source 1..2855: mol_type = unassigned DNA
atcttccgggagcgtggctaggggcggagcgactgccgcgcgatagtcagggagctgtgcgggtcctggttgcaagagagtctatttgccagccaaccccagcccgggaggggatcagggccaccaggttgctggtaaggatgaaagactgagtgtgttaagactgttgaagtgagcctgtgtaagagaaggaaggattttgtggattgctacattgtgagtgtggggtgagtcccagaacctcgctatgtcagggaaacggaagcgtgtggtgttgactattaaagataagcttgatataataaagaaacttgaagacggaggttcttccaaacaactggcagtgatttatggaattggtgaaacaacagttcgggatataagaaaaaataaggaaaagattataacttatgcaagcagttctgattccacaagtcttttggccaagaggaaatctatgaagccatccatgtatgaggaattggacagggcaatgctggaatggttcaaccagcaaagagcaaaagggaatcccatatctggaccaatttgtgcaaaaagggcagagttcttcttttatgctttgggaatggatggtgattttaacccctctgccggttggctaactcgttttaagcagcggcacagcattagagagattaacattagaaatgaaagattaaatggagatgagactgcggtggaagatttttgtaataactttcgagattttattgaacgagagaatttacagcctgaacaaatctacaatgcagatgaaactggactcttttggaagtgcttgccttctaggatttcagtaatcaaaggtaaatgcactgtccctgggcacaaatcaattgaagaaagagtcacaatcatgtgttgtgccaatgcaacaggtttacacaaacttaaactttgtgttgtggggaaagcaaagaaacctcgctcctttaaatcaactgacaccttaaacctgccagtctcttatttcagccaaaaaggtgcatggatggatctttccattttccgacaatggtttgataaaatttttgtgccgcaagttcgagagtatttaagatctaaaggcttgcaggaaaaggctgtgctcttgttggataattcaccaacacatccaaatgaaaatgtcctaaggtcagatgatggccaaatatttgctaaatatttaccacctaatgtggcctcattgattcagccttcagatcagggagtcatagcaacgatgaagagaaattatcgtgcaggtcttctccagaacaacttggaagaaggtaatgacctgaaatcattctggaagaagctaactctgttggatgcactttatgaaatagcaatggcatggaacttagtaaaaccagttaccattagcagagcatggaagaagattctccctatggtagaggagaaagagagcctggactttgatgttgaagatatttctgtggctactgtggctgccattttacaacacaccaaaggattggaaaatgtgactactgagaaccttgaaaaatggcttgaagtagacagtactgaaccaggctatgaagtgttaactgatagcgaaatcatcagaagagcacaaggccaggcagatgaatccagtgaaaatgaggaggaggaaatagaactaattccagagaaacatattaatcatgcagctgccctccagtggactgaaaatttattggattatctagaacaacaaggtgatatgattctacctgatagactggtaatacgtaaacttcgagccaccatcagaaataaacagaagatgacaaagtcaagtcaataatgtcatttcaattttattgttctgctcattgtgtttgtgacaaactctttgcaatatggcttaattttctttgtgttctgaattctcagacttggtcctgtgaaatacaggcacaaaatgtatctgaagtggtttgaggattatgtgttttcatcatctgtgtcttttgtccttttatttgtacagataatcagaagatgatactgaatagatataaattacatgtacacatgtattcactttttagaatctgcaattataccttctgtaacagtggcattcccttaattttctagtgaaagttagagataactgaacagactgaagcacttttctgaaatcttttgcttgatttatgaaggctgccatagttatcttttcttgtgttaaccatcttaaatgatgttttgtatattttaatagactgataggatgagaaagatttatattattagatttcaggatgatttataataattcaaaaatgaaattcaataatggggaaataattatgaattatagaaattatgccttcattctcttacatttgtgtgggttgcaagagggggagattattctggaaatgaagtaaatatgggaagttattgccaaatgagagagaaactatgggaaagctgatctataaagaggcattctgatcaattcatttgtaggaaactgggaaataaaaacctggggaactttaggttatttatacaaagggaataaataggctgattttaatttggtaagttgatctttttattatgaatttggtaatagtataggtttattatttattcatctaattttatagtacaggttttgtaatgttacatgtgatgatatgagctcccaccttatatgggggaacatcttgggaatttgagatttaataagtttttttttttttttttttagtgtttttactgcatactcacaaatgttgtctataatttgaaaaatattgtcatatctggccctttgatgagaaaaggaaattacaataataaagttttatgattttaaataa

SEQ ID NO: 15025 - DNA, 3570 bp, Homo sapiens
  source 1..3570: mol_type = unassigned DNA
atcttccgggagcgtggctaggggcggagcgactgccgcgcgatagtcagggagctgtgcgggtcctggttgcaagagaggtggggagaggggcctggcgggttttgagggactgggaggactgtcccggctaaagctggcgcgggaaactggggctgcgcggcgggagggccctgctgctggggaaggaatctaatatatccgttcccctgaggaagggtgccagtccttgactcctaggctcttcggctctctgtcgtaactttggggtgtggcaggggttagtgacgcgcggttacccgggatctggacgtgcaggaggttcgtggccacaatgggggtatagtctttctcacggctgctggggtaataaaacacatgcttttaatccggattatccgcggtgacatggggcctccgctactgcccgtataagttaaagaaaggcctgttctctcaaacttcctcctctttcaccttcttctgcagtctatttgccagccaaccccagcccgggaggggatcagggccaccaggttgctggtaaggatgaaagactgagtgtgttaagactgttgaagtgagcctgtgtaagagaaggaaggattttgtggattgctacattgtgagtgtggggtgagtcccagaacctcgctatgtcagggaaacggaagcgtgtggtgttgactattaaagataagcttgatataataaagaaacttgaagacggaggttcttccaaacaactggcagtgatttatggaattggtgaaacaacagttcgggatataagaaaaaataaggaaaagattataacttatgcaagcagttctgattccacaagtcttttggccaagaggaaatctatgaagccatccatgtatgaggaattggacagggcaatgctggaatggttcaaccagcaaagagcaaaagggaatcccatatctggaccaatttgtgcaaaaagggcagagttcttcttttatgctttgggaatggatggtgattttaacccctctgccggttggctaactcgttttaagcagcggcacagcattagagagattaacattagaaatgaaagattaaatggagatgagactgcggtggaagatttttgtaataactttcgagattttattgaacgagagaatttacagcctgaacaaatctacaatgcagatgaaactggactcttttggaagtgcttgccttctaggatttcagtaatcaaaggtaaatgcactgtccctgggcacaaatcaattgaagaaagagtcacaatcatgtgttgtgccaatgcaacaggtttacacaaacttaaactttgtgttgtggggaaagcaaagaaacctcgctcctttaaatcaactgacaccttaaacctgccagtctcttatttcagccaaaaaggtgcatggatggatctttccattttccgacaatggtttgataaaatttttgtgccgcaagttcgagagtatttaagatctaaaggcttgcaggaaaaggctgtgctcttgttggataattcaccaacacatccaaatgaaaatgtcctaaggtcagatgatggccaaatatttgctaaatatttaccacctaatgtggcctcattgattcagccttcagatcagggagtcatagcaacgatgaagagaaattatcgtgcaggtcttctccagaacaacttggaagaaggtaatgacctgaaatcattctggaagaagctaactctgttggatgcactttatgaaatagcaatggcatggaacttagtaaaaccagttaccattagcagagcatggaagaagattctccctatggtagaggagaaagagagcctggactttgatgttgaagatatttctgtggctactgtggctgccattttacaacacaccaaaggattggaaaatgtgactactgagaaccttgaaaaatggcttgaagtagacagtactgaaccaggctatgaagtgttaactgatagcgaaatcatcagaagagcacaaggccaggcagatgaatccagtgaaaatgaggaggaggaaatagaactaattccagagaaacatattaatcatgcagctgccctccagtggactgaaaatttattggattatctagaacaacaaggtgatatgattctacctgatagactggtaatacgtaaacttcgagccaccatcagaaataaacagaagatgacaaagtcaagtcaataatgtcatttcaattttattgttctgctcattgtgtttgtgacaaactctttgcaatatggcttaattttctttgtgttctgaattctcagacttggtcctgtgaaatacaggcacaaaatgtatctgaagtggtttgaggattatgtgttttcatcatctgtgtcttttgtccttttatttgtacagataatcagaagatgatactgaatagatataaattacatgtacacatgtattcactttttagaatctgcaattataccttctgtaacagtggcattcccttaattttctagtgaaagttagagataactgaacagactgaagcacttttctgaaatcttttgcttgatttatgaaggctgccatagttatcttttcttgtgttaaccatcttaaatgatgttttgtatattttaatagactgataggatgagaaagatttatattattagatttcaggatgatttataataattcaaaaatgaaattcaataatggggaaataattatgaattatagaaattatgccttcattctcttacatttgtgtgggttgcaagagggggagattattctggaaatgaagtaaatatgggaagttattgccaaatgagagagaaactatgggaaagctgatctataaagaggcattctgatcaattcatttgtaggaaactgggaaataaaaacctggggaactttaggttatttatacaaagggaataaataggctgattttaatttggtaagttgatctttttattatgaatttggtaatagtataggtttattatttattcatctaattttatagtacaggttttgtaatgttacatgtgatgatatgagctcccaccttatatgggggaacatcttgggaatttgagatttaataagtttttttttttttttttttagtgtttttactgcatactcacaaatgttgtctataatttgaaaaatattgtcatatctggccctttgatgagaaaaggaaattacaataataaagttttatgattttaaataagtcatatgtttgtatcctgttttatgaagaaagcagaaataattactgaaagtgccagacactaaggaatattattgtttattattttaatacatataaaaagggattaatctgctaaaatgtaatctaaatcagaattttgataaattttttttgtaaactaagtatgtttattcaagacattgaaactactttgcacatatgaatattaatgtaacttgtaatttaaaagtaaagtgtttccatgctatttcatgttttggccaaaaatttttaaaaaataaattacaattgttctctattagt

SEQ ID NO: 15026 - DNA, 2462 bp, Homo sapiens
  source 1..2462: mol_type = unassigned DNA
gtcgtgatcagacgagcggtgagcgatcgatactcctatgctagcctctggctcctcaggggacacagccgagtggtcggaccaaacgcaacgagtcttcgccagcccaaaggcgactcgacaccgtcccagctgaagagaggcacgggactgaaccagctggtggtggcccgatggctggagacacccactgccccgcagagcccctggccagagaaggcactttatgggaggccctcagggcgctcctgccgcacagtaaagaagacctgaagttggacctcggggagaaagtggagaggagcgtggtgacattgttgcagcgagccactgagctcttctacgagggcaggagggacgagtgtctgcagagcagcgaggtgatcctggactactcctgggagaagctcaacacgggcacatggcaggacgtagacaaagactggcgccgggtctacgccatcggctgcctcctgaaagccctgtgtctgtgccaggcacctgaggatgccaacactgtggccgcagccctgcgggtctgtgacatgggcctgctgatgggggcagccatcctgggggacatccttcttaaagtcgctgccatcctccagacacacctccctggaaagaggcctgcccgtggctccctcccagagcaaccctgcacaaagaaagcaagggcggaccatggtttgattccagatgtgaagttagaaaaaacagtcccccggctgcaccgtccgtccctccagcatttcagggagcagtttttggttccagggaggcccgtgatcctgaaaggcgtggctgaccactggccgtgcatgcagaagtggagtttggagtatatccaggagatcgctggctgccgaactgtcccagtggaagttggttcgaggtacacagatgaggaatggtcccagaccctcatgacggtcaacgagttcatcagcaaatacatcgtgaatgagccaagggacgtcgggtaccttgctcagcaccagctctttgaccagatcccggagttgaagcaggacatcagcatccccgactactgcagcctgggcgatggggaggaggaggaaatcaccatcaatgcctggtttggtccccagggaaccatctccccactacatcaggatccccagcaaaacttcctagtgcaggtgatggggaggaagtacatccggctgtattccccgcaggagtcaggggctctgtaccctcatgacacgcaccttctccataacacgagccaggttgacgtggagaatcccgacctggaaaagttccccaagtttgccaaggccccattcctgtcctgcatcctgtctcctggagagatcctgttcatcccggtgaaatactggcattacgtgcgggctctggatttgagcttctcggtcagcttctggtggtcgtagccaggataggagctgaaagggcctgacatgcagacagcattcatctgttcactaatttcctgggtcctggaatctatagagacaagcaggactgaacctgtgtcctgaagagccttcactgcccagtggcagccctggggggctgagctccagcactggacaggcacagagcaggggctgcccaggaaggagcacactccaggccaggggtgcatggcagaggaaggtggggagagcccagaaggacattgcagacagacagcctgcatggggactctggcatcagaaagccgaatgtttttgggaaacgggtgggtcacacaggcaggggtgaaacatgggctctgaggttggctacctgattcaaacccggccgcgctgtgcacctgctgggtgacttggccaggatcccccacttcgctgtgcccatatggaaaagagggcaaggccagtcctcactgccgagggccgagaaggcggtgccgagcccctgctgctgcatgaaccttagccgctgtcactgatcccaattactctgatccttttgcccttccttcccataacggcctgctggacgccacagcctgaatactggagagagctgggcattgcccaggtcacaggagagagtccgtagagacctgcgcaggagccgggacccctgctgagcagtgggagctttctgtcatccccatggctcaaggataacctacctgcctgcagagaagtgcgaaggtcttgctggatgacttttcacccgcactcacccaggagcaggctcccaagtgaagaaaccaccgaaccatcaccagctcctagaagcctccctcctaccaccttctagtcaccatcccccagaagtaatgactctcaaacctgggggatttgaggccagggggagagccaggctctatgctttctgtaattgtgtctcgtttgtgtgcacgcaggtttgttttatgttttggccattaagattttccccagccctctgttttttgttttttaaactaaatagagatgggatcttgctatgtt

SEQ ID NO: 15027 - DNA, 1883 bp, Homo sapiens
  source 1..1883: mol_type = unassigned DNA
aggcactgcgtcgtgatcagacgagcggtgagcgatcgatactcctatgctagcctctggctcctcaggggacacagccgagtggtcggaccaaacgcaacgagtcttcgccagcccaaaggcgactcgacaccgtcccagctgaagagaggcacgggactgaaccagctggtggtggcccgatggctggagacacccactgccccgcagagcccctggccagagaaggcactttatgggaggccctcagggcgctcctgccgcacagtaaagaagacctgaagttggacctcggggagaaagtggagaggagcgtggtgacattgttgcagcgagccactgagctcttctacgagggcaggagggacgagtgtctgcagagcagcgaggtgatcctggactactcctgggagaagctcaacacgggcacatggcaggacgtagacaaagactggcgccgggtctacgccatcggctgcctcctgaaagccctgtgtctgtgccaggcacctgaggatgccaacactgtggccgcagccctgcgggtctgtgacatgggcctgctgatgggggcagccatcctgggggacatccttcttaaagtcgctgccatcctccagacacacctccctggaaagaggcctgcccgtggctccctcccagagcaaccctgcacaaaggttgacgtggagaatcccgacctggaaaagttccccaagtttgccaaggccccattcctgtcctgcatcctgtctcctggagagatcctgttcatcccggtgaaatactggcattacgtgcgggctctggatttgagcttctcggtcagcttctggtggtcgtagccaggataggagctgaaagggcctgacatgcagacagcattcatctgttcactaatttcctgggtcctggaatctatagagacaagcaggactgaacctgtgtcctgaagagccttcactgcccagtggcagccctggggggctgagctccagcactggacaggcacagagcaggggctgcccaggaaggagcacactccaggccaggggtgcatggcagaggaaggtggggagagcccagaaggacattgcagacagacagcctgcatggggactctggcatcagaaagccgaatgtttttgggaaacgggtgggtcacacaggcaggggtgaaacatgggctctgaggttggctacctgattcaaacccggccgcgctgtgcacctgctgggtgacttggccaggatcccccacttcgctgtgcccatatggaaaagagggcaaggccagtcctcactgccgagggccgagaaggcggtgccgagcccctgctgctgcatgaaccttagccgctgtcactgatcccaattactctgatccttttgcccttccttcccataacggcctgctggacgccacagcctgaatactggagagagctgggcattgcccaggtcacaggagagagtccgtagagacctgcgcaggagccgggacccctgctgagcagtgggagctttctgtcatccccatggctcaaggataacctacctgcctgcagagaagtgcgaaggtcttgctggatgacttttcacccgcactcacccaggagcaggctcccaagtgaagaaaccaccgaaccatcaccagctcctagaagcctccctcctaccaccttctagtcaccatcccccagaagtaatgactctcaaacctgggggatttgaggccagggggagagccaggctctatgctttctgtaattgtgtctcgtttgtgtgcacgcaggtttgttttatgttttggccattaagattttccccagccctctgttttttgttttttaaactaaatagagatgggatcttgctatgtt

SEQ ID NO: 15028 - DNA, 2521 bp, Homo sapiens
  source 1..2521: mol_type = unassigned DNA
agtgcgcctgcgcgggttttatactctgctatatgtgtgtccgctgcttttaggcaaccagccgctgcccctgggccgcaaggcaggctggaaacgattccgccgtcaggtcccaaatatgagccgcgagaaatgcagccccggggaaggcgctgaggagggaagggggtctgaggcctcggggctcaaggccagtgcggggcacgggactgaaccagctggtggtggcccgatggctggagacacccactgccccgcagagcccctggccagagaaggcactttatgggaggccctcagggcgctcctgccgcacagtaaagaagacctgaagttggacctcggggagaaagtggagaggagcgtggtgacattgttgcagcgagccactgagctcttctacgagggcaggagggacgagtgtctgcagagcagcgaggtgatcctggactactcctgggagaagctcaacacgggcacatggcaggacgtagacaaagactggcgccgggtctacgccatcggctgcctcctgaaagccctgtgtctgtgccaggcacctgaggatgccaacactgtggccgcagccctgcgggtctgtgacatgggcctgctgatgggggcagccatcctgggggacatccttcttaaagtcgctgccatcctccagacacacctccctggaaagaggcctgcccgtggctccctcccagagcaaccctgcacaaagaaagcaagggcggaccatggtttgattccagatgtgaagttagaaaaaacagtcccccggctgcaccgtccgtccctccagcatttcagggagcagtttttggttccagggaggcccgtgatcctgaaaggcgtggctgaccactggccgtgcatgcagaagtggagtttggagtatatccaggagatcgctggctgccgaactgtcccagtggaagttggttcgaggtacacagatgaggaatggtcccagaccctcatgacggtcaacgagttcatcagcaaatacatcgtgaatgagccaagggacgtcgggtaccttgctcagcaccagctctttgaccagatcccggagttgaagcaggacatcagcatccccgactactgcagcctgggcgatggggaggaggaggaaatcaccatcaatgcctggtttggtccccagggaaccatctccccactacatcaggatccccagcaaaacttcctagtgcaggtgatggggaggaagtacatccggctgtattccccgcaggagtcaggggctctgtaccctcatgacacgcaccttctccataacacgagccaggttgacgtggagaatcccgacctggaaaagttccccaagtttgccaaggccccattcctgtcctgcatcctgtctcctggagagatcctgttcatcccggtgaaatactggcattacgtgcgggctctggatttgagcttctcggtcagcttctggtggtcgtagccaggataggagctgaaagggcctgacatgcagacagcattcatctgttcactaatttcctgggtcctggaatctatagagacaagcaggactgaacctgtgtcctgaagagccttcactgcccagtggcagccctggggggctgagctccagcactggacaggcacagagcaggggctgcccaggaaggagcacactccaggccaggggtgcatggcagaggaaggtggggagagcccagaaggacattgcagacagacagcctgcatggggactctggcatcagaaagccgaatgtttttgggaaacgggtgggtcacacaggcaggggtgaaacatgggctctgaggttggctacctgattcaaacccggccgcgctgtgcacctgctgggtgacttggccaggatcccccacttcgctgtgcccatatggaaaagagggcaaggccagtcctcactgccgagggccgagaaggcggtgccgagcccctgctgctgcatgaaccttagccgctgtcactgatcccaattactctgatccttttgcccttccttcccataacggcctgctggacgccacagcctgaatactggagagagctgggcattgcccaggtcacaggagagagtccgtagagacctgcgcaggagccgggacccctgctgagcagtgggagctttctgtcatccccatggctcaaggataacctacctgcctgcagagaagtgcgaaggtcttgctggatgacttttcacccgcactcacccaggagcaggctcccaagtgaagaaaccaccgaaccatcaccagctcctagaagcctccctcctaccaccttctagtcaccatcccccagaagtaatgactctcaaacctgggggatttgaggccagggggagagccaggctctatgctttctgtaattgtgtctcgtttgtgtgcacgcaggtttgttttatgttttggccattaagattttccccagccctctgttttttgttttttaaactaaatagagatgggatcttgctatgtt

SEQ ID NO: 15029 - DNA, 1447 bp, Homo sapiens
  source 1..1447: mol_type = unassigned DNA
aactgtcccagtggaagttggttcgaggtacacagatgaggaatggtcccagaccctcatgacggtcaacgagttcatcagcaaatacatcgtgaatgagccaagggacgtcgggtaccttgctcagcaccagctctttgaccagatcccggagttgaagcaggacatcagcatccccgactactgcagcctgggcgatggggaggaggaggaaatcaccatcaatgcctggtttggtccccagggaaccatctccccactacatcaggatccccagcaaaacttcctagtgcaggtgatggggaggaagtacatccggctgtattccccgcaggagtcaggggctctgtaccctcatgacacgcaccttctccataacacgagccaggttgacgtggagaatcccgacctggaaaagttccccaagtttgccaaggccccattcctgtcctgcatcctgtctcctggagagatcctgttcatcccggtgaaatactgacatgcagacagcattcatctgttcactaatttcctgggtcctggaatctatagagacaagcaggactgaacctgtgtcctgaagagccttcactgcccagtggcagccctggggggctgagctccagcactggacaggcacagagcaggggctgcccaggaaggagcacactccaggccaggggtgcatggcagaggaaggtggggagagcccagaaggacattgcagacagacagcctgcatggggactctggcatcagaaagccgaatgtttttgggaaacgggtgggtcacacaggcaggggtgaaacatgggctctgaggttggctacctgattcaaacccggccgcgctgtgcacctgctgggtgacttggccaggatcccccacttcgctgtgcccatatggaaaagagggcaaggccagtcctcactgccgagggccgagaaggcggtgccgagcccctgctgctgcatgaaccttagccgctgtcactgatcccaattactctgatccttttgcccttccttcccataacggcctgctggacgccacagcctgaatactggagagagctgggcattgcccaggtcacaggagagagtccgtagagacctgcgcaggagccgggacccctgctgagcagtgggagctttctgtcatccccatggctcaaggataacctacctgcctgcagagaagtgcgaaggtcttgctggatgacttttcacccgcactcacccaggagcaggctcccaagtgaagaaaccaccgaaccatcaccagctcctagaagcctccctcctaccaccttctagtcaccatcccccagaagtaatgactctcaaacctgggggatttgaggccagggggagagccaggctctatgctttctgtaattgtgtctcgtttgtgtgcacgcaggtttgttttatgttttggccatta

SEQ ID NO: 15030 - DNA, 1220 bp, Homo sapiens
  source 1..1220: mol_type = unassigned DNA
gggtactgccgtcgccgccgcccaggccggggaggggtgcgttagtgtcaggaagcgggctgcgccgaggtcgtagcggaaccagctggcgaccccgcagaatgaaccacaagagcaagaagcgcatccgcgaggccaagcggagtgcgcggccggagctcaaggactcgctggattggacccggcacaactactacgagagcttctcgctgagcccggcggccgtggcggataacgtggaaagggcagatgctttacagctgtctgtggaagaatttgtggagcggtatgaaagaccttacaagcccgtggttttgttgaatgcgcaagagggctggtctgcgcaggagaaatggactctggagcgcctaaaaaggaaatatcggaaccagaagttcaagtgtggtgaggataacgatggctactcagtgaagatgaagatgaaatactacatcgagtacatggagagcactcgagatgatagtcccctttacatctttgacagcagctatggtgaacaccctaaaagaaggaaacttttggaagactacaaggtgccaaagtttttcactgatgaccttttccagtatgctggggagaagcgcaggcccccttacaggtggtttgtgatggggccaccacgctccggaactgggattcacatcgaccctctgggaaccagtgcctggaatgccttagttcagggccacaagcgctggtgcctgtttcctaccagcactcccagggaactcatcaaagtgacccgagacgaaggagggaaccagcaagacgaagctattacctggtttaatgttatttatccccggacacagcttccaacctggccacctgaattcaaacccctggaaatcttacaaaaaccaggagagactgtctttgtaccaggaggctggtggcatgttgtcctcaatctcgacactactatcgccatcacccaaaattttgccagcagcaccaacttccctgtggtatggcacaagacggtaagagggagaccaaagttatcaaggaaatggtataggattttgaagcaagagcaccccgagttggcagtcctcgcagactcggttgaccttcaggagtccacagggatagcttccgacagctccagcgactcttccagctcctccagctccagttcgtcagactccgactcagagaggattagggacacttgtggaggccgggctcacccctga

SEQ ID NO: 15031 - DNA, 1603 bp, Homo sapiens
  source 1..1603: mol_type = unassigned DNA
agcgaagggcgtttgggtactgccgtcgccgccgcccaggccggggaggggtgcgttagtgtcaggaagcgggctgcgccgaggtcgtagcggaaccagctggcgaccccgcagaatgaaccacaagagcaagaagcgcatccgcgaggccaagcggagtgcgcggccggagctcaaggactcgctggattggacccggcacaactactacgagagcttctcgctgagcccggcggccgtggcggataacgtggaaagggcagatgctttacagctgtctgtggaagaatttgtggagcggtatgaaagaccttacaagcccgtggttttgttgaatgcgcaagagggctggtctgcgcaggagaaatggactctggagcgcctaaaaaggaaatatcggaaccagaagttcaagtgtggtgaggataacgatggctactcagtgaagatgaagatgaaatactacatcgagtacatggagagcactcgagatgatagtcccctttacatctttgacagcagctatggtgaacaccctaaaagaaggaaacttttggaagactacaaggtgccaaagtttttcactgatgaccttttccagtatgctggggagaagcgcaggcccccttacaggtggtttgtgatggggccaccacgctccggaactgggattcacatcgaccctctgggaaccagtgcctggaatgccttagttcagggccacaagcgctggtgcctgtttcctaccagcactcccagggaactcatcaaagtgacccgagacgaaggagggaaccagcaagacgaagctattacctggtttaatgttatttatccccggacacagcttccaacctggccacctgaattcaaacccctggaaatcttacaaaaaccaggagagactgtctttgtaccaggaggctggtggcatgttgtcctcaatctcgacactactatcgccatcacccaaaattttgccagcagcaccaacttccctgtggtatggcacaagacggtaagagggagaccaaagttatcaaggaaatggtataggattttgaagcaagagcaccccgagttggcagtcctcgcagactcggttgaccttcaggagtccacagggatagcttccgacagctccagcgactcttccagctcctccagctccagttcgtcagactccgactcagagtgcgagtctggatccgagggcgatgggacagtgcaccgcaggaagaagaggaggacgtgcagcatggtgggaaacggggacaccacctcccaggacgactgtgtcagcaaagagcgcagctcctccaggtgacccagcaaggctgttgtctgtatggaaggacacgctcgcggcaagggcagggcctggggagggtggcctgtccagtcctgcagacaaggggaggcctgacagagcccaagaatgaggacaccctcggcacgggaacccattcacttagcgtttgctccagtagctttccctctgctaccaatgcagataaacgcggcttgttttactcaggcaagagaatgtgaatagtgccaagaaaatcctttacattatttaataaaaattgaatccattttc

SEQ ID NO: 15032 - DNA, 5298 bp, Homo sapiens
  source 1..5298: mol_type = unassigned DNA
gaagacggcggccgcttgcccaacccgaggctcgggaggtggctggggagtgaattttctggaaggcgactttaaaggcgccgggactgagcgaagggcgtttgggtactgccgtcgccgccgcccaggccggggaggggtgcgttagtgtcaggaagcgggctgcgccgaggtcgtagcggaaccagctggcgaccccgcagaatgaaccacaagagcaagaagcgcatccgcgaggccaagcggagtgcgcggccggagctcaaggactcgctggattggacccggcacaactactacgagagcttctcgctgagcccggcggccgtggcggataacgtggaaagggcagatgctttacagctgtctgtggaagaatttgtggagcggtatgaaagaccttacaagcccgtggttttgttgaatgcgcaagagggctggtctgcgcaggagaaatggactctggagcgcctaaaaaggaaatatcggaaccagaagttcaagtgtggtgaggataacgatggctactcagtgaagatgaagatgaaatactacatcgagtacatggagagcactcgagatgatagtcccctttacatctttgacagcagctatggtgaacaccctaaaagaaggaaacttttggaagactacaaggtgccaaagtttttcactgatgaccttttccagtatgctggggagaagcgcaggcccccttacaggtggtttgtgatggggccaccacgctccggaactgggattcacatcgaccctctgggaaccagtgcctggaatgccttagttcagggccacaagcgctggtgcctgtttcctaccagcactcccagggaactcatcaaagtgacccgagacgaaggagggaaccagcaagacgaagctattacctggtttaatgttatttatccccggacacagcttccaacctggccacctgaattcaaacccctggaaatcttacaaaaaccaggagagactgtctttgtaccaggaggctggtggcatgttgtcctcaatctcgacactactatcgccatcacccaaaattttgccagcagcaccaacttccctgtggtatggcacaagacggtaagagggagaccaaagttatcaaggaaatggtataggattttgaagcaagagcaccccgagttggcagtcctcgcagactcggttgaccttcaggagtccacagggatagcttccgacagctccagcgactcttccagctcctccagctccagttcgtcagactccgactcagagtgcgagtctggatccgagggcgatgggacagtgcaccgcaggaagaagaggaggacgtgcagcatggtgggaaacggggacaccacctcccaggacgactgtgtcagcaaagagcgcagctcctccaggattagggacacttgtggaggccgggctcacccctgagcagataaagagactctccctgaggtgctttcagcgtaagcttttggcagccacccaactcagttctcgcatcttctgctcctaccttctcctctgtcttctttgaatttggatattccttccctggtccaagctcctatcttcggtcaaatgctgtttttactgcttcctaaggatagattatcaagaaatttaacagctcggccagctcagtgaaacactgaagctaatgggatgttgggtaagaaggttctgtgctgtctcattgaaaaccgagccagtcaaccacaaggctggcagggtgtgatccttgtaacgtcttgtgtctgttacctcacggatgtcggtaaggagtttccacagagccagctgtgtaccacagagactgagagtggtgagtggactttgtgagccaattatgtgtcggaaggacttggagtctgcccttcttcctgtatgtcatcatcagcccacaaatgcattcagtggcagtgacccagcaccatcaccatcacccactgctcagtctgtcttaggattccttatctttttctccatcatcatagagactgaaatttcaggggtgtttttgtacagtgtatttttttgtgggggggtgatacattggggttttttgtttgcatagagtgggaacggtgtgcaatgtgctcttaccacagaacttaaagtatgaataggctccattcttccgcaccatgggatccataagaagtgctcactttgcgaggtactctgagattagcgttccccatttgtttgacctacagacgttaagtgggtgacttgtgttacacacggggagtaaattcagagatggcacctgtagtctttgcagtctgttgatacttctaaataactaactggatgactttttggggattgaccagcagatgccatctcttgccctcttgattcacctgcttgccttaatttgtccctaaattcaactaaacttcaataagaggggttgtcaaggccatggggcgcacttggaagcactgcctgggctggagcgttggaggcattggcaggcaggtgggaaggagctctcactgcagtgttcacaggcagggaggctgtgtgtggatgtgttagaattgtgtgctgttgcctctcaaaatatccactagaaacaggtgtaaccaggaaaatacaggtctctgctcactgttattaacagactgtcatttcctgacattgggtcatgtggctttactctaggaggctggttctctatttttgtcttagttcaattttctgcatcctcaaatgccaaccccagtatgtggctgggtaggtagaactgtgctgcctgcctgccatgggggctgctctccctccttacccccacgcccacagcccccttggttctgtggtgggcacaggatgtgtttgggtgtgagtaaagtcaaactctgaatgtataatctcttggtagtaatatctgagtggtgttgctactcctgctttttaaaaagacttttcttgccatctataaaaagcttttttctttttcccagcattgctcctgtgctgccacgcttgccctttttccttaccttcctttcagttttctatcaacaactcctctaaacttcagtttaaaataaaaaacagcccaaaaaggctctttgccaccagggggcgtggtaggacacgttgccagtggtctggataggggagcagaaattttgaattttaaaaattagccaccaaggccaggtgcagtggctcacacctgtaatcccagcactttgggaagctgaggcagggggattgcttgagtccaggagttcaagaccagtctgggcaacatagtgagatcccatctctcaaaaaaataataatctagaaaataaagattagccacccagttttctttctccagatgctaaagttgattcctgtttgataacagtattccagaaatgaggggaataacatatctgataggcccaagtcagctctggatagtacagtgtctggatagtacagattctgtgctcctgggacatgctttgtttattcctgccaggccagggattcagcagccctattccccaacccccgttactgtctctgtgggctagccaggctgtccgttatgtaagcacaacaggggcaaggtggggaaaccgtgtgtggaaaaggagtggagtggtggcgggtggccaaggtagactaggaagagtgggtacccagagaccacttgttcagaagttaactcctcttcccatctggcgtgagctactccattgaatggtgccaacaacagtaaagtgaaggagataatgttagattattttcagggatgattctccaagatgacagcagatcttaaaaccaaagagctgggtcctggaagaagggatcttggattattaacttctgatggaaggaccagagtgggagagagaagagttggggacctagaacatcaggaggaccctgggtctttggggatgaggcttcaccatcagctggaagaatccatgcttcacacacatgcctctgccattagtggtactgggatgtttagggtgacatccttgaggggagagccactgaaaagagggacattcacattttgctgtattcttgcagctgtccgtgtcttaataattcaagcgttcaataggtgtttgagggccaggcactgctcttgaggtgctggagataacggtgacaagcccaggtccctgacaagctccacaagcttaatggacagtgaatgtgcggctgttgcggctgttcacagggccgctggtgagggcaggtagaagaaagtgcagaccttcttaaatgcaggtgtaacggatctacatgaaagagcataattaacaccaatgtatacttaaggtagtaacagcttcttcataaagtagcaaaactaaggatctgtgggaaggttgctggtgcaaatgctttataagcttactagagactgagccttggatttaggactttagacgagtataggatggaacaaaatttttgcagtaaatgtaaaaaatgctgtgtaggaggaaggcgtataaggatgccccagctgtaggttctttagattgtctgtagtatttccacgagtaagttgtttttgatgtgtgtactggtattgctggtagatttgaagtggagtctggcggcttcttccacactcccctcccactagcttgtgtcaagatgtgacatcctatgcagcaaaactaggtgagcttgcacccccaggcggtggctctcaactttgtctcattgttcagaaatttcggccaggcgccgtagctcacccctgtaatcccagcactttgggaggccatggcaggtggatcacttgaggtcaggagttcaagaccagcctggccaacacggtgaaaccccgtctctactaaaaatacaaaaattagccaggtgtggtggcacatgcctgtagtcccagctacttggtcaactcaggcaggagaatcacttgaacccaggaggcagaggttgcagtgagctgagatcaagccactccagcctgggtgacagaccgagactctgtctttaaaaaaaaagaaatgtcatctaagccccagtgaacctcctgggaggagagctagccctggccagctgtctccaaagtgactggatgctacagaagaactgggactgtcttctgcacactcgtgcctcctggagttgtcagaacactgagcagtctcctagttctgcgtccgtctagccatggggtctgccatgaaagcctgtggatctgctattgggttggtattttaaactttcacttgggtgaaacttgttcatcattttaaataaagcaacatgatttgg

SEQ ID NO: 15033 - DNA, 1287 bp, Homo sapiens
  source 1..1287: mol_type = unassigned DNA
gcaggcgaggcgccaccgacgcggaagactataagccccagcgggcgacgaccgaacgcccccgggaacaccgggccccgagctcggtcccgcgcccgaggatcctccacggggctagatggctgcgtcgggggcgggagcggaggtgagcgggcgctagggccgcgagcccccgccggcccttcctccagcgccctgcggaccccgcagaaggcgctcgcctccctagcccgcaaaaacatatcgatttttctcgctgtggcaacggggacgtcctgatagatcctctgctccaataggcaactccggccttccctgccctgacctggaacctctgggagggctgcagagtaagtgccgcctctgcgctccgacggaggcacgaggcctgtggagtaggtccctctgttccgacaggtgcgacacttggcgctccatgcttgcgggtgccgggaggcctggcctcccccagggccgccacctctgctggttgctctgtgctttcaccttaaagctctgccaagcagaggctcccgtgcaggaagagaagctgtcagcaagcacctcaaatttgccatgctggctggtggaagagtttgtggtagcagaagagtgctctccatgctctaatttccgggctaaaactacccctgagtgtggtcccacaggatatgtagagaaaatcacatgcagctcatctaagagaaatgagttcaaaagctgccgctcagctttgatggaacaacgcttattttggaagttcgaaggggctgtcgtgtgtgtggccctgatcttcgcttgtcttgtcatcattcgtcagcgacaattggacagaaaggctctggaaaaggtccggaagcaaatcgagtccatatagctacattccacccttgtatcctgggtcttagagaccctatctcagacagtgaaagtgaaatggactgatttgcactcttggttctttggagccttgtggtggaatccccttttccccatcttcttctttcagatcattaatgagcagaataaaaagagtaaaatggtttccttcccttctgtaacttggagcaggaagtcatgggggcagagagggaaaggaggtggttacttaaggccccaatctaccaagtcttccccaccacttctcccttgttttccccctcttctactacttatttcaaacttctgggatacaatttcagctaaaacgtttatttctcactcaaaacttatttcccctcaaccctatacccaaagaagaaataaaatcacagatacataacagaa

SEQ ID NO: 15034 - DNA, 1040 bp, Homo sapiens
  source 1..1040: mol_type = unassigned DNA
accgaacgcccccgggaacaccgggccccgagctcggtcccgcgcccgaggatcctccacggggctagatggctgcgtcgggggcgggagcggaggcaactccggccttccctgccctgacctggaacctctgggagggctgcagagtaagtgccgcctctgcgctccgacggaggcacgaggcctgtggagtaggtccctctgttccgacaggtgcgacacttggcgctccatgcttgcgggtgccgggaggcctggcctcccccagggccgccacctctgctggttgctctgtgctttcaccttaaagctctgccaagcagaggctcccgtgcaggaagagaagctgtcaggtgggtgattgtctgggaacccgacacgtcccgtcgtttgtttttggttttagtatcttccccatataccaagagcacaggtggaaaaggccggcaccacatggaatgagggcaagcgctgtgccgggaagttggatgggcagagcctgggagaaatgttttctgaatggcctggggctggcatttatctttcctttcagcaagcacctcaaatttgccatgctggctggtggaagagtttgtggtagcagaagagtgctctccatgctctaatttccgggctaaaactacccctgagtgtggtcccacaggatatgtagagaaaatcacatgcagctcatctaagagaaatgagttcaaaagctgccgctcagctttgatggaacaacgcttattttggaagttcgaaggggctgtcgtgtgtgtggccctgatcttcgcttgtcttgtcatcattcgtcagcgacaattggacagaaaggctctggaaaaggtccggaagcaaatcgagtccatatagctacattccacccttgtatcctgggtcttagagaccctatctcagacagtgaaagtgaaatggactgatttgcactcttggttctttggagccttgtggtggaatccccttttccccatcttcttctttcagatcattaatgagcagaataaaaagagtaaaatggt

SEQ ID NO: 15035 - DNA, 1216 bp, Homo sapiens
  source 1..1216: mol_type = unassigned DNA
ctataagccccagcgggcgacgaccgaacgcccccgggaacaccgggccccgagctcggtcccgcgcccgaggatcctccacggggctagatggctgcgtcgggggcgggagcggaggtgagcgggcgctagggccgcgagcccccgccggcccttcctccagcgccctgcggaccccgcagaaggcgctcgcctccctagcccgcaaaaacatatcgatttttctcgctgtggcaacggggacgtcctgatagatcctctgctccaataggcaactccggccttccctgccctgacctggaacctctgggagggctgcagagtaagtgccgcctctgcgctccgacggaggcacgaggcctgtggagtaggtccctctgttccgacaggtgcgacacttggcgctccatgcttgcgggtgccgggaggcctggcctcccccagggccgccacctctgctggttgctctgtgctttcaccttaaagctctgccaagcagaggctcccgtgcaggaagagaagctgtcaggtgggtgattgtctgggaacccgacacgtcccgtcgtttgtttttggttttagtatcttccccatataccaagagcacaggtggaaaaggccggcaccacatggaatgagggcaagcgctgtgccgggaagttggatgggcagagcctgggagaaatgttttctgaatggcctggggctggcatttatctttcctttcagcaagcacctcaaatttgccatgctggctggtggaagagtttgtggtagcagaagagtgctctccatgctctaatttccgggctaaaactacccctgagtgtggtcccacaggatatgtagagaaaatcacatgcagctcatctaagagaaatgagttcaaaagctgccgctcagctttgatggaacaacgcttattttggaagttcgaaggggctgtcgtgtgtgtggccctgatcttcgcttgtcttgtcatcattcgtcagcgacaattggacagaaaggctctggaaaaggtccggaagcaaatcgagtccatatagctacattccacccttgtatcctgggtcttagagaccctatctcagacagtgaaagtgaaatggactgatttgcactcttggttctttggagccttgtggtggaatccccttttccccatcttcttctttcagatcattaatgagcagaataaaaagagtaaaatggt

SEQ ID NO: 15036 - DNA, 520 bp, Homo sapiens
  source 1..520: mol_type = unassigned DNA
aataggcaactccggccttccctgccctgacctggaacctctgggagggctgcagatatcttccccatataccaagagcacaggtggaaaaggccggcaccacatggaatgagggcaagcgctgtgccgggaagttggatgggcagagcctgggagaaatgttttctgaatggcctggggctggcatttatctttcctttcagcaagcacctcaaatttgccatgctggctggtggaagagtttgtggtagcagaagagtgctctccatgctctaatttccgggctaaaactacccctgagtgtggtcccacaggatatgtagagaaaatcacatgcagctcatctaagagaaatgagttcaaaagctgccgctcagctttgatggaacaacgcttattttggaagttcgaaggggctgtcgtgtgtgtggccctgatcttcgcttgtcttgtcatcattcgtcagcgacaattggacagaaaggctctggaaaaggtccggaagcaaatcgagtccata

SEQ ID NO: 15037 - DNA, 1870 bp, Homo sapiens
  source 1..1870: mol_type = unassigned DNA
aggagccgccgccagtggagggccgggcgctgcggccgcggccggggcgggcgcagggccgagcggacgggggggcgcgggccccccgggaggccgcggccactcccccccgggccggcgcggcgggggaggcggaggatggaaacacccttctacggcgatgaggcgctgagcggcctgggcggcggcgccagtggcagcggcggcagcttcgcgtccccgggccgcttgttccccggggcgcccccgacggccgcggccggcagcatgatgaagaaggacgcgctgacgctgagcctgagtgagcaggtggcggcagcgctcaagcctgcggccgcgccgcctcctacccccctgcgcgccgacggcgcccccagcgcggcaccccccgacggcctgctcgcctctcccgacctggggctgctgaagctggcctcccccgagctcgagcgcctcatcatccagtccaacgggctggtcaccaccacgccgacgagctcacagttcctctaccccaaggtggcggccagcgaggagcaggagttcgccgagggcttcgtcaaggccctggaggatttacacaagcagaaccagctcggcgcgggcgcggccgctgccgccgccgccgccgccgccggggggccctcgggcacggccacgggctccgcgccccccggcgagctggccccggcggcggccgcgcccgaagcgcctgtctacgcgaacctgagcagctacgcgggcggcgccgggggcgcggggggcgccgcgacggtcgccttcgctgccgaacctgtgcccttcccgccgccgccacccccaggcgcgttggggccgccgcgcctggctgcgctcaaggacgagccacagacggtgcccgacgtgccgagcttcggcgagagcccgccgttgtcgcccatcgacatggacacgcaggagcgcatcaaggcggagcgcaagcggctgcgcaaccgcatcgccgcctccaagtgccgcaagcgcaagctggagcgcatctcgcgcctggaagagaaagtgaagaccctcaagagtcagaacacggagctggcgtccacggcgagcctgctgcgcgagcaggtggcgcagctcaagcagaaagtcctcagccacgtcaacagcggctgccagctgctgccccagcaccaggtgcccgcgtactgagtccgcgcgcggggcgcatgcgcggccaccctccccaaggggcgggctcgcgggggggtgtcgtgggcgccccggacttggagagggtgcggccctggggaccccccctccccgagtgtgcccaggaactcagagagggcgcggcccccggggattccccccccccgagggtgcccaggactcgacaagctggaccccctgctcccgggggggcgagcgcatgacccccccgccctcgcgctgcctctttcccccgcgcggccgccccgtgttgcacaaacccgcgcgtctcggctgcccctttgtacaccgcgccgcggaagggggctccgagggggcgcagcctcaaaccctgcctttcctttacttttacttttttttttttttctttggaagagagaagaacagagtgttcgattctgccctatttatgtttctactcgggaacaaacgttggttgtgtgtgtgtgtgttttcttgtgttggttttttaaagaaatgggaagaagaaaaaaaaattctccgcccctttcctcgatctcgctccccccttcggttctttcgaccggtcccccctcccttttttgttctgttttgttttgttttgctacgagtccacattcctgtttgtaatccttggttcgcccggttttctgttttcagtaaagtctcgttacgccagctcggc

SEQ ID NO: 15038 - DNA, 9094 bp, Homo sapiens
  source 1..9094: mol_type = unassigned DNA
acgtccctcgtggagccgccgacgtcagcagtcgaatggcaacattgtggcgatgctgaggcgcagagtttaggagacgggttcatcagtcaggccggctccgggctttctgcagcagcaccaggggcgggggcggggatcttgacctgggcgagcgaccgggacgcatacagcgccggcctgaccccgcgggacccgcgcctcaccaccggagcgccgcagacgcagctccacggcctcgcgcggggggcggcgggcggccgcgaggcgctgcggcagcgcggagcttgtaaacagatccggccgcaggtgaccatgtgaactacctgctcccgggacgcttattgtccttctctcgatccgcgccacaaaggagctcggcggtcggggcgcggagggacaggcgaacgagccgggagagccggccggcgcactaagatggctgaaggcgcccggcgagggtgagcggggggcgcggcgcagccagcggggagtcctcgggcgggccgggccggcggcccttccccgcggcgagaagccggagccaccatgtcgttcgcgctggaggagacgctcgagtcggactgggtggctgtgcggccccatgtgttcgacgagcgcgagaaacacaaattcgtctttattgtggcctggaacgagattgagggcaagtttgccataacctgccacaaccggacggcccagaggcagaggagcggctcccgggagcaagcgggggcgcgagggggcgccgaggccggcggagctgcgtccgacgggagccgcgggcccggcagcccggcgggcaggggtcggcccgaggccactgcctctgcaactctggttaggagccccgggccccggcggagctcggcctgggcggagggcggctctcctcggagcactcgcagccttctgggggacccgcggctgcggagtcctggcagcaaaggggcggagagtcgtcttaggagcccagtgcgggccaaacccatcccgggtcagaaaacatctgaagccgacgatgcggcgggggcagccgctgcagcagcccggccggcgcccagagaggcccaggtgtcctctgtacggatagtgagcgcctctgggacggtctccgaggagatagaggtgctggaaatggtgaaggaggacgaggcacctctggcgctctcggacgcggagcagccgccgcccgccaccgagctggagtctccggccgaagagtgcagctgggccggactgttttctttccaggacctgcgcgccgtgcaccagcagctgtgctcggtgaactcgcagttggagccgtgcctgccggtgttccccgaggaaccttcgggcatgtggactgtgctgtttgggggcgcccccgagatgaccgagcaggaaatcgacactctgtgttaccagctccaggtctacctgggccacggcctggacacctgcggctggaagatcctctcccaggtgctcttcaccgagaccgatgatcccgaggagtattacgaaagcctcagcgagctgcggcagaagggctacgaagaagtgcttcagcgggccaggaagcgcatccaggagctcttggataagcacaagaatacagagagcatggtggagcttctggacttgtatcagatggaggatgaagcctacagcagccttgcagaagctacaaccgaactctatcagtatttactacagccattccgagacatgagagaacttgccatgctacgaagacagcagatcaagatttccatggagaatgattatctgggacctcgaagaattgagagtctacaaaaagaagatgctgattggcagcggaaagctcacatggctgtactgtctattcaagatcttactgtcaagtactttgaaataacagctaaagctcaaaaagctgtgtatgatcgaatgcgagctgatcagaagaaatttggtaaagcatcatgggcagcggctgctgaacggatggaaaaactccagtatgcagtttctaaggaaactttgcagatgatgagagctaaagagatatgcttggaacagcggaaacatgcactaaaggaagagatgcagagtttgcggggtggtacagaagcgatagcacgattggatcagttagaagctgattattatgatctgcaacttcagttgtatgaagtacagtttgaaatcttgaagtgtgaagagttactattgacagcgcaactagaaagcatcaaaagacttatatcagaaaaaagagatgaagtggtatactatgacacttacgaaagcatggaggccatgctggagaaggaagagatggcagcatctgcgtacttacagagagaagagctgcagaaacttcagcagaaagcacgccagctggaagcaagacgtggacgggtttctgccaagaaatcctacctcagaaataaaaaggaaatatgtattgcaaaacacaatgaaaaaatccaacagcgcactcggattgaagatgaatatagaacccatcacacagtacaactaaagagagaaaaattacatgatgaagaagaaagaaaaagtgcctgggttagccaagagagacagagaacactggatagacttcgaacatttaaacagaggtatcctgggcaagtcatacttaaatcaaccagattacgactagctcatgcaagaagaaaaggtgcagcaagtcctgttctccaagaggatcattgtgactctttaccaagtgtgttacaggtagaagagaaaactgaagaggtgggagaaggaagagtcaagcgtgggccatcacagacaacagaaccccagagccttgtgcaacttgaagatacttcattaacacaacttgaagccacctcattacctctcagtggtgttacctctgaactgcctcccactatatctcttccacttttgaataacaacctcgaaccatgttctgttaccataaatccactcccatcccctcttcctccaacaccaccaccacctctgcctgttgctaaggacagtggcccagagacactggagaaagatctgcctagaaaggaggggaatgagaagaggatcccaaagtcagccagtgccccctcagcacacctctttgacagcagccagctggtcagtgcacggaagaagctcagaaagactgctgaaggtttgcagaggaggagagtgagctcacccatggatgaggtgctagcctccttgaagcgtggtagttttcatctgaaaaaggttgaacagcgaactctgcctccttttcctgatgaagatgatagtaataatatcttggcacaaataaggaaaggggtaaaattgaagaaggtacagaaggatgttttgagagaatccttcacacttctacccgatacagaccctctaacacggagcatccatgaagctcttagaagaattaaagaagcatccccagagtcagaggacgaagaggaggctttaccttgcacagactgggagaactaacaagtgacataacagaagaaaaatatcattcaagattggttctgattcttttggaaaatgacagtttaagcacttggttcctcagttggataacattagatccaaagttcattggttcagtggtgtgaagaaaggaagcacaattggcaggttatcactttccagtcgttccaatagatgatggttaacatgaattttacatgtgcaatgttcctgactgcaatgaagaaaaggccttctggagatttctgttttttaagcacattctccttccatccacatatttacatccttgtaatggccagttaagctagggcttgctgtaagttggaagaacactgggttgacagagatctactgtgagctgtattgggactgctttgagaaccatctttcaatgcactgaaaagtcatctgaaaaaatagcttcttccatatcagcttatattaaatactgtgacactctgagaaagtttatcatcatgatagctgtaagtcaggcattaaaatcaaatggaaatacacctaaaatgtccgcattactcatttccaaaggatttttcataaagatgttcagcaacatctgaaaagctgcatttatggagatacatctattaatatgttcacaacatgatacatttaacatggcatatttttaggagtcttatactttgtaaggttttgaagtttccgtgcttttaaatcactcttcatatttcttgaatttataatagtttgaattttatgtgcatccttgtttatggaaggcagtactttgataatatttcaaattatttttattttgtttgaattattgcttgattgctatgactgacatgactttcctattgagaatcaaaaatcaagattcaatcatagggatgcagatcttaactcttttcacaaattaccattttaagtttttatttttatgctccacagtgaaaagcatgtgctctacaaagatagaaagtagagacaagtctccgtggctggcatttcaccatcttcacatgcactgaatggaattttgggagaatgcctttgttatagtcactaaaattttaaacttatacacagctttaggtgctgattttggctgtgatggagtcctgaaggacacatttatatgttccagattttcagcaggattgttgtgggcttgaatacatgtagatcattggactcagtgtgcagtaccctgtacatataattctgcataagacagatcttggcctttctgtggagggagttaagaactaaaataccaaaaatcactttatttcttttaagacaattatctggcctaaacccagaaagcagtactggagcaaaagcccagtgtatatgaattggtattcctagagaaaaaaagaaatgctcacacctttgttattttaaagtgttttcttgaaaataattagggagaaaattttctggcaacaggttatgtaagacaacaactttttttattatttcaaaacaaaacaggcacatgccaccatgccccagctaatttttatattttttatagagacagggttttgccatgttgcccacgctggtcttgaactcctggactcaagcaatctgccagcctcggcctgctaaagtgctaggattataggcgtgagcctctgtgcccagcctgacaaaatcttttatttatttaaatgttagtaatacgtttattgatgagactaggagcttctctgcagcatcttcataatacattggttttagttcccacactattcccacatcttatctgggaagattagaaatacagatgtaatatggaagcttcaacagcatgggggtggtgatagtgtcctatttgcccttggtaaaatattaaagcgtatttcttaacccaaagagtgattggttatatgaatatatttgaaaaagttaaagcaaatttgcaaacctttacaaaatcatgtatcaattttatgctatccagtttttacgtacccatgtgtcaacatttcatatatccagttctttgggtgctggttcactttttttcatttattcaaattcagaaaaatacggacggatctaatgttaaattaaccagaaaccctggaacattcatatcttgagagggaatttgctactcttttacttttgggatttcattataaaataggctcattttatacatatgtcctgtggtctgtcttccagagtgtgctgtaatcataagtctctagcaaagagtggagggtggagggtgtgtagaactccactcagcctcatggatacatctacaagtctctcaacccatcctgttacagttctccatgagagtcacctcacacttggaaaagaaggaggttaaagcagagtattgttggcagccagctatgcccatcctcttgtaaataactttccaacacacccatttccttgccttaaggtgcaggttcctacttctacaaaatttcaaatgattgcaggtcaaaaacctttggagttactcacaaataataataaaatttcaaataactagggtctacttgtccatcaagatgacattaccagtggaacccacctgttaattttaaagtagcttcagaacccaacaaaaattatgtaagcctggttaaatgtccttttttcttcttgcctctaataaaatcaggatcttcggccttgatactaaatatgtgtatatttagttatgatggtacttgtagatgctcacatttccagttccaaactcgcccgtactttttatgtgcttcaaaatattggacacatttctgttaatatatgatttctgtatccacaaaccgctgtttgcttatgctgagtcaatttagaagttaatttccaatctagtctcaactgcaatgcatttaaaataggtaaaacaagtaaatgagtttgggacattttgagattaatgttactgcccacttgactgtcaatttcaaatggctcctaatgcaaccaaaattataaccaatgtagcatgtgtaggaaaggtatttttaattatttaaaatcattgtgtatattacagcagtatgaggaatgcctggctaaagaggattttttaaaagatgaagaatggttttgcttgtattatataggcttactgagtttgtgagcagcataaaaacaatcattccttaattcttcattgtggaactgaaatatttctgtaatgcattttttaaaaggagactcctagacacagctgtaatagtgggaatagaaatgtagagcttttctcataacacaaaaccagaaaataattttcagcactttgacttactctatgtaataaggaaaaaaattgtttccacaaagttgaactatgtagtaatatttggtaacatatggcatggccactttatatcacagaatgtgtgtcaagttgcaaagcatacttgggccatagtagacactaagaattaaaactcttaaatcagtgaaacaaaaactaatgggcagcattctctctgtttggaatgggatcagtatacaattaatacaatttaattttacacattccctaagacaccatttttaagttacagtcacatgagtgtttgtataaatttaagtcaatgcttttagcctaggcaaagctaaatacaaggtttttggggttttcttttttcagctttattattgaagtattacaaacttaacatcagataccaatgtgtaaaaagtactattgggtccttaagggctctatcagggagttgaaatttcatacgctttaccaggttacttgtaaaaaatgaacagctgtaagacatttcaaaaccattgcagacacattgttaaaatgcagccatttgataatgaaagcagaaaccttaagttttacctaattattgcactaaatgtaaatgataacataaaattaagtgtgcattttaaacagattctatttcccacttactgcttagcatagaaaaagagctatggttagaggagtgaccagcaagatttatttcagatggaaaaggggtgagaaagtggaagcaccttactgttagagcatgttgcatctatttagtgctactgaacaattcagtagttatttctgaactttgctgcaaagtgctctttagttaaagcacattaagaagggtcactgcttaattgctttgtaaaatgaagcaatggtattttttatccgatatagtgtaatttaaaagttttcctacaaagtgagtttatattgttgcctaaactatgttatgtaagcaaagggtttggaaaggcgggagggagtctagattcggcgagagtgtgcgtttgtgtgtgtgaatgtatgaaaagtttccccattgggttattcttaagatgtgtttattgtaaagttttctacgttttgcccacagtaaatgtacaacttcgcaattgtaggatttaattgattgaattccaaatttatactgtctcttcccttctgcagagacattatgccactgtaaggtgcatgtacagaaaatacctctgaggttgacttgttaaataactgatgaatgttatttcacactgaatctcaaagcagtcatttgttttgcgggttaggggaaagttttgttttttgctggtgttttttgttgtttttaattaggcacactaagagtggctaaatttgggggaattggtggataggaaagaccttgaaaagtgatgtgtagatgaaaacacaaggtatggatgttggttacagagttcagttttaacaagggaaatttggggattttttttttttttacttgcatgttctatgggtagctatcaaagggtgtaacaaattattccagcttttcccaatactaattatattggttttaaaaagtctgcataatcactaggtggcattttcccttcatttgtgaaccaagaggggtaaatgatgctacccatacagtgacttctgagttctttaactttgacagaatctccattgtttcattgaatttctcattgtattatatgtctttccaagtgtgcaaactataatatgtagttaatgaaaaatggaaggctgcagattattttgcatgaataattaattgcccattagggctaaggagactgacatgatttttatcggttctgggtaaatgaaaattttaatggaaaactcattcaccatttactagctttgtgcaatattataaaaggtagaagcaaaacactagcacattgtgctttgcttggcttgtaaggatggctttagtaccattacattaaatggacagtgtgcacagtgtattgtaaatgccaactcttgcaaatttacaatacttaaatatgttcaattaacatcctaaagtattaaaagtacagaggaaaaactaagcaagcatttatagcaataccatgaaatctccagtaatcgttttgactgttgccttttgctctttagtgcagcttttctgcattgtaattgtattgctttgtatttcatgttttttacactcatgacttcagagttaagtacttgtacaccaagtattgcaatcacctttctcttgttgtacatgcaatgtaacaacctacagttttggtgcttttaacaatattcctctttttctttaataaaggatatttatttgaattaatt

SEQ ID NO: 15039 - DNA, 9042 bp, Homo sapiens
  source 1..9042: mol_type = unassigned DNA
agtcaggccggctccgggctttctgcagcagcaccaggggcgggggcggggatcttgacctgggcgagcgaccgggacgcatacagcgccggcctgaccccgcgggacccgcgcctcaccaccggagcgccgcagacgcagctccacggcctcgcgcggggggcggcgggcggccgcgaggcgctgcggcagcgcggagcttgtaaacagatccggccgcaggtgaccatgtgaactacctgctcccgggacgcttattgtccttctctcgatccgcgccacaaaggagctcggcggtcggggcgcggagggacaggcgaacgagccgggagagccggccggcgcactaagatggctgaaggcgcccggcgagggtgagcggggggcgcggcgcagccagcggggagtcctcgggcgggccgggccggcggcccttccccgcggcgagaagccggagccaccatgtcgttcgcgctggaggagacgctcgagtcggactgggtggctgtgcggccccatgtgttcgacgagcgcgagaaacacaaattcgtctttattgtggcctggaacgagattgagggcaagtttgccataacctgccacaaccggacggcccagaggcagaggagcggctcccgggagcaagcgggggcgcgagggggcgccgaggccggcggagctgcgtccgacgggagccgcgggcccggcagcccggcgggcaggggtcggcccgaggccactgcctctgcaactctggttaggagccccgggccccggcggagctcggcctgggcggagggcggctctcctcggagcactcgcagccttctgggggacccgcggctgcggagtcctggcagcaaaggggcggagagtcgtcttaggagcccagtgcgggccaaacccatcccgggtcagaaaacatctgaagccgacgatgcggcgggggcagccgctgcagcagcccggccggcgcccagagaggcccaggtgtcctctgtacggatagtgagcgcctctgggacggtctccgaggagatagaggtgctggaaatggtgaaggaggacgaggcacctctggcgctctcggacgcggagcagccgccgcccgccaccgagctggagtctccggccgaagagtgcagctgggccggactgttttctttccaggacctgcgcgccgtgcaccagcagctgtgctcggtgaactcgcagttggagccgtgcctgccggtgttccccgaggaaccttcgggcatgtggactgtgctgtttgggggcgcccccgagatgaccgagcaggaaatcgacactctgtgttaccagctccaggtctacctgggccacggcctggacacctgcggctggaagatcctctcccaggtgctcttcaccgagaccgatgatcccgaggagtattacgaaagcctcagcgagctgcggcagaagggctacgaagaagtgcttcagcgggccaggaagcgcatccaggagctcttggataagcacaagaatacagagagcatggtggagcttctggacttgtatcagatggaggatgaagcctacagcagccttgcagaagctacaaccgaactctatcagtatttactacagccattccgagacatgagagaacttgccatgctacgaagacagcagatcaagatttccatggagaatgattatctgggacctcgaagaattgagagtctacaaaaagaagatgctgattggcagcggaaagctcacatggctgtactgtctattcaagatcttactgtcaagtactttgaaataacagctaaagctcaaaaagctgtgtatgatcgaatgcgagctgatcagaagaaatttggtaaagcatcatgggcagcggctgctgaacggatggaaaaactccagtatgcagtttctaaggaaactttgcagatgatgagagctaaagagatatgcttggaacagcggaaacatgcactaaaggaagagatgcagagtttgcggggtggtacagaagcgatagcacgattggatcagttagaagctgattattatgatctgcaacttcagttgtatgaagtacagtttgaaatcttgaagtgtgaagagttactattgacagcgcaactagaaagcatcaaaagacttatatcagaaaaaagagatgaagtggtatactatgacacttacgaaagcatggaggccatgctggagaaggaagagatggcagcatctgcgtacttacagagagaagagctgcagaaacttcagcagaaagcacgccagctggaagcaagacgtggacgggtttctgccaagaaatcctacctcagaaataaaaaggaaatatgtattgcaaaacacaatgaaaaaatccaacagcgcactcggattgaagatgaatatagaacccatcacacagtacaactaaagagagaaaaattacatgatgaagaagaaagaaaaagtgcctgggttagccaagagagacagagaacactggatagacttcgaacatttaaacagaggtatcctgggcaagtcatacttaaatcaaccagattacgactagctcatgcaagaagaaaaggtgcagcaagtcctgttctccaagaggatcattgtgactctttaccaagtgtgttacaggtagaagagaaaactgaagaggtgggagaaggaagagtcaagcgtgggccatcacagacaacagaaccccagagccttgtgcaacttgaagatacttcattaacacaacttgaagccacctcattacctctcagtggtgttacctctgaactgcctcccactatatctcttccacttttgaataacaacctcgaaccatgttctgttaccataaatccactcccatcccctcttcctccaacaccaccacctcccccacctcctccccctcccccaccaccaccacctctgcctgttgctaaggacagtggcccagagacactggagaaagatctgcctagaaaggaggggaatgagaagaggatcccaaagtcagccagtgccccctcagcacacctctttgacagcagccagctggtcagtgcacggaagaagctcagaaagactgctgaaggtttgcagaggaggagagtgagctcacccatggatgaggtgctagcctccttgaagcgtggtagttttcatctgaaaaaggttgaacagcgaactctgcctccttttcctgatgaagatgatagtaataatatcttggcacaaataaggaaaggggtaaaattgaagaaggtacagaaggatgttttgagagaatccttcacacttctacccgatacagaccctctaacacggagcatccatgaagctcttagaagaattaaagaagcatccccagagtcagaggacgaagaggaggctttaccttgcacagactgggagaactaacaagtgacataacagaagaaaaatatcattcaagattggttctgattcttttggaaaatgacagtttaagcacttggttcctcagttggataacattagatccaaagttcattggttcagtggtgtgaagaaaggaagcacaattggcaggttatcactttccagtcgttccaatagatgatggttaacatgaattttacatgtgcaatgttcctgactgcaatgaagaaaaggccttctggagatttctgttttttaagcacattctccttccatccacatatttacatccttgtaatggccagttaagctagggcttgctgtaagttggaagaacactgggttgacagagatctactgtgagctgtattgggactgctttgagaaccatctttcaatgcactgaaaagtcatctgaaaaaatagcttcttccatatcagcttatattaaatactgtgacactctgagaaagtttatcatcatgatagctgtaagtcaggcattaaaatcaaatggaaatacacctaaaatgtccgcattactcatttccaaaggatttttcataaagatgttcagcaacatctgaaaagctgcatttatggagatacatctattaatatgttcacaacatgatacatttaacatggcatatttttaggagtcttatactttgtaaggttttgaagtttccgtgcttttaaatcactcttcatatttcttgaatttataatagtttgaattttatgtgcatccttgtttatggaaggcagtactttgataatatttcaaattatttttattttgtttgaattattgcttgattgctatgactgacatgactttcctattgagaatcaaaaatcaagattcaatcatagggatgcagatcttaactcttttcacaaattaccattttaagtttttatttttatgctccacagtgaaaagcatgtgctctacaaagatagaaagtagagacaagtctccgtggctggcatttcaccatcttcacatgcactgaatggaattttgggagaatgcctttgttatagtcactaaaattttaaacttatacacagctttaggtgctgattttggctgtgatggagtcctgaaggacacatttatatgttccagattttcagcaggattgttgtgggcttgaatacatgtagatcattggactcagtgtgcagtaccctgtacatataattctgcataagacagatcttggcctttctgtggagggagttaagaactaaaataccaaaaatcactttatttcttttaagacaattatctggcctaaacccagaaagcagtactggagcaaaagcccagtgtatatgaattggtattcctagagaaaaaaagaaatgctcacacctttgttattttaaagtgttttcttgaaaataattagggagaaaattttctggcaacaggttatgtaagacaacaactttttttattatttcaaaacaaaacaggcacatgccaccatgccccagctaatttttatattttttatagagacagggttttgccatgttgcccacgctggtcttgaactcctggactcaagcaatctgccagcctcggcctgctaaagtgctaggattataggcgtgagcctctgtgcccagcctgacaaaatcttttatttatttaaatgttagtaatacgtttattgatgagactaggagcttctctgcagcatcttcataatacattggttttagttcccacactattcccacatcttatctgggaagattagaaatacagatgtaatatggaagcttcaacagcatgggggtggtgatagtgtcctatttgcccttggtaaaatattaaagcgtatttcttaacccaaagagtgattggttatatgaatatatttgaaaaagttaaagcaaatttgcaaacctttacaaaatcatgtatcaattttatgctatccagtttttacgtacccatgtgtcaacatttcatatatccagttctttgggtgctggttcactttttttcatttattcaaattcagaaaaatacggacggatctaatgttaaattaaccagaaaccctggaacattcatatcttgagagggaatttgctactcttttacttttgggatttcattataaaataggctcattttatacatatgtcctgtggtctgtcttccagagtgtgctgtaatcataagtctctagcaaagagtggagggtggagggtgtgtagaactccactcagcctcatggatacatctacaagtctctcaacccatcctgttacagttctccatgagagtcacctcacacttggaaaagaaggaggttaaagcagagtattgttggcagccagctatgcccatcctcttgtaaataactttccaacacacccatttccttgccttaaggtgcaggttcctacttctacaaaatttcaaatgattgcaggtcaaaaacctttggagttactcacaaataataataaaatttcaaataactagggtctacttgtccatcaagatgacattaccagtggaacccacctgttaattttaaagtagcttcagaacccaacaaaaattatgtaagcctggttaaatgtccttttttcttcttgcctctaataaaatcaggatcttcggccttgatactaaatatgtgtatatttagttatgatggtacttgtagatgctcacatttccagttccaaactcgcccgtactttttatgtgcttcaaaatattggacacatttctgttaatatatgatttctgtatccacaaaccgctgtttgcttatgctgagtcaatttagaagttaatttccaatctagtctcaactgcaatgcatttaaaataggtaaaacaagtaaatgagtttgggacattttgagattaatgttactgcccacttgactgtcaatttcaaatggctcctaatgcaaccaaaattataaccaatgtagcatgtgtaggaaaggtatttttaattatttaaaatcattgtgtatattacagcagtatgaggaatgcctggctaaagaggattttttaaaagatgaagaatggttttgcttgtattatataggcttactgagtttgtgagcagcataaaaacaatcattccttaattcttcattgtggaactgaaatatttctgtaatgcattttttaaaaggagactcctagacacagctgtaatagtgggaatagaaatgtagagcttttctcataacacaaaaccagaaaataattttcagcactttgacttactctatgtaataaggaaaaaaattgtttccacaaagttgaactatgtagtaatatttggtaacatatggcatggccactttatatcacagaatgtgtgtcaagttgcaaagcatacttgggccatagtagacactaagaattaaaactcttaaatcagtgaaacaaaaactaatgggcagcattctctctgtttggaatgggatcagtatacaattaatacaatttaattttacacattccctaagacaccatttttaagttacagtcacatgagtgtttgtataaatttaagtcaatgcttttagcctaggcaaagctaaatacaaggtttttggggttttcttttttcagctttattattgaagtattacaaacttaacatcagataccaatgtgtaaaaagtactattgggtccttaagggctctatcagggagttgaaatttcatacgctttaccaggttacttgtaaaaaatgaacagctgtaagacatttcaaaaccattgcagacacattgttaaaatgcagccatttgataatgaaagcagaaaccttaagttttacctaattattgcactaaatgtaaatgataacataaaattaagtgtgcattttaaacagattctatttcccacttactgcttagcatagaaaaagagctatggttagaggagtgaccagcaagatttatttcagatggaaaaggggtgagaaagtggaagcaccttactgttagagcatgttgcatctatttagtgctactgaacaattcagtagttatttctgaactttgctgcaaagtgctctttagttaaagcacattaagaagggtcactgcttaattgctttgtaaaatgaagcaatggtattttttatccgatatagtgtaatttaaaagttttcctacaaagtgagtttatattgttgcctaaactatgttatgtaagcaaagggtttggaaaggcgggagggagtctagattcggcgagagtgtgcgtttgtgtgtgtgaatgtatgaaaagtttccccattgggttattcttaagatgtgtttattgtaaagttttctacgttttgcccacagtaaatgtacaacttcgcaattgtaggatttaattgattgaattccaaatttatactgtctcttcccttctgcagagacattatgccactgtaaggtgcatgtacagaaaatacctctgaggttgacttgttaaataactgatgaatgttatttcacactgaatctcaaagcagtcatttgttttgcgggttaggggaaagttttgttttttgctggtgttttttgttgtttttaattaggcacactaagagtggctaaatttgggggaattggtggataggaaagaccttgaaaagtgatgtgtagatgaaaacacaaggtatggatgttggttacagagttcagttttaacaagggaaatttggggattttttttttttttacttgcatgttctatgggtagctatcaaagggtgtaacaaattattccagcttttcccaatactaattatattggttttaaaaagtctgcataatcactaggtggcattttcccttcatttgtgaaccaagaggggtaaatgatgctacccatacagtgacttctgagttctttaactttgacagaatctccattgtttcattgaatttctcattgtattatatgtctttccaagtgtgcaaactataatatgtagttaatgaaaaatggaaggctgcagattattttgcatgaataattaattgcccattagggctaaggagactgacatgatttttatcggttctgggtaaatgaaaattttaatggaaaactcattcaccatttactagctttgtgcaatattataaaaggtagaagcaaaacactagcacattgtgctttgcttggcttgtaaggatggctttagtaccattacattaaatggacagtgtgcacagtgtattgtaaatgccaactcttgcaaatttacaatacttaaatatgttcaattaacatcctaaagtattaaaagtacagaggaaaaactaagcaagcatttatagcaataccatgaaatctccagtaatcgttttgactgttgccttttgctctttagtgcagcttttctgcattgtaattgtattgctttgtatttcatgttttttacactcatgacttcagagttaagtacttgtacaccaagtattgcaatcacctttctcttgttgtacatgcaatgtaacaacctacagttttggtgcttttaacaatattcctctttttctttaataaaggatatttatttgaattaattaa

SEQ ID NO: 15040 - DNA, 3200 bp, Homo sapiens
  source 1..3200: mol_type = unassigned DNA
ggccagagtccggagcagccgccgcccgaccacgccgagctcagttcgctgtccgcgccggctcccaccccggcccgaccccgacccggcccggtcaggccccatactcagtagccacgatggaggtgatgaacctgatggagcagcctatcaaggtgactgagtggcagcagacatacacctacgactcgggtatccactcgggcgccaacacctgcgtgccctccgtcagcagcaagggcatcatggaggaggatgaggcctgcgggcgccagtacacgctcaagaaaaccaccacttacacccagggggtgccccccagccaaggtgatctggagtaccagatgtccacaacagccagggccaaacgggtgcgggaggccatgtgccctggtgtgtcaggcgaggacagctcgcttctgctggccacccaggtggaggggcaggccaccaacctgcagcgactggccgagccgtcccagctgctcaagtcggccattgtgcatctcatcaactaccaggacgatgccgagctggccactcgcgccctgcccgagctcaccaaactgctcaacgacgaggacccggtggtggtgaccaaggcggccatgattgtgaaccagctgtcgaagaaggaggcgtcgcggcgggccctgatgggctcgccccagctggtggccgctgtcgtgcgtaccatgcagaataccagcgacctggacacagcccgctgcaccaccagcatcctgcacaacctctcccaccaccgggaggggctgctcgccatcttcaagtcgggtggcatccctgctctggtccgcatgctcagctcccctgtggagtcggtcctgttctatgccatcaccacgctgcacaacctgctcctgtaccaggagggcgccaagatggccgtgcgcctggccgacgggctgcaaaagatggtgcccctgctcaacaagaacaaccccaagttcctggccatcaccaccgactgcctgcagctcctggcctacggcaaccaggagagcaagctgatcatcctggccaatggtgggccccaggccctcgtgcagatcatgcgtaactacagttatgaaaagctgctctggaccaccagtcgtgtgctcaaggtgctatccgtgtgtcccagcaataagcctgccattgtggaggctggtgggatgcaggccctgggcaagcacctgaccagcaacagcccccgcctggtgcagaactgcctgtggaccctgcgcaacctctcagatgtggccaccaagcaggagggcctggagagtgtgctgaagattctggtgaatcagctgagtgtggatgacgtcaacgtcctcacctgtgccacgggcacactctccaacctgacatgcaacaacagcaagaacaagacgctggtgacacagaacagcggtgtggaggctctcatccatgccatcctgcgtgctggtgacaaggacgacatcacggagcctgccgtctgcgctctgcgccacctcactagccgccaccctgaggccgagatggcccagaactctgtgcgtctcaactatggcatcccagccatcgtgaagctgctcaaccagcccaaccagtggccactggtcaaggcaaccatcggcttgatcaggaatctggccctgtgcccagccaaccatgccccgctgcaggaggcagcggtcatcccccgcctcgtccaactgctggtgaaggcccaccaggatgcccagcgccacgtagctgcaggcacacagcagccctacacggatggtgtgaggatggaggagattgtggagggctgcaccggagcactgcacatcctcgcccgggaccccatgaaccgcatggagatcttccggctcaacaccattcccctgtttgtgcagctcctgtactcgtcggtggagaacatccagcgcgtggctgccggggtgctgtgtgagctggcccaggacaaggaggcggccgacgccattgatgcagagggggcctcggccccactcatggagttgctgcactcccgcaacgagggcactgccacctacgctgctgccgtcctgttccgcatctccgaggacaagaacccagactaccggaagcgcgtgtccgtggagctcaccaactccctcttcaagcatgacccggctgcctgggaggctgcccagagcatgattcccatcaatgagccctatggagatgacatggatgccacctaccgccccatgtactccagcgatgtgccccttgacccgctggagatgcacatggacatggatggagactaccccatcgacacctacagcgacggcctcaggcccccgtaccccactgcagaccacatgctggcctaggcggcctggccccagtgcggttcctcatctgagaggctctccgtgcaggcgatggggcaagacagaaaagtgcctgagctggggaagccggggtgtaacttcctgctgcaccctgcgcctccagaggtcctccgtagggtctttcttgggatagtgttctgctcctgcttttctgtcctgggcatgggtccagggcctgacaccccctccccgcccctgtggccctggccactaaagcttcagactcaagtacccattctgttttcccccagcaacgcccctccaaacctccagcctccctgtctccagctgcctgggcccggaagggctttggttccttctctgggtctgattttctcactgaactccaccgaccaactgccctaagcccccagggcctccagggcccaggttcgagacccaaacccccaaaatccaaaacttctcttgaaaagttcagggaccgtccaggggagatggggaggagatatggagtgagtcacctgctccagaagatgccagcttctctctccagggtgcttagttggctttgcccacccctcactccccagggagctctggggacagcttcctcacacccctgtcccacccacacagctgccctagctgaccccgagaagtgctcttggctgacccctctggtgtgtggtgaggggctttctcttccccttcctgtttcagacccccccatttcccgcacatggtgtggggggctgggggaggtccaagcagagtgttttattattatcgctttatgtttttggttattggtttttttgtatagaccaaagcaaagaaaataaaaataacacagatgcgttg

SEQ ID NO: 15041 - DNA, 3298 bp, Homo sapiens
  source 1..3298: mol_type = unassigned DNA
catgctttctggaggcctgcacagacctttcccacccgctttcctgaaagaatttgacagggaaagtgagaccgcaggaaggctttttgggggaaggtttcttcaatgctagactctctcaggcagagctgcatcgggccccctgccttccctgctcccaatttcctgagaccgcccccccccacccagaattggggatcttgatcaggtagccacgatggaggtgatgaacctgatggagcagcctatcaaggtgactgagtggcagcagacatacacctacgactcgggtatccactcgggcgccaacacctgcgtgccctccgtcagcagcaagggcatcatggaggaggatgaggcctgcgggcgccagtacacgctcaagaaaaccaccacttacacccagggggtgccccccagccaaggtgatctggagtaccagatgtccacaacagccagggccaaacgggtgcgggaggccatgtgccctggtgtgtcaggcgaggacagctcgcttctgctggccacccaggtggaggggcaggccaccaacctgcagcgactggccgagccgtcccagctgctcaagtcggccattgtgcatctcatcaactaccaggacgatgccgagctggccactcgcgccctgcccgagctcaccaaactgctcaacgacgaggacccggtggtggtgaccaaggcggccatgattgtgaaccagctgtcgaagaaggaggcgtcgcggcgggccctgatgggctcgccccagctggtggccgctgtcgtgcgtaccatgcagaataccagcgacctggacacagcccgctgcaccaccagcatcctgcacaacctctcccaccaccgggaggggctgctcgccatcttcaagtcgggtggcatccctgctctggtccgcatgctcagctcccctgtggagtcggtcctgttctatgccatcaccacgctgcacaacctgctcctgtaccaggagggcgccaagatggccgtgcgcctggccgacgggctgcaaaagatggtgcccctgctcaacaagaacaaccccaagttcctggccatcaccaccgactgcctgcagctcctggcctacggcaaccaggagagcaagctgatcatcctggccaatggtgggccccaggccctcgtgcagatcatgcgtaactacagttatgaaaagctgctctggaccaccagtcgtgtgctcaaggtgctatccgtgtgtcccagcaataagcctgccattgtggaggctggtgggatgcaggccctgggcaagcacctgaccagcaacagcccccgcctggtgcagaactgcctgtggaccctgcgcaacctctcagatgtggccaccaagcaggagggcctggagagtgtgctgaagattctggtgaatcagctgagtgtggatgacgtcaacgtcctcacctgtgccacgggcacactctccaacctgacatgcaacaacagcaagaacaagacgctggtgacacagaacagcggtgtggaggctctcatccatgccatcctgcgtgctggtgacaaggacgacatcacggagcctgccgtctgcgctctgcgccacctcactagccgccaccctgaggccgagatggcccagaactctgtgcgtctcaactatggcatcccagccatcgtgaagctgctcaaccagcccaaccagtggccactggtcaaggcaaccatcggcttgatcaggaatctggccctgtgcccagccaaccatgccccgctgcaggaggcagcggtcatcccccgcctcgtccaactgctggtgaaggcccaccaggatgcccagcgccacgtagctgcaggcacacagcagccctacacggatggtgtgaggatggaggagattgtggagggctgcaccggagcactgcacatcctcgcccgggaccccatgaaccgcatggagatcttccggctcaacaccattcccctgtttgtgcagctcctgtactcgtcggtggagaacatccagcgcgtggctgccggggtgctgtgtgagctggcccaggacaaggaggcggccgacgccattgatgcagagggggcctcggccccactcatggagttgctgcactcccgcaacgagggcactgccacctacgctgctgccgtcctgttccgcatctccgaggacaagaacccagactaccggaagcgcgtgtccgtggagctcaccaactccctcttcaagcatgacccggctgcctgggaggctgcccagagcatgattcccatcaatgagccctatggagatgacatggatgccacctaccgccccatgtactccagcgatgtgccccttgacccgctggagatgcacatggacatggatggagactaccccatcgacacctacagcgacggcctcaggcccccgtaccccactgcagaccacatgctggcctaggcggcctggccccagtgcggttcctcatctgagaggctctccgtgcaggcgatggggcaagacagaaaagtgcctgagctggggaagccggggtgtaacttcctgctgcaccctgcgcctccagaggtcctccgtagggtctttcttgggatagtgttctgctcctgcttttctgtcctgggcatgggtccagggcctgacaccccctccccgcccctgtggccctggccactaaagcttcagactcaagtacccattctgttttcccccagcaacgcccctccaaacctccagcctccctgtctccagctgcctgggcccggaagggctttggttccttctctgggtctgattttctcactgaactccaccgaccaactgccctaagcccccagggcctccagggcccaggttcgagacccaaacccccaaaatccaaaacttctcttgaaaagttcagggaccgtccaggggagatggggaggagatatggagtgagtcacctgctccagaagatgccagcttctctctccagggtgcttagttggctttgcccacccctcactccccagggagctctggggacagcttcctcacacccctgtcccacccacacagctgccctagctgaccccgagaagtgctcttggctgacccctctggtgtgtggtgaggggctttctcttccccttcctgtttcagacccccccatttcccgcacatggtgtggggggctgggggaggtccaagcagagtgttttattattatcgctttatgtttttggttattggtttttttgtatagaccaaagcaaagaaaataaaaataacacagatgcgttg

SEQ ID NO: 15042 - DNA, 3497 bp, Homo sapiens
  source 1..3497: mol_type = unassigned DNA
ggccagagtccggagcagccgccgcccgaccacgccgagctcagttcgctgtccgcgccggctcccaccccggcccgaccccgacccggcccggtcaggccccatactcagtagccacgatggaggtgatgaacctgatggagcagcctatcaaggtgactgagtggcagcagacatacacctacgactcgggtatccactcgggcgccaacacctgcgtgccctccgtcagcagcaagggcatcatggaggaggatgaggcctgcgggcgccagtacacgctcaagaaaaccaccacttacacccagggggtgccccccagccaaggtgatctggagtaccagatgtccacaacagccagggccaaacgggtgcgggaggccatgtgccctggtgtgtcaggcgaggacagctcgcttctgctggccacccaggtggaggggcaggccaccaacctgcagcgactggccgagccgtcccagctgctcaagtcggccattgtgcatctcatcaactaccaggacgatgccgagctggccactcgcgccctgcccgagctcaccaaactgctcaacgacgaggacccggtggtggtgaccaaggcggccatgattgtgaaccagctgtcgaagaaggaggcgtcgcggcgggccctgatgggctcgccccagctggtggccgctgtcgtgcgtaccatgcagaataccagcgacctggacacagcccgctgcaccaccagcatcctgcacaacctctcccaccaccgggaggggctgctcgccatcttcaagtcgggtggcatccctgctctggtccgcatgctcagctcccctgtggagtcggtcctgttctatgccatcaccacgctgcacaacctgctcctgtaccaggagggcgccaagatggccgtgcgcctggccgacgggctgcaaaagatggtgcccctgctcaacaagaacaaccccaagttcctggccatcaccaccgactgcctgcagctcctggcctacggcaaccaggagagcaagctgatcatcctggccaatggtgggccccaggccctcgtgcagatcatgcgtaactacagttatgaaaagctgctctggaccaccagtcgtgtgctcaaggtgctatccgtgtgtcccagcaataagcctgccattgtggaggctggtgggatgcaggccctgggcaagcacctgaccagcaacagcccccgcctggtgcagaactgcctgtggaccctgcgcaacctctcagatgtggccaccaagcaggagggcctggagagtgtgctgaagattctggtgaatcagctgagtgtggatgacgtcaacgtcctcacctgtgccacgggcacactctccaacctgacatgcaacaacagcaagaacaagacgctggtgacacagaacagcggtgtggaggctctcatccatgccatcctgcgtgctggtgacaaggacgacatcacggagcctgccgtctgcgctctgcgccacctcactagccgccaccctgaggccgagatggcccagaactctgtgcgtctcaactatggcatcccagccatcgtgaagctgctcaaccagcccaaccagtggccactggtcaaggcaaccatcggcttgatcaggaatctggccctgtgcccagccaaccatgccccgctgcaggaggcagcggtcatcccccgcctcgtccaactgctggtgaaggcccaccaggatgcccagcgccacgtagctgcaggcacacagcagccctacacggatggtgtgaggatggaggagattgtggagggctgcaccggagcactgcacatcctcgcccgggaccccatgaaccgcatggagatcttccggctcaacaccattcccctgtttgtgcagctcctgtactcgtcggtggagaacatccagcgcgtggctgccggggtgctgtgtgagctggcccaggacaaggaggcggccgacgccattgatgcagagggggcctcggccccactcatggagttgctgcactcccgcaacgagggcactgccacctacgctgctgccgtcctgttccgcatctccgaggacaagaacccagactaccggaagcgcgtgtccgtggagctcaccaactccctcttcaagcatgacccggctgcctgggaggctgcccagagcatgattcccatcaatgagccctatggagatgacatggatgccacctaccgccccatgtactccagcgatgtgccccttgacccgctggagatgcacatggacatggatggagactaccccatcgacacctacagcgacggcctcaggcccccgtaccccactgcagaccacatgctggcctaggcggcctggccccagtacggccccctctttgcaggcttttcctcctctctagaacctccttctgttggaggccctcccatctccccgctgaaacctgcgctccttttttggggggatcctttgctgctgagcttccccaagcacggtgtgccctggcctgccttcttcttgtgtctttggtggggatggggaggcctattcctgctggccccttctgggggtggtgggcaggtgacacggagtggcttgagcttctggggatgcaggtccaccgagcccctgacccctgtctgtccccgctcccctaacaggtgcggttcctcatctgagaggctctccgtgcaggcgatggggcaagacagaaaagtgcctgagctggggaagccggggtgtaacttcctgctgcaccctgcgcctccagaggtcctccgtagggtctttcttgggatagtgttctgctcctgcttttctgtcctgggcatgggtccagggcctgacaccccctccccgcccctgtggccctggccactaaagcttcagactcaagtacccattctgttttcccccagcaacgcccctccaaacctccagcctccctgtctccagctgcctgggcccggaagggctttggttccttctctgggtctgattttctcactgaactccaccgaccaactgccctaagcccccagggcctccagggcccaggttcgagacccaaacccccaaaatccaaaacttctcttgaaaagttcagggaccgtccaggggagatggggaggagatatggagtgagtcacctgctccagaagatgccagcttctctctccagggtgcttagttggctttgcccacccctcactccccagggagctctggggacagcttcctcacacccctgtcccacccacacagctgccctagctgaccccgagaagtgctcttggctgacccctctggtgtgtggtgaggggctttctcttccccttcctgtttcagacccccccatttcccgcacatggtgtggggggctgggggaggtccaagcagagtgttttattattatcgctttatgtttttggttattggtttttttgtatagaccaaagcaaagaaaataaaaataacacagatgcgttg

SEQ ID NO: 15043 - DNA, 915 bp, Homo sapiens
  source 1..915: mol_type = unassigned DNA
cccaggggacctcagaagctgctagaagccctgagtgccttctcttgcccctgggagagttgggtcagggcagcaagtagccacgatggaggtgatgaacctgatggagcagcctatcaaggtgactgagtggcagcagacatacacctacgactcgggtatccactcgggcgccaacacctgcgtgccctccgtcagcagcaagggcatcatggaggaggatgaggcctgcgggcgccagtacacgctcaagaaaaccaccacttacacccagggggtgccccccagccaaggtgatctggagtaccagatgtccacaacagccagggccaaacgggtgcgggaggccatgtgccctggtgtgtcaggcgaggacagctcgcttctgctggccacccaggtggaggggcaggccaccaacctgcagcgactggccgagccgtcccagctgctcaagtcggccattgtgcatctcatcaactaccaggacgatgccgagctggccactcgcgccctgcccgagctcaccaaactgctcaacgacgaggacccggtggtggtgaccaaggcggccatgattgtgaaccagctgtcgaagaaggaggcgtcgcggcgggccctgatgggctcgccccagctggtggccgctgtcgtgcgtaccatgcagaataccagcgacctggacacagcccgctgcaccaccagcatcctgcacaacctctcccaccaccgggaggggctgctcgccatcttcaagtcgggtggcatccctgctctggtccgcatgctcagctcccctgtggagtcggtcctgttctatgccatcaccacgctgcacaacctgctcctgtaccaggagggcgccaagatggccgtgcgcctggccgacgggctgcaaaagatggtgcccctgct

SEQ ID NO: 15044 - DNA, 949 bp, Homo sapiens
  source 1..949: mol_type = unassigned DNA
tgagttgctgccttggccagagtccggagcagccgccgcccgaccacgccgagctcagttcgctgtccgcgccggctcccaccccggcccgaccccgacccggcccggtcaggccccatactcagcctctgacctctgcaggtcagttcccaggacagtggagccaaacacagaccaagcgggaagttcacctccctggtacaaagttcggccctgctactcattaaccttcagtagccacgatggaggtgatgaacctgatggagcagcctatcaaggtgactgagtggcagcagacatacacctacgactcgggtatccactcgggcgccaacacctgcgtgccctccgtcagcagcaagggcatcatggaggaggatgaggcctgcgggcgccagtacacgctcaagaaaaccaccacttacacccagggggtgccccccagccaaggtgatctggagtaccagatgtccacaacagccagggccaaacgggtgcgggaggccatgtgccctggtgtgtcaggcgaggacagctcgcttctgctggccacccaggtggaggggcaggccaccaacctgcagcgactggccgagccgtcccagctgctcaagtcggccattgtgcatctcatcaactaccaggacgatgccgagctggccactcgcgccctgcccgagctcaccaaactgctcaacgacgaggacccggtggtggtgaccaaggcggccatgattgtgaaccagctgtcgaagaaggaggcgtcgcggcgggccctgatgggctcgccccagctggtggccgctgtcgtgcgtaccatgcagaataccagcgacctggacacagcccgctgcaccaccagcatcctgcacaacctctcccaccaccgggaggggctgctcgccatcttcaagtcgggtggcatccctgctctggtccgcatgctcag

SEQ ID NO: 15045 - DNA, 1029 bp, Homo sapiens
  source 1..1029: mol_type = unassigned DNA
ctagagccgactggcagtccccggggccaatggcaagcggataaacagaggcggccgtggaagaggactggaggcgaggctccgcccctccacgggacagtcaggcgagatagccagtgagctcgcaccagaggtagccacgatggaggtgatgaacctgatggagcagcctatcaaggtgactgagtggcagcagacatacacctacgactcgggtatccactcgggcgccaacacctgcgtgccctccgtcagcagcaagggcatcatggaggaggatgaggcctgcgggcgccagtacacgctcaagaaaaccaccacttacacccagggggtgccccccagccaaggtgatctggagtaccagatgtccacaacagccagggccaaacgggtgcgggaggccatgtgccctggtgtgtcaggcgaggacagctcgcttctgctggccacccaggtggaggggcaggccaccaacctgcagcgactggccgagccgtcccagctgctcaagtcggccattgtgcatctcatcaactaccaggacgatgccgagctggccactcgcgccctgcccgagctcaccaaactgctcaacgacgaggacccggtggtggtgaccaaggcggccatgattgtgaaccagctgtcgaagaaggaggcgtcgcggcgggccctgatgggctcgccccagctggtggccgctgtcgtgcgtaccatgcagaataccagcgacctggacacagcccgctgcaccaccagcatcctgcacaacctctcccaccaccgggaggggctgctcgccatcttcaagtcgggtggcatccctgctctggtccgcatgctcagctcccctgtggagtcggtcctgttctatgccatcaccacgctgcacaacctgctcctgtaccaggagggcgccaagatggccgtgcgcctggccgacgggctgcaaaagatggtgcccctgctcaacaagaacaaccccaagttcctggccatcaccaccgactgcctgcagctcctggc

SEQ ID NO: 15046 - DNA, 586 bp, Homo sapiens
  source 1..586: mol_type = unassigned DNA
catgctttctggaggcctgcacagacctttcccacccgctttcctgaaagaatttgacagggaaagtgagaccgcaggaaggctttttgggggaaggtttcttcaatgctagactctctcaggcagagctgcatcgggccccctgccttccctgctcccaatttcctgagaccgcccccccccacccagaattggggatcttgatcaggcctctgacctctgcaggtcagttcccaggacagtggagccaaacacagaccaagcgggaagttcacctccctggtacaaagttcggccctgctactcattaaccttcagtagccacgatggaggtgatgaacctgatggagcagcctatcaaggtgactgagtggcagcagacatacacctacgactcgggtatccactcgggcgccaacacctgcgtgccctccgtcagcagcaagggcatcatggaggaggatgaggcctgcgggcgccagtacacgctcaagaaaaccaccacttacacccagggggtgccccccagccaaggtgatctggagtaccagatgtccacaacagccagggccaaacgggtgcggga

SEQ ID NO: 15047 - DNA, 1069 bp, Homo sapiens
  source 1..1069: mol_type = unassigned DNA
tgtgggggccgagcgcacattttcccagcgactctggccccacctgccgagcaggtgagcgcacggagtccagaggccctgccctccagctcccagagcctcgtcgatactacctgcggcgcctccctccacgccggtgggagcccggctctggcttcttcagcggagtagccacgatggaggtgatgaacctgatggagcagcctatcaaggtgactgagtggcagcagacatacacctacgactcgggtatccactcgggcgccaacacctgcgtgccctccgtcagcagcaagggcatcatggaggaggatgaggcctgcgggcgccagtacacgctcaagaaaaccaccacttacacccagggggtgccccccagccaaggtgatctggagtaccagatgtccacaacagccagggccaaacgggtgcgggaggccatgtgccctggtgtgtcaggcgaggacagctcgcttctgctggccacccaggtggaggggcaggccaccaacctgcagcgactggccgagccgtcccagctgctcaagtcggccattgtgcatctcatcaactaccaggacgatgccgagctggccactcgcgccctgcccgagctcaccaaactgctcaacgacgaggacccggtggtggtgaccaaggcggccatgattgtgaaccagctgtcgaagaaggaggcgtcgcggcgggccctgatgggctcgccccagctggtggccgctgtcgtgcgtaccatgcagaataccagcgacctggacacagcccgctgcaccaccagcatcctgcacaacctctcccaccaccgggaggggctgctcgccatcttcaagtcgggtggcatccctgctctggtccgcatgctcagctcccctgtggagtcggtcctgttctatgccatcaccacgctgcacaacctgctcctgtaccaggagggcgccaagatggccgtgcgcctggccgacgggctgcaaaagatggtgcccctgctcaacaagaacaaccccaagttcctggccatcaccaccgactgcctgcagctcctggcctacgg

SEQ ID NO: 15048 - DNA, 1930 bp, Homo sapiens
  source 1..1930: mol_type = unassigned DNA
atggaggtgatgaacctgatggagcagcctatcaaggtgactgagtggcagcagacatacacctacgactcgggtatccactcgggcgccaacacctgcgtgccctccgtcagcagcaagggcatcatggaggaggatgaggcctgcgggcgccagtacacgctcaagaaaaccaccacttacacccagggggtgccccccagccaaggtgatctggagtaccagatgtccacaacagccagggccaaacgggtgcgggaggccatgtgccctggtgtgtcaggcgaggacagctcgcttctgctggccacccaggtggaggggcaggccaccaacctgcagcgactggccgagccgtcccagctgctcaagtcggccattgtgcatctcatcaactaccaggacgatgccgagctggccactcgcgccctgcccgagctcaccaaactgctcaacgacgaggacccggtggtggtgaccaaggcggccatgattgtgaaccagctgtcgaagaaggaggcgtcgcggcgggccctgatgggctcgccccagctggtggccgctgtcgtgcgtaccatgcagaataccagcgacctggacacagcccgctgcaccaccagcatcctgcacaacctctcccaccaccgggaggggctgctcgccatcttcaagtcgggtggcatccctgctctggtccgcatgctcagctcccctgtggagtcggtcctgttctatgccatcaccacgctgcacaacctgctcctgtaccaggagggcgccaagatggccgtgcgcctggccgacgggctgcaaaagatggtgcccctgctcaacaagaacaaccccaagttcctggccatcaccaccgactgcctgcagctcctggcctacggcaaccaggagagcaagatcctcacagccaccgtggacaatgccaacatcctgctacagattgacaatgcccgtctggctgctgatgacttccgcaccaagtttgagacagagcaggccctgcgcctgagtgtggaggccgacatcaatggcctgcgcagggtgctggatgagctgaccctggccagagccgacctggagatgcagattgagaacctcaaggaggagctggcctacctgaagaagaaccacgaggaggagatgaacgccctgcgaggccaggtgggtggtgagatcaatgtggagatggacgctgccccaggcgtggacctgagccgcatcctcaacgagatgcgtgaccagtatgagaagatggcagagaagaaccgcaaggatgccgaggattggttcttcagcaagacagaggaactgaaccgcgaggtggccaccaacagtgagctggtgcagagtggcaagagtgagatctcggagctccggcgcaccatgcaggccttggagatagagctgcagtcccagctcagcatgaaagcatccctggagggcaacctggcggagacagagaaccgctactgcgtgcagctgtcccagatccaggggctgattggcagcgtggaggagcagctggcccagcttcgctgcgagatggagcagcagaaccaggaatacaaaatcctgctggatgtgaagacgcggctggagcaggagattgccacctaccgccgcctgctggagggagaggatgcccacctgactcagtacaagaaagaaccggtgaccacccgtcaggtgcgtaccattgtggaagaggtccaggatggcaaggtcatctcctcccgcgagcaggtccaccagaccacccgctgaggactcagctaccccggccggccacccaggaggcagggaggcagccgccccatctgccccacagtctccggcctctccagcctcagccccctgcttcagtcccttccccatgcttccttgcctgatgacaataaagcttgttgactcagctatg

SEQ ID NO: 15049 - DNA, 1693 bp, Homo sapiens
  source 1..1693: mol_type = unassigned DNA
acgaggggaagaaaggagttggggcaaaacaggaggcgtttccctacccgcatacatccccgtccccgagacacccaatccccccacccccagcctgcccgcgcctcccgcccccagctcctcgccctggggacagctggcagccccgcgcggaccagacacaaagccgatcaatcccggaggcgtgggggcggagggacgacccgccggggctttcccgggcgctgctctcctcctgctgccccctcgctaggacccggcggacgcctcgtctggttttcacgccctctagcccctacccccacacccccaaaacagaacagacccccatccctgggctggaggacccgcctcttggcagccagctgagaaggcgccccggggagggggaaactgacatcccatctagagccgtccctcctcttcctcccctcccgactctctgctcctttcccgccccagaagttcaagggcccccggcctcctgcgctcctgccgccgggaccctcgacctcctcagagcagccggctgccgccccgggaagatggcgaggaggagccgccaccgcctcctcctgctgctgctgcgctacctggtggtcgccctgggctatcataaggcctatgggttttctgccccaaaagaccaacaagtagtcacagcagtagagtaccaagaggctattttagcctgcaaaaccccaaagaagactgtttcctccagattagagtggaagaaactgggtcggagtgtctcctttgtctactatcaacagactcttcaaggtgattttaaaaatcgagctgagatgatagatttcaatatccggatcaaaaatgtgacaagaagtgatgcggggaaatatcgttgtgaagttagtgccccatctgagcaaggccaaaacctggaagaggatacagtcactctggaagtattagtggctccagcagttccatcatgtgaagtaccctcttctgctctgagtggaactgtggtagagctacgatgtcaagacaaagaagggaatccagctcctgaatacacatggtttaaggatggcatccgtttgctagaaaatcccagacttggctcccaaagcaccaacagctcatacacaatgaatacaaaaactggaactctgcaatttaatactgtttccaaactggacactggagaatattcctgtgaagcccgcaattctgttggatatcgcaggtgtcctgggaaacgaatgcaagtagatgatctcaacataagtggcatcatagcagccgtagtagttgtggccttagtgatttccgtttgtggccttggtgtatgctatgctcagaggaaaggctacttttcaagtaaatatatgttcatgaagagtaattcttcatctaaagccacgacaatgagtgaaaatgatttcaagcacacaaaatcctttataatttaaagactccactttagagatacaccaaagccaccgttgttacacaagttattaaactattataaaactctgctttgtccgacatttgcaaagaggtacacgaggaaatggaattggtatttcattttaattttcatgactactaactcacctgaacttgctattttaaacaaatagttctgtcgacacctaaaatataatctggcttcttgtgtctggactaagttaaaagaattaaaatactttgtaatgtc

SEQ ID NO: 15050 - DNA, 1677 bp, Homo sapiens
  source 1..1677: mol_type = unassigned DNA
agacccccatccctgggctggaggacccgcctcttggcagccagctgagaaggcgccccggggagggggaaactgacatcccatctagagccgtccctcctcttcctcccctcccgactctctgctcctttcccgccccagaagttcaagggcccccggcctcctgcgctcctgccgccgggaccctcgacctcctcagagcagccggctgccgccccgggaagatggcgaggaggagccgccaccgcctcctcctgctgctgctgcgctacctggtggtcgccctgggctatcataaggcctatgggttttctgccccaaaagaccaacaagtagtcacagcagtagagtaccaaggtgattttaaaaatcgagctgagatgatagatttcaatatccggatcaaaaatgtgacaagaagtgatgcggggaaatatcgttgtgaagttagtgccccatctgagcaaggccaaaacctggaagaggatacagtcactctggaagtattagtggctccagcagttccatcatgtgaagtaccctcttctgctctgagtggaactgtggtagagctacgatgtcaagacaaagaagggaatccagctcctgaatacacatggtttaaggatggcatccgtttgctagaaaatcccagacttggctcccaaagcaccaacagctcatacacaatgaatacaaaaactggaactctgcaatttaatactgtttccaaactggacactggagaatattcctgtgaagcccgcaattctgttggatatcgcaggtgtcctgggaaacgaatgcaagtagatgatctcaacataagtggcatcatagcagccgtagtagttgtggccttagtgatttccgtttgtggccttggtgtatgctatgctcagaggaaaggctacttttcaaaagaaacctccttccagaagagtaattcttcatctaaagccacgacaatgagtgaaaatgatttcaagcacacaaaatcctttataatttaaagactccactttagagatacaccaaagccaccgttgttacacaagttattaaactattataaaactctgctttgtccgacatttgcaaagaggtacacgaggaaatggaattggtatttcattttaattttcatgactactaactcacctgaacttgctattttaaacaaatagttctgtcgacacctaaaatataatctggcttcttgtgtctggactaagttaaaagaattaaaatactttgtaatgtcctgggctttgggaaatgttaaccacgtcctaacttctagagaacgttactaaaatataacatactgattgtgaagtcaatccacaggtcatgaaaatataaatcagactctgcacgagagtctgatttagggggtccaacaaatactctgacagatgcaaaaggaacctctggtctcatttctgccagaatcctcttttctcccctaatatcatccttattctgatgctcgttcatcactaacacacccacagaaaggaggaagcgggatgggtcttatgcccaaggatttgcactttgtgtttacttccattcctgggaactaaaagcaacatcaaaagaaatgcctaatggctggagcccacaggtgtgcaccacaggatttgcctggtgtgtgtcactgatttcttcatt

SEQ ID NO: 15051 - DNA, 4337 bp, Homo sapiens
  source 1..4337: mol_type = unassigned DNA
agccaacgaggggaagaaaggagttggggcaaaacaggaggcgtttccctacccgcatacatccccgtccccgagacacccaatccccccacccccagcctgcccgcgcctcccgcccccagctcctcgccctggggacagctggcagccccgcgcggaccagacacaaagccgatcaatcccggaggcgtgggggcggagggacgacccgccggggctttcccgggcgctgctctcctcctgctgccccctcgctaggacccggcggacgcctcgtctggttttcacgccctctagcccctacccccacacccccaaaacagaacagacccccatccctgggctggaggacccgcctcttggcagccagctgagaaggcgccccggggagggggaaactgacatcccatctagagccgtccctcctcttcctcccctcccgactctctgctcctttcccgccccagaagttcaagggcccccggcctcctgcgctcctgccgccgggaccctcgacctcctcagagcagccggctgccgccccgggaagatggcgaggaggagccgccaccgcctcctcctgctgctgctgcgctacctggtggtcgccctgggctatcataaggcctatgggttttctgccccaaaagaccaacaagtagtcacagcagtagagtaccaagaggctattttagcctgcaaaaccccaaagaagactgtttcctccagattagagtggaagaaactgggtcggagtgtctcctttgtctactatcaacagactcttcaaggtgattttaaaaatcgagctgagatgatagatttcaatatccggatcaaaaatgtgacaagaagtgatgcggggaaatatcgttgtgaagttagtgccccatctgagcaaggccaaaacctggaagaggatacagtcactctggaagtattagtggctccagcagttccatcatgtgaagtaccctcttctgctctgagtggaactgtggtagagctacgatgtcaagacaaagaagggaatccagctcctgaatacacatggtttaaggatggcatccgtttgctagaaaatcccagacttggctcccaaagcaccaacagctcatacacaatgaatacaaaaactggaactctgcaatttaatactgtttccaaactggacactggagaatattcctgtgaagcccgcaattctgttggatatcgcaggtgtcctgggaaacgaatgcaagtagatgatctcaacataagtggcatcatagcagccgtagtagttgtggccttagtgatttccgtttgtggccttggtgtatgctatgctcagaggaaaggctacttttcaaaagaaacctccttccagaagagtaattcttcatctaaagccacgacaatgagtgaaaatgatttcaagcacacaaaatcctttataatttaaagactccactttagagatacaccaaagccaccgttgttacacaagttattaaactattataaaactctgctttgtccgacatttgcaaagaggtacacgaggaaatggaattggtatttcattttaattttcatgactactaactcacctgaacttgctattttaaacaaatagttctgtcgacacctaaaatataatctggcttcttgtgtctggactaagttaaaagaattaaaatactttgtaatgtcctgggctttgggaaatgttaaccacgtcctaacttctagagaacgttactaaaatataacatactgattgtgaagtcaatccacaggtcatgaaaatataaatcagactctgcacgagagtctgatttagggggtccaacaaatactctgacagatgcaaaaggaacctctggtctcatttctgccagaatcctcttttctcccctaatatcatccttattctgatgctcgttcatcactaacacacccacagaaaggaggaagcgggatgggtcttatgcccaaggatttgcactttgtgtttacttccattcctgggaactaaaagcaacatcaaaagaaatgcctaatggctggagcccacaggtgtgcaccacaggatttgcctggtgtgtgtcactgatttcttcattaaacgtaatttagatggtcaaacacaaacccaagtggcttatttcacccctactgctgcttgccactgcttccttcttgtaagatttctttgaagaggatcagtgactttgacatcagaactcaccactggagcctacacaagtttgcagatacctttccctgcaggagtggtgacttcacatctttctgtctctaaaaattgtgcagtgacattccgggccaagtcccttagtcaggggttgacaattctgcttttggacaaggagggatgtggagggaagaagtaatagtctaccaggaaaatgagacgaaaaagctcagtatgactccctgcatctggtacccctcttgaaacacagtgggcacatgagcaatggctcaaacgaaaagtggatctaatgtgggtttctcaaccgatgaaccacaaaagcttccagctactattacaatgtgaaaattccaatgatccgtttaccagagcaattagactatgttaaaaattcatatcatttgtaacttcttttaattactgaattgatattaaaaacaaaatatggctagggcatgtcctattcttctgggcaaatgtggatgaaaaggtcacttgctacctttgacaactatgaacatgatggttaatcttctttctttttttttttttttttttgagacggagtctcactctgtcgcccaggctggagtacagtggcacaatcttggctcactgcaacctccgcctcccctccgcctcccagattcaagcacttctcctgcctcagcctcccaagtagctgagattataggcgtgtaccaccacacctggctaatttttgtattttagtagagaagggtttcaccatgttggccaggctggtctcaaacctctgacctcaaatgatccacccccatcagcctcccaaagtgctgggattataggcatgagccactgcactgggcaggttaatcttctttcaaaagagtctgctctttctacccaattggcgaagcaaatccccaggattcaccgaacaaatggattaagcacccactgagtgcctagcatgtgcctggacaccaggccaccgggaagatgctccccctttgacttgtctatgacatgctatgtctctcaccagatcccttcctggaggtcgggcttctgtaacatggctctgcccccaaaataaaattttcaccacgagtcagggatcggcaaacattttctgtaaagagccagaaagtagatattttaagtcataaggtccctgttaacaactacttgactctgccattgtagcacaaaggcagccacagacaaaacaagcaagtagtcatgtctgtgttccaataagactttatttacaaaaacagcaggcacagacaagatttggcccacaggcatagattcccaactcatggtggtgaagtacagaaaaaaacacctgtctacaagcttttgtaagaaatcaggctaaatgttacctatgttttggttggaagatttctttggtttgaggaatgctttcctcttgcattggcatgccaagaggatagatgactctgaaagacgcctcttcagacatacctgtcatcacacaagatcaacttcttcagtttaaatgacacaaatccatattgtggaaggaaaatatgtagtgccttagcttcactaatagttgtaaaacttctttttaagacatcaaaggctagaggattcattttatgcagtgcgaacatctaataacactctctgtgtcaaatatatattgtacattaccttaaactattgtaatagctaggtaaaaatccttgtataaaagaatgttttcccccacacaaagggcagagtattgagcactaatttcctattaaaagtatatatatgtatctgtgggtcactggtgtccagacttgtatttgcatttgtgtttacttgaggaacttgaacactaacaactggtaaaatcccattgtaattcttacagcattttgactttattttcctgcagtgaattgtgttgtgtaaagattagggctttaaaatcttattagcaagctttgttttgttttaattattgttgctgttgtaactagatttaatttatttttagttggaggtttgacctaagtctggaccaattgattgcttttcaatacaactttgcaaagaacttcctttttccacaggtggctttgttcgattaaagtctacactaataaaaata

SEQ ID NO: 15052 - DNA, 1757 bp, Homo sapiens
  source 1..1757: mol_type = unassigned DNA
agccaacgaggggaagaaaggagttggggcaaaacaggaggcgtttccctacccgcatacatccccgtccccgagacacccaatccccccacccccagcctgcccgcgcctcccgcccccagctcctcgccctggggacagctggcagccccgcgcggaccagacacaaagccgatcaatcccggaggcgtgggggcggagggacgacccgccggggctttcccgggcgctgctctcctcctgctgccccctcgctaggacccggcggacgcctcgtctggttttcacgccctctagcccctacccccacacccccaaaacagaacagacccccatccctgggctggaggacccgcctcttggcagccagctgagaaggcgccccggggagggggaaactgacatcccatctagagccgtccctcctcttcctcccctcccgactctctgctcctttcccgccccagaagttcaagggcccccggcctcctgcgctcctgccgccgggaccctcgacctcctcagagcagccggctgccgccccgggaagatggcgaggaggagccgccaccgcctcctcctgctgctgctgcgctacctggtggtcgccctgggctatcataaggcctatgggttttctgccccaaaagaccaacaagtagtcacagcagtagagtaccaagaggctattttagcctgcaaaaccccaaagaagactgtttcctccagattagagtggaagaaactgggtcggagtgtctcctttgtctactatcaacagactcttcaaggtgattttaaaaatcgagctgagatgatagatttcaatatccggatcaaaaatgtgacaagaagtgatgcggggaaatatcgttgtgaagttagtgccccatctgagcaaggccaaaacctggaagaggatacagtcactctggaagtattagtggctccagcagttccatcatgtgaagtaccctcttctgctctgagtggaactgtggtagagctacgatgtcaagacaaagaagggaatccagctcctgaatacacatggtttaaggatggcatccgtttgctagaaaatcccagacttggctcccaaagcaccaacagctcatacacaatgaatacaaaaactggaactctgcaatttaatactgtttccaaactggacactggagaatattcctgtgaagcccgcaattctgttggatatcgcaggtgtcctgggaaacgaatgcaagtagatgatctcaacataagtggcatcatagcagccgtagtagttgtggccttagtgatttccgtttgtggccttggtgtatgctatgctcagaggaaaggctacttttcaaaagaaacctccttccagaagagtaattcttcatctaaagccacgacaatgagtgaaaatgtgcagtggctcacgcctgtaatcccagcactttggaaggccgcggcgggcggatcacgaggtcaggagttctagaccagtctggccaatatggtgaaaccccatctctactaaaatacaaaaattagctgggcatggtggcatgtgcctgcagttccagctgcttgggagacaggagaatcacttgaacccgggaggcggaggttgcagtgagctgagatcacgccactgcagtccagcctgggtaacagagcaagattccatctcaaaaaataaaataaataaataaataaatactggtttttacctgtagaattcttacaataaatatagcttgatattc

SEQ ID NO: 15053 - DNA, 3912 bp, Homo sapiens
  source 1..3912: mol_type = unassigned DNA
tagacctcagcttcctctgtcaccatggtgccggctcggctgggcccggcggtcgccatggtaactggggcgggtcgcagggtcctggcaggctgggcgcatgcgcgcggggactacaagccgcgccgcgctgccgctggcccctcagcaaccctcgacatggcgctgaggcggccaccgcgactccggctctgcgctcggctgcctgacttcttcctgctgctgcttttcaggggctgcctgataggggctgtaaatctcaaatccagcaatcgaaccccagtggtacaggaatttgaaagtgtggaactgtcttgcatcattacggattcgcagacaagtgaccccaggatcgagtggaagaaaattcaagatgaacaaaccacatatgtgttttttgacaacaaaattcagggagacttggcgggtcgtgcagaaatactggggaagacatccctgaagatctggaatgtgacacggagagactcagccctttatcgctgtgaggtcgttgctcgaaatgaccgcaaggaaattgatgagattgtgatcgagttaactgtgcaagtgaagccagtgacccctgtctgtagagtgccgaaggctgtaccagtaggcaagatggcaacactgcactgccaggagagtgagggccacccccggcctcactacagctggtatcgcaatgatgtaccactgcccacggattccagagccaatcccagatttcgcaattcttctttccacttaaactctgaaacaggcactttggtgttcactgctgttcacaaggacgactctgggcagtactactgcattgcttccaatgacgcaggctcagccaggtgtgaggagcaggagatggaagtctatgacctgaacattggcggaattattgggggggttctggttgtccttgctgtactggccctgatcacgttgggcatctgctgtgcatacagacgtggctacttcatcaacaataaacaggatggagaaagttacaagaacccagggaaaccagatggagttaactacatccgcactgacgaggagggcgacttcagacacaagtcatcgtttgtgatctgagacccgcggtgtggctgagagcgcacagagcgcacgtgcacatacctctgctagaaactcctgtcaaggcagcgagagctgatgcactcggacagagctagacactcattcagaagcttttcgttttggccaaagttgaccactactcttcttactctaacaagccacatgaatagaagaattttcctcaagatggacccggtaaatataaccacaaggaagcgaaactgggtgcgttcactgagttgggttcctaatctgtttctggcctgattcccgcatgagtattagggtgatcttaaagagtttgctcacgtaaacgcccgtgctgggccctgtgaagccagcatgttcaccactggtcgttcagcagccacgacagcaccatgtgagatggcgaggtggctggacagcaccagcagcgcatcccggcgggaacccagaaaaggcttcttacacagcagccttacttcatcggcccacagacaccaccgcagtttcttcttaaaggctctgctgatcggtgttgcagtgtccattgtggagaagctttttggatcagcattttgtaaaaacaaccaaaatcaggaaggtaaattggttgctggaagagggatcttgcctgaggaaccctgcttgtccaacagggtgtcaggatttaaggaaaaccttcgtcttaggctaagtctgaaatggtactgaaatatgcttttctatgggtcttgtttattttataaaattttacatctaaatttttgctaaggatgtattttgattattgaaaagaaaatttctatttaaactgtaaatatattgtcatacaatgttaaataacctatttttttaaaaaagttcaacttaaggtagaagttccaagctactagtgttaaattggaaaatatcaataattaagagtattttacccaaggaatcctctcatggaagtttactgtgatgttccttttctcacacaagttttagcctttttcacaagggaactcatactgtctacacatcagaccatagttgcttaggaaacctttaaaaattccagttaagcaatgttgaaatcagtttgcatctcttcaaaagaaacctctcaggttagctttgaactgcctcttcctgagatgactaggacagtctgtacccagaggccacccagaagccctcagatgtacatacacagatgccagtcagctcctggggttgcgccaggcgcccccgctctagctcactgttgcctcgctgtctgccaggaggccctgccatccttgggccctggcagtggctgtgtcccagtgagctttactcacgtggcccttgcttcatccagcacagctctcaggtgggcactgcagggacactggtgtcttccatgtagcgtcccagctttgggctcctgtaacagacctctttttggttatggatggctcacaaaatagggcccccaatgctattttttttttttaagtttgtttaattatttgttaagattgtctaaggccaaaggcaattgcgaaatcaagtctgtcaagtacaataacatttttaaaagaaaatggatcccactgttcctctttgccacagagaaagcacccagacgccacaggctctgtcgcatttcaaaacaaaccatgatggagtggcggccagtccagccttttaaagaacgtcaggtggagcagccaggtgaaaggcctggcggggaggaaagtgaaacgcctgaatcaaaagcagttttctaattttgactttaaatttttcatccgccggagacactgctcccatttgtggggggacattagcaacatcactcagaagcctgtgttcttcaagagcaggtgttctcagcctcacatgccctgccgtgctggactcaggactgaagtgctgtaaagcaaggagctgctgagaaggagcactccactgtgtgcctggagaatggctctcactactcaccttgtctttcagcttccagtgtcttgggttttttatactttgacagcttttttttaattgcatacatgagactgtgttgactttttttagttatgtgaaacactttgccgcaggccgcctggcagaggcaggaaatgctccagcagtggctcagtgctccctggtgtctgctgcatggcatcctggatgcttagcatgcaagttccctccatcattgccaccttggtagagagggatggctccccaccctcagcgttggggattcacgctccagcctccttcttggttgtcatagtgatagggtagccttattgccccctcttcttataccctaaaaccttctacactagtgccatgggaaccaggtctgaaaaagtagagagaagtgaaagtagagtctgggaagtagctgcctataactgagactagacggaaaaggaatactcgtgtattttaagatatgaatgtgactcaagactcgaggccgatacgaggctgtgattctgcctttggatggatgttgctgtacacagatgctacagacttgtactaacacaccgtaatttggcatttgtttaacctcatttataaaagcttcaaaaaaacccaaacattgcttcattctttgttatttgctcttacgttgggtttgtctcttcttcctagcatttcagtggttaggcatgcacactaaaaatgctatcaatcacccatccaccagggaagtcagtgctgggcaggaggtcagcctgtgtgctcaagagcagtgctgcgcctctccgccaccgagcccacctgtgttgcggttcccacttgggatggcagtgggcagatctcagtggcatcccatcccccaaa

SEQ ID NO: 15054 - DNA, 3363 bp, Homo sapiens
  source 1..3363: mol_type = unassigned DNA
agcaaccctcgacatggcgctgaggcggccaccgcgactccggctctgcgctcggctgcctgacttcttcctgctgctgcttttcaggggctgcctgataggggctgtaaatctcaaatccagcaatcgaaccccagtggtacaggaatttgaaagtgtggaactgtcttgcatcattacggattcgcagacaagtgaccccaggatcgagtggaagaaaattcaagatgaacaaaccacatatgtgttttttgacaacaaaattcaggtgaagccagtgacccctgtctgtagagtgccgaaggctgtaccagtaggcaagatggcaacactgcactgccaggagagtgagggccacccccggcctcactacagctggtatcgcaatgatgtaccactgcccacggattccagagccaatcccagatttcgcaattcttctttccacttaaactctgaaacaggcactttggtgttcactgctgttcacaaggacgactctgggcagtactactgcattgcttccaatgacgcaggctcagccaggtgtgaggagcaggagatggaagtctatgacctgaacattggcggaattattgggggggttctggttgtccttgctgtactggccctgatcacgttgggcatctgctgtgcatacagacgtggctacttcatcaacaataaacaggatggagaaagttacaagaacccagggaaaccagatggagttaactacatccgcactgacgaggagggcgacttcagacacaagtcatcgtttgtgatctgagacccgcggtgtggctgagagcgcacagagcgcacgtgcacatacctctgctagaaactcctgtcaaggcagcgagagctgatgcactcggacagagctagacactcattcagaagcttttcgttttggccaaagttgaccactactcttcttactctaacaagccacatgaatagaagaattttcctcaagatggacccggtaaatataaccacaaggaagcgaaactgggtgcgttcactgagttgggttcctaatctgtttctggcctgattcccgcatgagtattagggtgatcttaaagagtttgctcacgtaaacgcccgtgctgggccctgtgaagccagcatgttcaccactggtcgttcagcagccacgacagcaccatgtgagatggcgaggtggctggacagcaccagcagcgcatcccggcgggaacccagaaaaggcttcttacacagcagccttacttcatcggcccacagacaccaccgcagtttcttcttaaaggctctgctgatcggtgttgcagtgtccattgtggagaagctttttggatcagcattttgtaaaaacaaccaaaatcaggaaggtaaattggttgctggaagagggatcttgcctgaggaaccctgcttgtccaacagggtgtcaggatttaaggaaaaccttcgtcttaggctaagtctgaaatggtactgaaatatgcttttctatgggtcttgtttattttataaaattttacatctaaatttttgctaaggatgtattttgattattgaaaagaaaatttctatttaaactgtaaatatattgtcatacaatgttaaataacctatttttttaaaaaagttcaacttaaggtagaagttccaagctactagtgttaaattggaaaatatcaataattaagagtattttacccaaggaatcctctcatggaagtttactgtgatgttccttttctcacacaagttttagcctttttcacaagggaactcatactgtctacacatcagaccatagttgcttaggaaacctttaaaaattccagttaagcaatgttgaaatcagtttgcatctcttcaaaagaaacctctcaggttagctttgaactgcctcttcctgagatgactaggacagtctgtacccagaggccacccagaagccctcagatgtacatacacagatgccagtcagctcctggggttgcgccaggcgcccccgctctagctcactgttgcctcgctgtctgccaggaggccctgccatccttgggccctggcagtggctgtgtcccagtgagctttactcacgtggcccttgcttcatccagcacagctctcaggtgggcactgcagggacactggtgtcttccatgtagcgtcccagctttgggctcctgtaacagacctctttttggttatggatggctcacaaaatagggcccccaatgctattttttttttttaagtttgtttaattatttgttaagattgtctaaggccaaaggcaattgcgaaatcaagtctgtcaagtacaataacatttttaaaagaaaatggatcccactgttcctctttgccacagagaaagcacccagacgccacaggctctgtcgcatttcaaaacaaaccatgatggagtggcggccagtccagccttttaaagaacgtcaggtggagcagccaggtgaaaggcctggcggggaggaaagtgaaacgcctgaatcaaaagcagttttctaattttgactttaaatttttcatccgccggagacactgctcccatttgtggggggacattagcaacatcactcagaagcctgtgttcttcaagagcaggtgttctcagcctcacatgccctgccgtgctggactcaggactgaagtgctgtaaagcaaggagctgctgagaaggagcactccactgtgtgcctggagaatggctctcactactcaccttgtctttcagcttccagtgtcttgggttttttatactttgacagcttttttttaattgcatacatgagactgtgttgactttttttagttatgtgaaacactttgccgcaggccgcctggcagaggcaggaaatgctccagcagtggctcagtgctccctggtgtctgctgcatggcatcctggatgcttagcatgcaagttccctccatcattgccaccttggtagagagggatggctccccaccctcagcgttggggattcacgctccagcctccttcttggttgtcatagtgatagggtagccttattgccccctcttcttataccctaaaaccttctacactagtgccatgggaaccaggtctgaaaaagtagagagaagtgaaagtagagtctgggaagtagctgcctataactgagactagacggaaaaggaatactcgtgtattttaagatatgaatgtgactcaagactcgaggccgatacgaggctgtgattctgcctttggatggatgttgctgtacacagatgctacagacttgtactaacacaccgtaatttggcatttgtttaacctcatttataaaagcttcaaaaaaaccc

SEQ ID NO: 15055 - DNA, 3652 bp, Homo sapiens
  source 1..3652: mol_type = unassigned DNA
tagacctcagcttcctctgtcaccatggtgccggctcggctgggcccggcggtcgccatggtaactggggcgggtcgcagggtcctggcaggctgggcgcatgcgcgcggggactacaagccgcgccgcgctgccgctggcccctcagcaaccctcgacatggcgctgaggcggccaccgcgactccggctctgcgctcggctgcctgacttcttcctgctgctgcttttcaggggctgcctgataggggctgtaaatctcaaatccagcaatcgaaccccagtggtacaggaatttgaaagtgtggaactgtcttgcatcattacggattcgcagacaagtgaccccaggatcgagtggaagaaaattcaagatgaacaaaccacatatgtgttttttgacaacaaaattcagggagacttggcgggtcgtgcagaaatactggggaagacatccctgaagatctggaatgtgacacggagagactcagccctttatcgctgtgaggtcgttgctcgaaatgaccgcaaggaaattgatgagattgtgatcgagttaactgtgcaagtgaagccagtgacccctgtctgtagagtgccgaaggctgtaccagtaggcaagatggcaacactgcactgccaggagagtgagggccacccccggcctcactacagctggtatcgcaatgatgtaccactgcccacggattccagagccaatcccagatttcgcaattcttctttccacttaaactctgaaacaggcactttggtgttcactgctgttcacaaggacgactctgggcagtactactgcattgcttccaatgacgcaggctcagccaggtgtgaggagcaggagatggaagtctatgacctgaacattggcggaattattgggggggttctggttgtccttgctgtactggccctgatcacgttgggcatctgctgtgcatacagacgtggctacttcatcaacaataaacaggatggagaaagttacaagaacccagggaaaccagatggagttaactacatccgcactgacgaggagggcgacttcagacacaagtcatcgtttgtgatctgagacccgcggtgtggctgagagcgcacagagcgcacgtgcacatacctctgctagaaactcctgtcaaggcagcgagagctgatgcactcggacagagctagacactcattcagaagcttttcgttttggccaaagttgaccactactcttcttactctaacaagccacatgaatagaagaattttcctcaagatggacccggtaaatataaccacaaggaagcgaaactgggtgcgttcactgagttgggttcctaatctgtttctggcctgattcccgcatgagtattagggtgatcttaaagagtttgctcacgtaaacgcccgtgctgggccctgtgaagccagcatgttcaccactggtcgttcagcagccacgacagcaccatgtgagatggcgaggtggctggacagcaccagcagcgcatcccggcgggaacccagaaaaggcttcttacacagcagccttacttcatcggcccacagacaccaccgcagtttcttcttaaaggctctgctgatcggtgttgcagtgtccattgtggagaagctttttggatcagcattttgtaaaaacaaccaaaatcaggaaggtaaattggttgctggaagagggatcttgcctgaggaaccctgcttgtccaacagggtgtcaggatttaaggaaaaccttcgtcttaggctaagtctgaaatggtactgaaatatgcttttctatgggtcttgtttattttataaaattttacatctaaatttttgctaaggatgtattttgattattgaaaagaaaatttctatttaaactgtaaatatattgtcatacaatgttaaataacctatttttttaaaaaagttcaacttaaggtagaagttccaagctactagtgttaaattggaaaatatcaataattaagagtattttacccaaggaatcctctcatggaagtttactgtgatgttccttttctcacacaagttttagcctttttcacaagggaactcatactgtctacacatcagaccatagttgcttaggaaacctttaaaaattccagttaagcaatgttgaaatcagtttgcatctcttcaaaagaaacctctcaggttagctttgaactgcctcttcctgagatgactaggacagtctgtacccagaggccacccagaagccctcagatgtacatacacagatgccagtcagctcctggggttgcgccaggcgcccccgctctagctcactgttgcctcgctgtctgccaggaggccctgccatccttgggccctggcagtggctgtgtcccagtgagctttactcacgtggcccttgcttcatccagcacagctctcaggtgggcactgcagggacactggtgtcttccatgtagcgtcccagctttgggctcctgtaacagacctctttttggttatggatggctcacaaaatagggcccccaatgctattttttttttttaagtttgtttaattatttgttaagattgtctaaggccaaaggcaattgcgaaatcaagtctgtcaagtacaataacatttttaaaagaaaatggatcccactgttcctctttgccacagagaaagcacccagacgccacaggctctgtcgcatttcaaaacaaaccatgatggagtggcggccagtccagccttttaaagaacgtcaggtggagcagccaggtgaaaggcctggcggggaggaaagtgaaacgcctgaatcaaaagcagttttctaattttgactttaaatttttcatccgccggagacactgctcccatttgtggggggacattagcaacatcactcagaagcctgtgttcttcaagagcaggtgttctcagcctcacatgccctgccgtgctggactcaggactgaagtgctgtaaagcaaggagctgctgagaaggagcactccactgtgtgcctggagaatggctctcactactcaccttgtctttcagcttccagtgtcttgggttttttatactttgacagcttttttttaattgcatacatgagactgtgttgactttttttagttatgtgaaacactttgccgcaggccgcctggcagaggcaggaaatgctccagcagtggctcagtgctccctggtgtctgctgcatggcatcctggatgcttagcatgcaagttccctccatcattgccaccttggtagagagggatggctccccaccctcagcgttggggattcacgctccagcctccttcttggttgtcatagtgatagggtagccttattgccccctcttcttataccctaaaaccttctacactagtgccatgggaaccaggtctgaaaaagtagagagaagtgaaagtagagtctgggaagtagctgcctataactgagactagacggaaaaggaatactcgtgtattttaagatatgaatgtgactcaagactcgaggccgatacgaggctgtgattctgcctttggatggatgttgctgtacacagatgctacagacttgtactaacacaccgtaatttggcatttgtttaacctcatttataaaagcttc

SEQ ID NO: 15056 - DNA, 4378 bp, Homo sapiens
  source 1..4378: mol_type = unassigned DNA
gtccgtgcccctgcggggagcgcgccggggctgccccccgaatgacgggcggaaggttcgacttcgacgatggcggcacctactgcggcggctgggaggagggcaaggcgcacgggcatggcatctgcacggggcccaagggccagggcgagtactcgggctcctggtcgcacggcttcgaggtggtcggaggctacacctggcccagcggcaacacctaccagggctactgggcgcagggcaagcggcacgggctgggggtggagacgaagggcaagtggatgtaccggggggagtggtcacatggtttcaaggggcgctacggggtccggcagagcctgtgcacccccgctcgctacgagggtacctggagtaacgggctgcaagacgggtacggcgtggagacctacggggacggaggtacctaccagggccagtgggccggaggcatgcggcatggctacggcgtgcgccagagcgtgccctacggcatggccacggtgatccgctcaccgctgcgtacctcgctggcctcgctgcgcagcgagcagagcaatggcagcgtgctccacgacgccgcagccgccgccgacagcccggccggcacccgcggcggtttcgtgctcaacttccacgcagacgctgagctagcgggcaagaagaagggcggcctcttccggaggggctcccttcttggaagcatgaaacttcgcaagtccgaatccaagtcttccatctcgagcaagcgcagctctgtccgcagcgacgcggccatgagcagaattagttccagcgatgccaactccacgatcagctttggcgatgtagattgtgatttttgcccggtggaagaccacgtggacgccaccaccacggaaacctacatgggcgagtggaagaacgacaagcgcaacggcttcggcgttagcgagcgctccaatggcatgaagtatgaaggggagtgggcaaataacaagaggcatggatatggctgtaccgtgtttcctgacggctccaaagaagagggaaaatacaaaaataatattctggtccgtgggataaggaagcagcttataccaataagacatacaaaaactagggagaaggtggacagagcaattgaaggcgcccaaagggcagctgccatggccagaaccaaagtggaaatagcaaattcaaggactgcacatgccagagcgaaggccgatgccgccgaccaggccgcgctggccgctcgccaggagtgcgacatcgcgagagctgtggccagggagctgtcacctgatttctaccaaccaggccctgattacgtcaaacagagatttcaggaaggtgtagatgctaaagaaaatccagaagaaaaggtaccagaaaagccacctacaccaaaggagtctcctcatttttatcgcaaaggcacgacacccccaagatctcctgaggcaagtcccaaacacagccactctcctgcttcctccccaaagcccctgaagaagcaaaaccccagctcaggggcgagactcaaccaagacaaaaggagtgtggctgatgagcaggtgacggccattgtcaataagcccttgatgtcaaaggctcccacgaaggaggcaggagcggttgtgccccagtccaagtactctggccgccaccacatccccaaccccagtaacggggagctgcattctcagtatcacggctactacgtgaagctgaacgccccccagcaccctccagtagacgtggaggacggcgatggatccagccagtcttcctcagcactggtgcacaagccatccgctaacaagtggagtccctccaaatctgtgacaaaaccagttgccaaagaaagcaaagctgagccaaaagctaagaagtctgaacttgctataccaaagaatccagcaagcaacgattcatgccctgctttggaaaaagaagccaattcaggccctaattcaatcatgattgtccttgtcatgctgttgaatatcgggttggccattctttttgttcactttctaacttgattggaattaggaaagtgaagtcctgacaactagtggtgtgttagcccacagttctctgcagtggtgccgtcagccctttaaatggcccaccccaggcagactcagacacagggaaggaggcttggaattaggatgggatcgcgagagagatgaaacttggaaaattcagccagaggacctgttcggttcccctgggagtgctttgtggctttggggtcctctgggagctgaagcacacggccatgttggagagcaaaacttaataataattcttttttaaaatctgctgaagcagccccatccggcgaagttcttggcattggctactccatctgtcctagcagagtgtgactaaactggaaatgtatggagctgcattttttttttttttttgatggaagtcaacagctgccttactattttaccatctgacgtttttagtagggagctggggaaacgactgcccgaggaatgcggtcggaggattgtgttgctgtggacgtggttccaacattcactcctatctcattagaagaaataggtagcagcatcactcaccagtcttatgccatgacctgctgctttaacatctcctggaatgttctgggagagaacgtttcgtttgcttgtgcacgactctgttcatttttgctgtttatttaaatctgacgtatagtcatctaccacctgcggtcctggccggacgaaacacacgtgttgcatctcaaggaaaagaaacaacaaaatgctagtgaaaatgtgcttattttgatagcaatataccatcttttatgtcatttattcttcctatacttgtaaaaggttatttatctttaaaatttagcaatttgaagacactatgccttcctaagaactaatttaattctaaatatttttaacattactgaggtgaattatttatgcacttaggaagtgctaaattttaaaagctgaaacacaacagaattctaagaaatatagtccaaacgttgcatggattgcagtaatcagtgtttaaaggattcagtttctttgctgacgtactttacaaccaaataaaatcttgtcggtggctgtgttaattcccatgaaagttaagcaagatgctattaataaactgctctgctctttcttgttttctttttccaacttaaatttctgttgaatacattcaggtagaacataaagccttgttcaatcactgcctctcagttttctgcctttcctgtttttcaaagtccttttgtaatttcatttcacattttaaaggcttagacatttttattttaaatatgtgtcttttacagtcttttgtcattctgacatttctggatttttgctgttttataatttaccctttgttattcagaagcatgcttacttatagaaactaaatggtctttataaaagtaattacttaaaaagaaatcaggggaagaaagatatctatctaatctattaaatctttataaaacattacattgcagagggggagctactcctaaatattttcatgatttgcatggtttaatcagatttttttttttttttacaccatattagctaccttttcaatggagaagagacagttcacacaattccctggttagcacagatgtggactgagtgctttgtcacctgcagggtagtaacccagtgatgtttcttacagaagcacaatatgttgaaaatcctgggtgtgaccaatatggaataaagaagaaggcagaaagagagcaaatgaaaaatttcaacttgtatattcattttttacattttgctttgacttttaaatttaggaagtccgtttttacctgagaacaaatgtttaaagttcctgcgtcactctcagtactctcactgcccctcccaaaccctatagctccttacgctgggaaagctggttttttaaaaaaataataataaaatatttaatcttattaagtgttcatttaaaatgcgtaatgctttggaaataatgggtaacagatagcgagaggatatgtttataaagtgagcatgttggtcccatttataaatatatgtatgatttataagcttttttaaaacaaagctcaaattgttggtatttttctaaaatgtgcacagctgtattttacatgaaggctctttctaatgggttgttatactgtactcaacattttggacagcacatgaagtctgccaatgtacttaataaaacatgactttgtttatttaaagtttcttgctgtgaaaaagaactccctacctgtgagttcctttatttataattcttgaaaccaaaatgtataatgtacagttttcacaactgtatctgctctaataaaaaaaagttggttattaatgaa

SEQ ID NO: 15057 - DNA, 1923 bp, Homo sapiens
  source 1..1923: mol_type = unassigned DNA
ctttgaaaaggctggggacccctccaccccaccctttcactgggcttcttaaagagatcacaccgttttcccttggacttcttggaaggcagacttgggacgctttgtggggactttgaacctttccttcctgctttctttccagcaggcagccttgctctggctggtggagtcggggctcccgggcatggcactgactagccgacccggtgctgacttggcgccggggctctttcagcctctgctggcatcctgcttcccccctcctggggtgcagtggtgagtctgggggcctgcccccgagggcactggaggagtgttgcaggcatcacccacgccctctgcacccacgctggaggacggggaggttgtcaggggctatgatgagatgagtgggggccgcttcgactttgatgatggaggggcgtactgcgggggctgggaggggggaaaggcccatgggcatggactgtgcacaggccccaagggccagggcgaatactctggctcctggaactttggctttgaggtggcaggtgtctacacctggcccagcggaaacacctttgagggatactggagccagggcaaacggcatgggctgggcatagagaccaaggggcgctggctctacaagggcgagtggacacatggcttcaagggacgctacggaatccggcagagctcaagcagcggtgccaagtatgagggcacctggaacaatggcctgcaagacggctatggcaccgagacctatgctgatggagggatgtgttaaaatcgccctcagaatatggtcgagacaatgaaacaagacaatgaagcactgagcatcatgcctggcacataggaaatgccaaaatatatattcccgtatttccttcacattccaaagggtgaattaattcaggatggcctgaaccatagctgtcactgtcttcgggaggatatttgaggacaaaaacgagtttttgactttggaacagtaaataagacaagactttgattcgcttagttctgccttgagtcctgccagtgtagatggaatccatgccagacatgattccatttcgaatgtagaatcagcataatttaacctcatcttggaaatctcatgtcccagttcacagccaggcatcagcgtgacagtcagctgagctgctgtcttggcagcttctgggcattctatggagaccccaggagagcacagcagacccttagcagaacagaaaagcggaccgtattagtctttcctgtccacggccttgttttcagtgattcatgtgcccgattggccaaatctctgcagacgtgcccctgtccgaggccaggcttctgggattcatcgagcttgcttgtttccgggacctgctaattccgtgcccagcagctgttccccggagcaggccctgccctccacaccctcatgaggaatgccgagtctcattttctgagggccctggttgagggtggggtgtggggcgagggggacagggttgcttcctgccatagacttcctgccttggagggttatccttgttctcacctatcccttcccgagctgaagccacagagtaggagagaagttagggctggcacacctccctcccgtgtaactttcactccctgcttaaagggaactgatgagagttgcctggcacagatctgtgcctggcagaatccacagagcagcccaggtgtgctaggaactccagagtgacccctgctccaggccaggaatgagcaccttgtgcctggaggtcttcctgccactgctggctgcccattgctgtggatggggtagagctggagtcacacatggaggctggacagctgcatgcagcctgcaggggacactctggatggcatgtaccatgtttttattatttctatttttaattaaattggaatcctttatggata

SEQ ID NO: 15058 - DNA, 4787 bp, Homo sapiens
  source 1..4787: mol_type = unassigned DNA
ggattttcagtgttccaggactgggtgttctgctggtctccctctcccctcccttccccgattccccggtgccctccctgcgcgcagacccaggggactctgagaatggaagggagctctcattcccgggaggaaaagacaccaggttccctgggctgcctgcactcagttctcagcctccttcctcatgcctccagccactgcccgggtctgcggcacgggcgcgatttgaaatacccctccttcccgctttgaagaaggctgggctggctgggggttattttgggagcagcttctgagatccaatggccttgttagggcaacactgacctttccgtcccagaaggagggcaggattggagaagggggcggggcagcggcggggagaccgacagccccgcacacccactggggtggagaagggggccagcgggctgcgggaattcagcctccggcgggggctgccaccgaggggaatttcccctctttgaaaaggctggggacccctccaccccaccctttcactgggcttcttaaagagatcacaccgttttcccttggacttcttggaaggcagacttgggacgctttgtggggactttgaacctttccttcctgctttctttccagcaggcagccttgctctggctggtggagtcggggctcccgggcatggcactgactagccgacccggtgctgacttggcgccggggctctttcagcctctgctggcatcctgcttcccccctcctggggtgcagtggtgagtctgggggcctgcccccgagggcactggaggagtgttgcaggcatcacccacgccctctgcacccacgctggaggacggggaggttgtcaggggctatgatgagatgagtgggggccgcttcgactttgatgatggaggggcgtactgcgggggctgggaggggggaaaggcccatgggcatggactgtgcacaggccccaagggccagggcgaatactctggctcctggaactttggctttgaggtggcaggtgtctacacctggcccagcggaaacacctttgagggatactggagccagggcaaacggcatgggctgggcatagagaccaaggggcgctggctctacaagggcgagtggacacatggcttcaagggacgctacggaatccggcagagctcaagcagcggtgccaagtatgagggcacctggaacaatggcctgcaagacggctatggcaccgagacctatgctgatggagggacgtaccaaggccagttcaccaacggcatgcgccatggctacggagtacgccagagcgtgccctacgggatggccgtggtggtgcgctcgccgctgcgcacgtcgctgtcgtccctgcgcagcgagcacagcaacggcacggtggccccggactctcccgcctcgccggcctccgacggccccgcgctgccctcgcccgccatcccgcgtggcggcttcgcgctcagcctcctggccaatgccgaggcggccgcgcgggcgcccaagggcggcggcctcttccagcggggcgcgctgctgggcaagctgcggcgcgcagagtcgcgcacgtccgtgggtagccagcgcagccgtgtcagcttccttaagagcgacctcagctcgggcgccagcgacgccgcgtccaccgccagcctgggagaggccgccgagggcgccgacgaggccgcacccttcgaggccgatatcgacgccaccaccaccgagacctacatgggcgagtggaagaacgacaaacgctcgggcttcggcgtgagcgaacgctccagtggcctccgctacgagggcgagtggctggacaacctgcgccacggctatggctgcaccacgctgcccgacggccaccgcgaggagggcaagtaccgccacaacgtgctggtcaaggacaccaagcgccgcatgctgcagctcaagagcaacaaggtccgccagaaagtggagcacagtgtggagggtgcccagcgcgccgctgctatcgcgcgccagaaggccgagattgccgcctccaggacaagccacgccaaggccaaagctgaggcagcggaacaggccgccctggctgccaaccaggagtccaacattgctcgcactttggccagggagctggctccggacttctaccagccaggtccggaatatcagaagcgccggctgctgcaggagatcctggagaactcggagagcctgctggagccccccgaccggggcgccggcgcagcgggcctcccacagccgccccgcgagagcccgcagctgcacgagcgtgagacccctcggcccgagggtggctccccgtcaccggccgggacgcccccgcagcccaagcggcccaggcccggggtgtccaaggacggcctgctgagcccaggcgcctggaacggcgagcccagcggtgagggcagccggtcagtcactccgtccgagggcgcgggccgccgcagccccgcgcgtccagccaccgagcgcatggccatcgaggctctgcaggcaccgcctgcgccgtcgcgggagccggaggtggcgctttaccagggctaccacagctatgctgtgcgcaccacgccgcccgagcccccaccctttgaggaccagcccgagcccgaggtctccgggtccgagtccgcgccctcgtccccggccaccgccccgctgcaggcccccacgctccgaggccccgagcctgcacgcgagacccccgccaagctggagcccaagcccatcatccccaaagccgagcccagggccaaggcccgcaagactgaggctcgagggctgaccaaggcgggggccaagaagaaggcgcggaaggaggccgcactggcggcagaggcggaggtggaggtggaagaggtccccaacaccatcctcatctgcatggtgatcctgctgaacatcggcctggccatcctctttgttcacctcctgacctgaccgtcgcttaccagagccagaagttcctgctgaggacatgaggacccgtctttttgcagtgccaggcagggtggccaaagaggactggactctggacctggagccccgtggtccagttcacattcaccccacaagagtttcaggaggcctcccacggtgcctgtgctgggtggcggtggtggtgccaagaggaatggaatgtcctgggctccttcaggagctctctacccaggggcaaggagagcccagagagaagcgccctggtctcttgagcttcctgatctgctcctgtcccccgctctcctccactcccttgcctttccctaggttgtcccctccctgggcttttgtgtgttttgggagatgtcacctaaccaggacattgatattcaatcccatcccccttcctcccaccctgccccactttgatttaatcctttggctgtgggctgaggcctcccagggaagctgggtggggtgggtgttgagaccccctcagaccagcacagagacctgtccttgtgcagtctgcaccctgcactccctcccttgcctgtagatgttctggatgacagtagaggaaatggacaaggtcagtttgaatatcccagaacacagtgctctgtctcctcccaccagtccagttagcttcccttctggaccaatagacgaggggagaccccatggatcctctggctgggaagccactgaccaggtggccagggggcagggtgggaagaggggttaaggtgcagtgatgatggcctgttttggagtgtgtctgagactgggattgcatttggggtttcccgtgtgcttgggatgctagagggtcacctgcaggaggcctggggccggcgagaaatctcctgtgatgccctgtgaaatggcttgtctcctcccccatcagggcccaccgaaagctcaggggagcacagaagcccatggaagcccagggagatgtccctggggcagacactaaggcaggtgttgaagacaagctgcttgtcaagaagcatttcccggcaagagaggggcaagtctggggctccaactgggtacagcctgggtgcagttataagcccctttggcttacttggtagaagatggctacttggatgtacctcacttaaagatgttttgtaccacactaggtctctgggcccttgtgcttcctgtgggtggggtgagggccaaaggctatggtttcctgcctccaggagaatggagagaaagggcttccaggcccctccaagcctggggaaggacgtggcatccaagctgagccagagggaactgctgctgtcctcccttcatttctgtggaccttggaggctttggctttgtggcagggcctccccaggcagctctgggacctaggagtttgcttctgatagggtcagctttcccatttcccttcaatgcttgggaaccttctcccttagcttcacacttgccgtttcaagccctgctgggaccttgtggcttggctggaatccaggactgtattttcatggagaagaacctgcagattcttccatcctcagctggccatggcccacagctctgcatctgcatctgagcttctcaagactcctggagcatgaggggaatggggcggggccactgctctgtgctgacgggctccgtctcggagattcttgtcctgttttttttctgttgtttttttttggctggtgctggggacaagcctgtgcctgccaaagctcccaggccaagtttgggggctggtgtttggggttgggtttggggttcaggatgctgcagtctgtgcaataataaacccgcatctgctcacgggc

SEQ ID NO: 15059 - DNA, 3985 bp, Homo sapiens
  source 1..3985: mol_type = unassigned DNA
agcgcgagacgctggtcaggctccgcggcgcagctcgaaaaggaataatcgcccccgattgactgaaattcctccggagccggcgccgcggccgcccgcgcccgagaccgcgctccggggccgcgtcctcctctcctccggaaaacgctcgcgacccagggccgccggcggccgcgactctgctgtgtcgatcgcctgagtccgttttcaccgtttgcgggatctggaaccgagttacatgcatgtccagtgggggcaggtttaattttgacgacggagggtcctactgtggaggctgggaggacggcaaggcgcacggccatggcgtctgcaccggccccaagggccaaggcgaatacaccggctcgtggagccacggcttcgaggtgctgggcgtctacacctggcccagcggcaacacgtaccagggcacctgggcgcagggcaagcgccacggcatcggcctggagagcaaggggaagtgggtgtacaagggcgagtggacgcacggattcaaggggcgctacggggtgcgggagtgcgcgggcaacggggccaaatacgaagggacctggagcaacgggctgcaggacggctacgggaccgagacctactcggacggagggacctaccagggccagtgggtcggtggcatgcgccagggctacggcgtccggcagagcgtcccgtatggcatggccgcggtcatccgctcacccctgaggacgtccatcaactccctgcgcagcgagcacaccaacggcacggcgctgcatcccgacgcctctccggcggtggccggcagcccggccgtgtcccgcgggggcttcgtgctcgtggcccacagtgactccgagatcctcaagagcaagaagaaggggctgtttcggcgctcgctgctgagtgggctgaagctgcgcaagtcggagtccaagagcagcctggccagccaacgcagcaagcagagctcctttcgcagcgaggcgggcatgagcaccgtcagctccacggccagcgacatccactccaccatcagcctgggcgaggctgaggccgagctggcggtcatcgaggacgacatcgacgccaccaccaccgagacctacgtgggcgagtggaagaacgacaaacgctccggcttcggcgtgagccagcgctcggacgggctcaagtacgagggcgagtgggccagcaaccggcgccatggctacggctgcatgaccttcccggacggcaccaaggaggagggcaagtacaagcagaacatcctcgtcggcggcaagcgcaagaacctcatccccctgcgggccagcaagatccgcgagaaggtggaccgcgccgttgaggccgctgagcgggccgccaccatcgccaagcagaaggctgagatcgcggcttccaggacctcccactctcgggcaaaggccgaggcagccctcacagcagctcagaaagcccaggaggaggcgcggatcgccaggatcactgccaaagagttctccccttccttccagcaccgggaaaacgggctggagtaccagaggccgaagcgtcagacctcctgtgacgacatcgaggtgctgtccaccgggacacccctgcagcaggagagccccgagctgtaccgcaagggcaccactccctccgacctgacccccgacgacagccccctgcagagcttccccaccagccccgcggccaccccgccgcccgcgcccgccgccaggaacaaggtcgcccacttctcgaggcaggtgtcggtggacgaggagcggggcggggacatccagatgctcctggagggccgggccggggactgcgcccgcagcagctggggcgaggagcaggccgggggctccaggggtgtccgcagcggtgccctgcgcggcggcctgctcgtggatgacttccgcacccgaggttcgggccgcaagcagcccgggaaccccaagccgcgggagcggcggacggagtcaccccccgtgttcacgtggacttcccaccaccgggccagcaaccacagccccggaggctccaggctgctggagctgcaggaggagaagctgagcaactaccggatggagatgaaacccttgctgaggatggagacgcatccccagaaaagacgctacagcaagggcggcgcctgccggggcttgggggacgaccaccgccccgaggaccggggcttcggggtgcagagactgcggtccaaggcccagaacaaggagaacttcaggccggcctcctccgcggagcccgccgtgcagaaactggcgagcctgcggctgggcggggccgagccccggttgctgcgttgggacttgaccttctccccgccccagaaatccttgcctgtcgctctagagtccgacgaggagaatggggatgagctcaagtccagtacgggctcagcgcctatcctggtggtcatggtgatcttgctcaacatcggagtcgccattctgtttattaactttttcatctgatgagatgtcgcggtagcaaaaatagagaaagggtagaaaaaagggacattaaaattaaaagcaaaaccacaagaagggaaagaccgcaactcggacagcccagcgacttccaagtcctctcacagaagaaccacacgattgggtatcactcacagtttgcctttttttctgggtaatgttttttggattttagccaaaattctttgcttgtataacactctgctgtgtggcatggcagaaggaggccagcacgcagcccctccagctccacgtggagacagaagggatcccggcacatcagtggtaacagcggacgttgtcctcgtggtcacacgtcccgtcttgggtgtggatggagggcagcccggggcagagcctcagccccgcggcccctgagtggcagggctgactcccgtcgacacgagcttagaaagtggattcactgctttctctgtctagaacagacgggtgacaagtatgggcaggaggcatggggcagggtggcccaccccagtgggcagtagcctggcctttttctgtgtgagatctgtgctgcacacctgagggagggggagggatcggccacctcctccctgtgagacggatgcaggtccttccctcttctcggcactgcccccggccttccatgagaagccgactccccacaccgagttttaaagcaaagcccttttcttctgctgcccactcactgtgggtcccattcggctgtttcccccaccagaccccagggaagccggggcccactccgatccgcctgggctcagctaagcacggaagccaagggggctgtgccgtggagctgggctcgcgccggggctctgggtgtgtgcgcttggcgtgcagggtggacgcgtggggttccgtgtccccagcagtgagggccctagaggacgccttctcccatggttactgatctccacgggttttcacatctctgtactgtgcctgcctcaacttcccctaacagatatgcatattccttccagatgcctcagtgctacaccacagtgggcctggtcccaggacaggaatgcggttcaaacccagtggcttgaaacttcctgagaaactgtagcatatccagccccctaaaatgtacaatgtaacttgttcagtccaacaaaaacaggttccttatgtttctgccttctccaccagggtcgctccatcacccaaacaaaagaacaaggtttgccaggatgtccgagtgccccctggccctggctctcgtgtgcatggacgtgcctgaggggtccgggcacggccatacgcaggacccctgtgcccggggaggcgctgcagggattccccatccggtcgtcttggggccagcccgtcttatggactctgccttgctttgcttatgtttagctgtttctctgctacctttcgagcagacttctttactacactgcactggattgctatatttttaaccagaaataaactaaagattagagcatgttccagttaaa

SEQ ID NO: 15060 - DNA, 815 bp, Homo sapiens
  source 1..815: mol_type = unassigned DNA
gtctccagcgggagcgcgagacgctggtcaggctccgcggcgcagctcgaaaaggaataatcgcccccgattgactgaaattcctccggagccggcgccgcggccgcccgcgcccgagaccgcgctccggggccgcgtcctcctctcctccggaaaacgctcgcgacccagggccgccggcggccgcgactctgctgtgtcgatcgcctgagtccgttttcaccgtttgcgggatctggaaccgagttacatgcatgtccagtgggggcaggtttaattttgacgacggagggtcctactgtggaggctgggaggacggcaaggcgcacggccatggcgtctgcaccggccccaagggccaaggcgaatacaccggctcgtggagccacggcttcgaggtgctgggcgtctacacctggcccagcggcaacacgtaccagggcacctgggcgcagggcaagcgccacggcatcggcctggagagcaaggggaagtgggtgtacaagggcgagtggacgcacggattcaaggggcgctacggggtgcgggagtgcgcgggcaacggggccaaatacgaagggacctggagcaacgggctgcaggacggctacgggaccgagacctactcggacggagatgccaccgcattcggggcagagccggggccggaagccagggagctgcctgctgctgctgctgctgctgctgctgctgctgctgctgctgtaagatggtttctgtgcagggaaccttggccggctctgcagctgcccgcctgcctggactctccgatatccactcctcagtgcacctga

SEQ ID NO: 15061 - DNA, 93 bp, Homo sapiens
  source 1..93: mol_type = unassigned DNA
atgccaccgcattcggggcagagccggggccggaagccagggagctgcctgctgctgctgctgctgctgctgctgctgctgctgctgctgctg

SEQ ID NO: 15062 - DNA, 2191 bp, Homo sapiens
  source 1..2191: mol_type = unassigned DNA
ggaattcgggtgactttgctccaagatacacgcgtgtgtcccgactctcactcaatttataggggagagggactcgccaaatccctgttttctgggggacctaccagggccagtgggtcggtggcatgcgccagggctacggcgtccggcagagcgtcccgtatggcatggccgcggtcatccgctcacccctgaggacgtccatcaactccctgcgcagcgagcacaccaacggcacggcgctgcatcccgacgcctctccggcggtggccggcagcccggccgtgtcccgcgggggcttcgtgctcgtggcccacagtgactccgagatcctcaagagcaagaagaaggggctgtttcggcgctcgctgctgagtgggctgaagctgcgcaagtcggagtccaagagcagcctggccagccaacgcagcaagcagagctcctttcgcagcgaggcgggcatgagcaccgtcagctccacggccagcgacatccactccaccatcagcctgggcgaggctgaggccgagctggcggtcatcgaggacgacatcgacgccaccaccaccgagacctacgtgggcgagtggaagaacgacaaacgctccggcttcggcgtgagccagcgctcggacgggctcaagtacgagggcgagtgggccagcaaccggcgccatggctacggctgcatgaccttcccggacggcaccaaggaggagggcaagtacaagcagaacatcctcgtcggcggcaagcgcaagaacctcatccccctgcgggccagcaagatccgcgagaaggtggaccgcgccgttgaggccgctgagcgggccgccaccatcgccaagcagaaggctgagatcgcggcttccaggacctcccactctcgggcaaaggccgaggcagccctcacagcagctcagaaagcccaggaggaggcgcggatcgccaggatcactgccaaagagttctccccttccttccagcaccgggaaaacgggctggagtaccagaggccgaagcgtcagacctcctgtgacgacatcgaggtgctgtccaccgggacacccctgcagcaggagagccccgagctgtaccgcaagggcaccactccctccgacctgacccccgacgacagccccctgcagagcttccccaccagccccgcggccaccccgccgcccgcgcccgccgccaggaacaaggtcgcccacttctcgaggcaggtgtcggtggacgaggagcggggcggggacatccagatgctcctggagggccgggccggggactgcgcccgcagcagctggggcgaggagcaggccgggggctccaggggtgtccgcagcggtgccctgcgcggcggcctgctcgtggatgacttccgcacccgaggttcgggccgcaagcagcccgggaaccccaagccgcgggagcggcggacggagtcaccccccgtgttcacgtggacttcccaccaccgggccagcaaccacagccccggaggctccaggctgctggagctgcaggaggagaagctgagcaactaccggatggagatgaaacccttgctgaggatggagacgcatccccagaaaagacgctacagcaagggcggcgcctgccggggcttgggggacgaccaccgccccgaggaccggggcttcggggtgcagagactgcggtccaaggcccagaacaaggagaacttcaggccggcctcctccgcggagcccgccgtgcagaaactggcgagcctgcggctgggcggggccgagccccggttgctgcgttgggacttgaccttctccccgccccagaaatccttgcctgtcgctctagagtccgacgaggagaatggggatgagctcaagtccagtacgggctcagcgcctatcctggtggtcatggtgatcttgctcaacatcggagtcgccattctgtttattaactttttcatctgatgagatgtcgcggtagcaaaaatagagaaagggtagaaaaaagggacattaaaattaaaagcaaaaccacaagaagggaaagaccgcaactcggacagcccagcgacttccaagtcctctcacagaagaaccacacgattggggtcgctccatcacccaaacaaaagaacaaggtttgccaggatgtccgagtgccccctggccctggctctcgtgtgcatggacgtgcc

SEQ ID NO: 15063 - DNA, 3109 bp, Homo sapiens
  source 1..3109: mol_type = unassigned DNA
ccatgcggccctagggctgggagcgcggcgccgctctccgctgcgggggaggccatggcggaaccttcccaggccccgaccccggccccggctgcgcagccccggccccttcagtccccagcccctgccccaactccgactcctgcacccagcccggcttcagccccgattccgactcccaccccggcaccagcccctgccccagctgcagccccagccggcagcacagggactggggggcccggggtaggaagtgggggggccgggagcgggggggatccggctcgacctggcctgagccagcagcagcgcgccagtcagaggaaggcgcaagtccgggggctgccgcgcgccaagaagcttgagaagctaggggtcttctcggcttgcaaggccaatgaaacctgtaagtgtaatggctggaaaaaccccaagccccccactgcaccccgcatggatctgcagcagccagctgccaacctgagtgagctgtgccgcagttgtgagcaccccttggctgaccacgtatcccacttggagaatgtgtcagaggatgagataaaccgactgctggggatggtggtggatgtggagaatctcttcatgtctgttcacaaggaagaggacacagacaccaagcaggtctatttctacctcttcaagctactgcggaaatgcatcctgcagatgacccggcctgtggtggaggggtccctgggcagccctccatttgagaaacctaatattgagcagggtgtgctgaactttgtgcagtacaagtttagtcacctggctccccgggagcggcagacgatgttcgagctctcaaagatgttcttgctctgccttaactactggaagcttgagacacctgcccagtttcggcagaggtctcaggctgaggacgtggctacctacaaggtcaattacaccagatggctctgttactgccacgtgccccagagctgtgatagcctcccccgctacgaaaccactcatgtctttgggcgaagccttctccggtccattttcaccgttacccgccggcagctgctggaaaagttccgagtggagaaggacaaattggtgcccgagaagaggaccctcatcctcactcacttccccaaattcctgtccatgctggaggaggagatctatggggcaaactctccaatctgggagtcaggcttcaccatgccaccctcagaggggacacagctggttccccggccagcttcagtcagtgcagcggttgttcccagcacccccatcttcagccccagcatgggtgggggcagcaacagctccctgagtctggattctgcaggggccgagcctatgccaggcgagaagaggacgctcccagagaacctgaccctggaggatgccaagcggctccgtgtgatgggtgacatccccatggagctggtcaatgaggtcatgctgaccatcactgaccctgctgccatgctggggcctgagacgagcctgctttcggccaatgcggcccgggatgagacagcccgcctggaggagcgccgcggcatcatcgagttccatgtcatcggcaactcactgacgcccaaggccaaccggcgggtgttgctgtggctcgtggggctgcagaatgtcttttcccaccagctgccgcgcatgcctaaggagtatatcgcccgcctcgtctttgacccgaagcacaagactctggccttgatcaaggatgggcgggtcatcggtggcatctgcttccgcatgtttcccacccagggcttcacggagattgtcttctgtgctgtcacctcgaatgagcaggtcaagggttatgggacccacctgatgaaccacctgaaggagtatcacatcaagcacaacattctctacttcctcacctacgccgacgagtacgccatcggctacttcaaaaagcagggtttctccaaggacatcaaggtgcccaagagccgctacctgggctacatcaaggactacgagggagcgacgctgatggagtgtgagctgaatccccgcatcccctacacggagctgtcccacatcatcaagaagcagaaagagatcatcaagaagctgattgagcgcaaacaggcccagatccgcaaggtctacccggggctcagctgcttcaaggagggcgtgaggcagatccctgtggagagcgttcctggcattcgagagacaggctggaagccattggggaaggagaaggggaaggagctgaaggaccccgaccagctctacacaaccctcaaaaacctgctggcccaaatcaagtctcaccccagtgcctggcccttcatggagcctgtgaagaagtcggaggcccctgactactacgaggtcatccgcttccccattgacctgaagaccatgactgagcggctgcgaagccgctactacgtgacccggaagctctttgtggccgacctgcagcgggtcatcgccaactgtcgcgagtacaaccccccggacagcgagtactgccgctgtgccagcgccctggagaagttcttctacttcaagctcaaggagggaggcctcattgacaagtaggcccatctttgggccgcagccctgacctggaatgtctccacctcggattctgatctgatccttagggggtgccctggccccacggacccgactcagcttgagacactccagccaagggtcctccggacccgatcctgcagctctttctggaccttcaggcacccccaagcgtgcagctctgtcccagccttcactgtgtgtgagaggtctcctgggttggggcccagcccctctagagtagctggtggccagggatgaaccttgcccagccgtggtggcccccaggcctggtccccaagagctttggaggcttggattcctgggcctggcccaggtggctgtttccctgaggaccagaactgctcattttagcttgagtgatggcttcaggggttggaagttcagcccaaactgaagggggccatgccttgtccagcactgttctgtcagtctcccccaggggtggggggtatggggaccattcattccctggcattaatcccttagagggaataataaagctttttatttctctgtgtga

SEQ ID NO: 15064 - DNA, 2296 bp, Homo sapiens
  source 1..2296: mol_type = unassigned DNA
agaccgccactggctgtgcacgttatggggtttccacctagggctcggcctgaggcttgtaacactccgttttcccccgagtcacaggggcagtcttgcccctcgcagctgggtcgcggtgtctctcaaaggtccccctctacaggggcttcgtgaggcccgggcccacagggcgctcggtcccggaagtgacgtctcccagaggggccggaagtggcagtggagggagggaagatggcggaggtggtgagtccggtgcccggggcggggcggagggagccaggggaggtgggtagagcccgaggccccccagtagccgaccctggcgtcgcgctgtctccccagggggagataatcgagggctgccgcctacccgtgctgcggcggaaccaggacaacgaagatgagtggcccctggccgagatcctgagcgtgaaggacatcagtggccggaagcttttctacgtccattacattgacttcaacaaacgtctggatgaatgggtgacgcatgagcggctggacctaaagaagatccagttccccaagaaagaggccaagacccccactaagaacggacttcctgggtcccgtcctggctctccagagagagaggtgccggcctcggcgcaggccagcgggaagaccttgccaatcccggtccagatcacactccgcttcaacctgcccaaggagcgggaggccattcccggtggcgagcctgaccagccgctctcctccagctcctgcctgcagcccaaccaccgctcaacgaaacggaaggtggaggtggtttcaccagcaactccagtgcccagcgagacagccccggcctcggtttttccccagaatggagccgcccgtagggcagtggcagcccagccaggacggaagcgaaaatcgaattgtttgggcactgatgaggactcccaggacagctctgatggaataccgtcagcaccacgcatgactggcagcctggtgtctgatcgaagccacgacgacatcgtcacccggatgaagaacattgagtgcattgagctgggccggcaccgcctcaagccgtggtacttctccccgtacccacaggaactcaccacattgcctgtcctctacctgtgcgagttctgcctcaagtacggccgtagtctcaagtgtcttcagcgtcatttgaccaagtgtgacctacgacatcctccaggcaatgagatttaccgcaagggcaccatctccttctttgagattgatggacgtaagaacaagagttattcccagaacctgtgtcttttggccaagtgtttccttgaccataagacactgtactatgacacagaccctttcctcttctacgtcatgacagagtatgactgtaagggcttccacatcgtgggctacttctccaaggagaaagaatcaacggaagactacaatgtggcctgcatcctaaccctgcctccctaccagcgccggggctacggcaagctgctgatcgagttcagctatgaactctccaaagtggaagggaaaacagggacccctgagaagcccctctcagaccttggcctcctatcctatcgaagctactggtcccagaccatcctggagatcctgatggggctgaagtcggagagcggggagaggccacagatcaccatcaatgagattagtgaaatcaccagcatcaagaaggaggatgtcatctccactctgcagtacctcaatctcatcaactactacaagggccagtacatcctcacactgtcagaggacatcgtggatggccatgagcgggccatgctcaagcggctcctgcggatcgactccaagtgtctgcacttcactcccaaggactggagcaagagggggaagtggtgaccagacactgcccactgcagtgccaagacggcagcaggactggggctgatagcccaccccgcccccactgcagctcccacaaagcactctaagggagatggggctgaggacagctcaaaaaggagaggacaggcctggcaggggcccactggtgcccagcaccaaggcgagctccgggctcagaccaactccaaggtcagctggccacaggcccaggcctcctctgaagcagggaccagagggagccaggcagctgtgtacagtgagaagggatccggatgggggagctctgtacagagggctggtgattgtaaaaatttcttttgtaaagtagaagttgggggtggggtgggtgctggctgcaaaaatttctggcttctcttacccctattgcccccggcaataaattgtttctatatgc

SEQ ID NO: 15065 - DNA, 2059 bp, Homo sapiens
  source 1..2059: mol_type = unassigned DNA
acgtgacggactcagtagaccgccactggctgtgcacgttatggggtttccacctagggctcggcctgaggcttgtaacactccgttttcccccgagtcacaggggcagtcttgcccctcgcagctgggtcgcggtgtctctcaaaggtccccctctacaggggcttcgtgaggcccgggcccacagggcgctcggtcccggaagtgacgtctcccagaggggccggaagtggcagtggagggagggaagatggcggaggtgggggagataatcgagggctgccgcctacccgtgctgcggcggaaccaggacaacgaagatgagtggcccctggccgagatcctgagcgtgaaggacatcagtggccggaagcttttctacgtccattacattgacttcaacaaacgtctggatgaatgggtgacgcatgagcggctggacctaaagaagatccagttccccaagaaagaggccaagacccccactaagaacggacttcctgggtcccgtcctggctctccagagagagaggtgaaacggaaggtggaggtggtttcaccagcaactccagtgcccagcgagacagccccggcctcggtttttccccagaatggagccgcccgtagggcagtggcagcccagccaggacggaagcgaaaatcgaattgtttgggcactgatgaggactcccaggacagctctgatggaataccgtcagcaccacgcatgactggcagcctggtgtctgatcgaagccacgacgacatcgtcacccggatgaagaacattgagtgcattgagctgggccggcaccgcctcaagccgtggtacttctccccgtacccacaggaactcaccacattgcctgtcctctacctgtgcgagttctgcctcaagtacggccgtagtctcaagtgtcttcagcgtcatttgaccaagtgtgacctacgacatcctccaggcaatgagatttaccgcaagggcaccatctccttctttgagattgatggacgtaagaacaagagttattcccagaacctgtgtcttttggccaagtgtttccttgaccataagacactgtactatgacacagaccctttcctcttctacgtcatgacagagtatgactgtaagggcttccacatcgtgggctacttctccaaggagaaagaatcaacggaagactacaatgtggcctgcatcctaaccctgcctccctaccagcgccggggctacggcaagctgctgatcgagttcagctatgaactctccaaagtggaagggaaaacagggacccctgagaagcccctctcagaccttggcctcctatcctatcgaagctactggtcccagaccatcctggagatcctgatggggctgaagtcggagagcggggagaggccacagatcaccatcaatgagattagtgaaatcaccagcatcaagaaggaggatgtcatctccactctgcagtacctcaatctcatcaactactacaagggccagtacatcctcacactgtcagaggacatcgtggatggccatgagcgggccatgctcaagcggctcctgcggatcgactccaagtgtctgcacttcactcccaaggactggagcaagagggggaagtggtgaccagacactgcccactgcagtgccaagacggcagcaggactggggctgatagcccaccccgcccccactgcagctcccacaaagcactctaagggagatggggctgaggacagctcaaaaaggagaggacaggcctggcaggggcccactggtgcccagcaccaaggcgagctccgggctcagaccaactccaaggtcagctggccacaggcccaggcctcctctgaagcagggaccagagggagccaggcagctgtgtacagtgagaagggatccggatgggggagctctgtacagagggctggtgattgtaaaaatttcttttgtaaagtagaagttgggggtggggtgggtgctggctgcaaaaatttctggcttctcttacccctattgcccccggcaataaattgtttctatatgcca

SEQ ID NO: 15066 - DNA, 2237 bp, Homo sapiens
  source 1..2237: mol_type = unassigned DNA
agcttcgcacccggtgggcgtcacgtgacggactcagtagaccgccactggctgtgcacgttatggggtttccacctagggctcggcctgaggcttgtaacactccgttttcccccgagtcacaggggcagtcttgcccctcgcagctgggtcgcggtgtctctcaaaggtccccctctacaggggcttcgtgaggcccgggcccacagggcgctcggtcccggaagtgacgtctcccagaggggccggaagtggcagtggagggagggaagatggcggaggtgggggagataatcgagggctgccgcctacccgtgctgcggcggaaccaggacaacgaagatgagtggcccctggccgagatcctgagcgtgaaggacatcagtggccggaagcttttctacgtccattacattgacttcaacaaacgtctggatgaatgggtgacgcatgagcggctggacctaaagaagatccagttccccaagaaagaggccaagacccccactaagaacggacttcctgggtcccgtcctggctctccagagagagaggtgccggcctcggcgcaggccagcgggaagaccttgccaatcccggtccagatcacactccgcttcaacctgcccaaggagcgggaggccattcccggtggcgagcctgaccagccgctctcctccagctcctgcctgcagcccaaccaccgctcaacgaaacggaaggtggaggtggtttcaccagcaactccagtgcccagcgagacagccccggcctcggtttttccccagaatggagccgcccgtagggcagtggcagcccagccaggacggaagcgaaaatcgaattgtttgggcactgatgaggactcccaggacagctctgatggaataccgtcagcaccacgcatgactggcagcctggtgtctgatcgaagccacgacgacatcgtcacccggatgaagaacattgagtgcattgagctgggccggcaccgcctcaagccgtggtacttctccccgtacccacaggaactcaccacattgcctgtcctctacctgtgcgagttctgcctcaagtacggccgtagtctcaagtgtcttcagcgtcatttgaccaagtgtgacctacgacatcctccaggcaatgagatttaccgcaagggcaccatctccttctttgagattgatggacgtaagaacaagagttattcccagaacctgtgtcttttggccaagtgtttccttgaccataagacactgtactatgacacagaccctttcctcttctacgtcatgacagagtatgactgtaagggcttccacatcgtgggctacttctccaaggagaaagaatcaacggaagactacaatgtggcctgcatcctaaccctgcctccctaccagcgccggggctacggcaagctgctgatcgagttcagctatgaactctccaaagtggaagggaaaacagggacccctgagaagcccctctcagaccttggcctcctatcctatcgaagctactggtcccagaccatcctggagatcctgatggggctgaagtcggagagcggggagaggccacagatcaccatcaatgagattagtgaaatcaccagcatcaagaaggaggatgtcatctccactctgcagtacctcaatctcatcaactactacaagggccagtacatcctcacactgtcagaggacatcgtggatggccatgagcgggccatgctcaagcggctcctgcggatcgactccaagtgtctgcacttcactcccaaggactggagcaagagggggaagtggtgaccagacactgcccactgcagtgccaagacggcagcaggactggggctgatagcccaccccgcccccactgcagctcccacaaagcactctaagggagatggggctgaggacagctcaaaaaggagaggacaggcctggcaggggcccactggtgcccagcaccaaggcgagctccgggctcagaccaactccaaggtcagctggccacaggcccaggcctcctctgaagcagggaccagagggagccaggcagctgtgtacagtgagaagggatccggatgggggagctctgtacagagggctggtgattgtaaaaatttcttttgtaaagtagaagttgggggtggggtgggtgctggctgcaaaaatttctggcttctcttacccctattgcccccggcaataaattgtttctatatgcca

SEQ ID NO: 15067 - DNA, 1697 bp, Homo sapiens
  source 1..1697: mol_type = unassigned DNA
ggccggaagtggcagtggagggagggaagatggcggaggtggtgagtccggtgcccggggcggggcggagggagccaggggaggtgggtagagcccgaggccccccagtagccgaccctggcgtcgcgctgtctccccagggggagataatcgagggctgccgcctacccgtgctgcggcggaaccaggacaacgaagatgagtggcccctggccgagatcctgagcgtgaaggacatcagtggccggaagcttttctacgtccattacattgacttcaacaaacgtctggatgaatgggtgacgcatgagcggctggacctaaagaagatccagttccccaagaaagaggccaagacccccactaagaacggacttcctgggtcccgtcctggctctccagagagagaggtgaaacggaaggtggaggtggtttcaccagcaactccagtgcccagcgagacagccccggcctcggtttttccccagaatggagccgcccgtagggcagtggcagcccagccaggacggaagcgaaaatcgaattgtttgggcactgatgaggactcccaggacagctctgatggaataccgtcagcaccacgcatgactggcagcctggtgtctgatcgaagccacgacgacatcgtcacccggatgaagaacattgagtgcattgagctgggccggcaccgcctcaagccgtggtacttctccccgtacccacaggaactcaccacattgcctgtcctctacctgtgcgagttctgcctcaagtacggccgtagtctcaagtgtcttcagcgtcatttgaccaagtgtgacctacgacatcctccaggcaatgagatttaccgcaagggcaccatctccttctttgagattgatggacgtaagaacaagagttattcccagaacctgtgtcttttggccaagtgtttccttgaccataagacactgtactatgacacagaccctttcctcttctacgtcatgacagagtatgactgtaagggcttccacatcgtgggctacttctccaaggagaaagaatcaacggaagactacaatgtggcctgcatcctaaccctgcctccctaccagcgccggggctacggcaagctgctgatcgagttcagctatgaactctccaaagtggaagggaaaacagggacccctgagaagcccctctcagaccttggcctcctatcctatcgaagctactggtcccagaccatcctggagatcctgatggggctgaagtcggagagcggggagaggccacagatcaccatcaatgagattagtgaaatcaccagcatcaagaaggaggatgtcatctccactctgcagtacctcaatctcatcaactactacaagggccagtacatcctcacactgtcagaggacatcgtggatggccatgagcgggccatgctcaagcggctcctgcggatcgactccaagtgtctgcacttcactcccaaggactggagcaagagggggaagtggtgaccagacactgcccactgcagtgccaagacggcagcaggactggggctgatagcccaccccgcccccactgcagctcccacaaagcactctaagggagatggggctgaggacagctcaaaaaggagaggacaggcctggcaggggcccactggtgcccagcaccaaggcgagctccgggctcag

SEQ ID NO: 15068 - DNA, 8287 bp, Homo sapiens
  source 1..8287: mol_type = unassigned DNA
gacaacaacagggggacacaaaatggcggcggcttagctcctacccctggcggcggcggcagcggtggcggaggcgacggcacctcctccaggcggcagccgcagtttctcaggcagcggcagcgcccccggcaggcgcggtggcggtggcgcgcagccagatttgcctgaagacctggataatctccatttttgtcatggactgttaaaacgtttgaagttccaattctggtcttgatttcccagttaaagatgttcttcacccgaatgcagtctttcctgttggtaaaataagacaaccatcaacattgcctgtttgtctgcttttgaatctcttaaggatggatgtttgtaagatgttgcttaatacagtctggaatactctgtccatttgttgaattgtaaatgactttcaaatgtgcaagttctgttaaatacaaagagaacctctatgggtaacttttgtgttgaagaagtcatttgtcaaccatggtaaaacttgcaaacccactttatacagagtggattcttgaagctatacagaaaataaaaaagcaaaagcaaaggccctctgaagagagaatctgccatgcggtcagtacttcccatgggttggataagaagacagtctctgaacagctggaactcagtgttcaggatggctcagttctcaaagtcaccaacaaaggccttgcctcctataaggacccagacaaccctgggcgcttttcatcagttaaaccaggcacttttcctaagtcagccaaggggtctagaggatcatgtaatgatctccgcaatgtggattggaataaacttttaaggagagcaattgaaggacttgaggagccgaatggctcctccctgaagaacatagagaagtatctcagaagtcaaagtgatctcacaagcaccaccaacaacccagcctttcagcagcggctgcgactgggggccaaacgcgctgtgaataatgggaggttactgaaagacggaccgcagtacagggtcaattatgggagcttagatggcaaaggggcacctcagtatcccagtgcattcccatcctcgctcccacctgtcagccttctaccccatgagaaagaccagccccgtgctgatcccattccaatatgtagcttctgtttggggactaaagaatcaaatcgtgaaaagaaaccagaagaactcctctcttgtgcagattgtggcagtagtggacacccatcctgtttgaaattttgtcctgaattaacaacaaatgtaaaggccttaaggtggcagtgcatcgaatgcaagacatgcagtgcctgtagagtccaaggcagaaatgctgataatatgcttttttgtgattcctgtgatagaggatttcatatggaatgctgtgacccaccactttccagaatgccaaaagggatgtggatttgccaagtctgcagaccaaagaaaaagggaagaaaactacttcatgagaaagctgcacaaataaaacgacgatatgcaaaacccattggacgaccgaaaaataaattaaagcaacgattgttgtctgtaaccagtgatgaaggatccatgaatgcattcacaggaagggggtcacctggtaggggtcaaaagactaaagtctgtaccacaccttcatctggtcatgctgcatctgggaaggactcaagcagcagattggctgttacagaccccactcggcctggtgccaccaccaaaatcaccaccacctccacctacatttctgcctctacacttaaagttaacaagaaaaccaaagggctcattgatggccttactaagttttttacaccatcacctgatggtcgcagatcacgaggtgaaattatagacttttcaaagcactatcgtccaaggaaaaaggtctctcagaaacagtcatgcacttctcatgtgttggctacaggtaccacacaaaagctaaaacctccaccttcttcacttccacccccaacccccatctccggtcagagccccagttcacaaaagtccagcacggccacttcttctccctctccccagagttcttccagccagtgcagtgtgccctccctgagcagccttaccactaacagccagctgaaggcactctttgatgggctttctcatatctataccactcagggacagtctcgcaaaaagggacacccgagttatgcaccacccaaacgtatgcgtcgtaaaactgaattatcttccacggcaaaatctaaagcccacttctttggcaaaagagatattagaagtcggtttatttctcactcctcctcctctagctgggggatggctagaggaagtatttttaaagcaattgctcacttcaagcgaacaactttccttaaaaagcacaggatgctaggcagattaaaatataaagtgacccctcagatggggaccccctcaccagggaaggggagcttgacagacggaaggattaaacctgatcaggatgatgatactgaaataaaaataaacatcaaacaagaaagtgcagatgtaaatgtgattggaaacaaggatgtcgttactgaagaggatttggatgtttttaagcaggcccaggaactttcttgggagaaaatagagtgtgagagtggggtggaagactgtggccggtacccttctgtgattgaatttggtaaatatgaaatccaaacctggtactcctcgccttacccacaggaatatgcaagattaccaaagctttacctgtgtgaattctgtcttaaatatatgaaaagtaaaaatattttgctaagacactccaagaagtgtggatggtttcatcctccagcaaatgaaatttaccgaaggaaagacctttcagtatttgaggttgatgggaatatgagcaaaatttattgccaaaacctttgcttgttagccaagctcttcctggaccacaaaacgttgtattatgatgtcgagccattccttttttatgtccttacaaaaaatgatgaaaagggctgtcatctggttggatacttctctaaggaaaagctttgccagcagaagtataatgtctcctgcataatgatcatgccccagcaccaaaggcaaggatttggacggtttctcattgatttcagctatttgctttctagaagagaaggccaagcagggtctcctgaaaagcctctctccgatctgggccgtctctcctacctggcatattggaagagcgtcatcttggagtatctctaccaccaccatgagaggcacatcagcatcaaggcaattagcagagcgacgggcatgtgcccacatgacattgccaccactctgcagcacctccacatgatcgacaagagagatggcagatttgtcatcattagacgggaaaagttgatattgagccacatggaaaagctgaaaacctgttccagagccaatgaacttgatccagacagtctgaggtggaccccaattttaatttctaatgctgcagtgtctgaagaagagcgagaagctgagaaagaggctgagcggctaatggaacaagctagctgctgggagaaggaggaacaagaaatcctgtcaactagagctaacagtaggcaatcacctgcaaaagtacaatcgaaaaataaatatttgcattccccggagagccggccagtcacaggggagcgagggcagctgctggagctgtctaaagagagcagtgaagaagaagaggaggaggaggacgaggaggaggaagaagaggaggaagaagaggaagaggatgaagaggaggaagaagaggaagaagaagaagaagaagaagaaaatattcaaagctctcccccaagattgacgaaaccacagtcagttgccataaagagaaagaggccttttgtactaaagaagaaaaggggtcgtaaacgcaggaggatcaacagcagtgtaacaacagagaccatttcagagacgacagaagtactgaatgagccctttgacaactcagatgaagagaggccaatgccacagctggagcctacctgtgagattgaagtggaggaagatggcaggaagccagtcctgagaaaagcattccagcatcagcctgggaagaaaagacaaacagaggaagaggaaggaaaagacaatcattgcttcaagaatgctgacccttgtagaaacaatatgaatgatgattcaagtaacttgaaagaaggcagtaaagacaatcccgaacctctaaagtgcaaacaagtgtggccaaaaggaacaaagcgcggtctatctaagtggaggcaaaacaaagagaggaagaccggatttaaactgaatttgtacaccccgccagaaacacccatggagcctgacgagcaggtaacagtggaagaacagaaggagacttcagaaggaaaaaccagccccagtcccatcaggattgaggaggaggtcaaggaaactggggaagccctgttgcctcaagaggaaaacagaagggaagaaacatgtgcccctgtaagtccaaacacatcaccaggtgaaaaaccagaagatgatctcatcaaacctgaggaagaggaagaggaggaggaggaggaagaggaagaagaggaagaagaggaaggggaagaagaagaaggaggaggaaatgtagaaaaagatccagatggtgctaaaagccaagaaaaagaggaaccagaaatctccacggaaaaagaagactctgcacgtttggatgatcacgaagaggaggaggaagaggatgaagagccatcccacaacgaggaccatgatgccgatgacgaggatgacagccacatggagtctgccgaagtggagaaggaagagctgcccagagaaagcttcaaagaagtactggaaaaccaggagacttttttagaccttaatgtgcagcctggtcactcgaacccagaggtcttaatggactgtggcgtcgacctgacagcttcttgtaacagtgagcccaaggagcttgctggggaccctgaagctgtacccgaatctgacgaggagccacccccaggagaacaggcacagaagcaggaccaaaagaacagcaaggaagtcgatacagagttcaaagagggaaacccagcaaccatggaaatcgactctgagactgtccaggccgttcagtctttgacccaggagagcagcgaacaggacgacacctttcaggattgtgccgagactcaagaggcctgtagaagcctacagaactacacccgtgcagaccaaagtccacagattgccaccacgctcgacgattgccaacagtcggaccacagtagcccagtttcatccgtccactcccatcctggccagtccgtacgttctgtcaacagcccaagtgtccctgctctggaaaacagctacgcccaaatcagcccagatcaaagtgccatctcagtgccatctctgcagaacatggaaaccagtcccatgatggatgtcccatcagtttcagatcattcacagcaagtcgtagacagtggatttagtgacctgggcagtatcgagagcacaactgagaactacgaaaacccaagcagctacgattctactatgggaggcagcatctgtggaaacggctcttcacagaacagctgctcctatagcaacctcacctccagcagtctgacacagagcagctgtgctgtcacccagcagatgtccaacatcagcgggagctgcagcatgctgcagcaaaccagcatcagctcccctccgacctgcagcgtcaagtctcctcaaggctgtgtggtggagaggcctccgagcagcagccagcagctggctcagtgcagcatggctgctaacttcaccccacccatgcagctggctgaaatccccgagacgagcaacgccaacattggcttatacgagcgaatgggtcagagtgattttggggctgggcattacccgcagccgtcagccaccttcagccttgccaaactgcagcagttaactaatacacttattgatcattcattgccttacagccattccgctgctgtgacttcctatgcaaacagtgcctctttgtccacaccattaagtaacacagggcttgttcaactttctcagtctccacactccgtccctgggggaccccaagcacaagctaccatgaccccaccccccaacctgactcctcctccaatgaatctgccgccgcctcttttgcaacggaacatggctgcatcaaatattggcatctctcacagccaaagactgcaaacccagattgccagcaagggccacatctccatgagaaccaagtcagcgtctctgtcaccagccgctgccacccatcagtcacaaatctatgggcgctcccagactgtagccatgcagggtcctgcacggactttaacgatgcaaagaggcatgaacatgagtgtgaacctgatgccagcgccagcctacaatgtcaactctgtgaacatgaacatgaacactctcaacgccatgaatgggtacagcatgtcccagccaatgatgaacagtggctaccacagcaatcatggctatatgaatcaaacgccccaataccctatgcagatgcagatgggcatgatgggcacccagccatatgcccagcagccaatgcagaccccaccccacggtaacatgatgtacacggcccccggacatcacggctacatgaacacaggcatgtccaaacagtctctcaatggctcctacatgagaaggtagacaacgtgggcagtccacaaaacctacggggcatcactattggattgatctgcacaaatacctttgaagagtacgatttcaaaaccagcaattggtgtgaatgcaaaaacatttgttggcaccatttatttaaaaaaaaaaaaagctgtatgcagcagaaagccttatacaagttgtttttctttttttcctttttcttttttttggtaccttcatttctgttacttttatataaaattctctgcaaaggaaggcctctctttggactacaatttggaggcagccacttgttgtgcctgcttctgttaaacaatgtggatatcaagcccccccaaattatctgttttaatattgaacctagagctttttttttcccttccctgtccactccatgtaaatgcctttagcatttcagttattgtatattttgtttaaggtgacacttcagcatgccgctaatgtctttgttagtgacagtgcattttgtagtactgtacaagtgttgtgctaacagtaagccatttcttaagttttttgccttgattagggtgccctaatttgagggttttaaaaaaaactatatttttgttaattataaaactgtaaagagctataaaagctattcccatttggttagtcaaaagggttttattgctaaatgtttggtgtaaagttgagacccttttccattttggtgacagatttctttggggaaaaaaggcagctttctgttttataaatgcagacttctgtttattgaatgaagcatatctcagtgtttatctgtcaggttttgaaacatttcatatatgtccaaatacttggcaggatttaaaaaaaaatagtgaatttggtgtaaagttgctattttatggaaatgcctctaactttacattttcattccatctgtagatttttctatctttataaaatattggagttattttttaaggaaaaatagaaaagtagcttgtgaatagctcaaactaagcttacaaatcgcatgtaaaaaagcaaaaaagttatttgtgtctgtttatattgcttccttttttgtagcctttgtacctgtacagggtgacagtaagggccaagcaggagaggcgtaatccttgtataaaataggatccagcgacactcttgtatttatctgttctctttttagtcagtcacttcaaaaaaacaaaaaacaaacaaaaaaaagctgtacattttaacataaaataaattatgatgagccatttttagcctcttgtgtcctgtcatattatgattgatagagaatgaccaatggaactgtatcatgtgtcacgcctcagaacacatacacattttgggaaaataaattatttagtgtaaattggagttatgggattttctgatttgttttgactttgggggaggggttggcaataaataagagtaatatctaataaaaccatcacatataccaaatacctatttaataaattaatttataatggattttaatgcttttcatgaaagtttattttatgcgagtgcataccttctgtatgccaatcattgtctttaaaataaagtgaaattgtttttt

SEQ ID NO: 15069 - DNA, 7560 bp, Homo sapiens
  source 1..7560: mol_type = unassigned DNA
gataatctccatttttgtcatggactgttaaaacgtttgaagttccaattctggtcttgatttcccagttaaagatgttcttcacccgaatgcagtctttcctgttggtaaaataagacaaccatcaacattgcctgtttgtctgcttttgaatctcttaaggatggatgtttgtaagatgttgcttaatacagtctggaatactctgtccatttgttgaattgtaaatgactttcaaatgtgcaagttctgttaaatacaaagagaacctctatgggtaacttttgtgttgaagaagtcatttgtcaaccatggtaaaacttgcaaacccactttatacagagtggattcttgaagctatacagaaaataaaaaagcaaaagcaaaggccctctgaagagagaatctgccatgcggtcagtacttcccatgggttggataagaagacagtctctgaacagctggaactcagtgttcaggatggctcagttctcaaagtcaccaacaaaggccttgcctcctataaggacccagacaaccctgggcgcttttcatcagttaaaccaggcacttttcctaagtcagccaaggggtctagaggatcatgtaatgatctccgcaatgtggattggaataaacttttaaggagagcaattgaaggacttgaggagccgaatggctcctccctgaagaacatagagaagtatctcagaagtcaaagtgatctcacaagcaccaccaacaacccagcctttcagcagcggctgcgactgggggccaaacgcgctgtgaataatgggaggttactgaaagacggaccgcagtacagggtcaattatgggagcttagatggcaaaggggcacctcagtatcccagtgcattcccatcctcgctcccacctgtcagccttctaccccatgagaaagaccagccccgtgctgatcccattccaatatgtagcttctgtttggggactaaagaatcaaatcgtgaaaagaaaccagaagaactcctctcttgtgcagattgtggcagtagtggacacccatcctgtttgaaattttgtcctgaattaacaacaaatgtaaaggccttaaggtggcagtgcatcgaatgcaagacatgcagtgcctgtagagtccaaggcagaaatgctgataatatgcttttttgtgattcctgtgatagaggatttcatatggaatgctgtgacccaccactttccagaatgccaaaagggatgtggatttgccaagtctgcagaccaaagaaaaagggaagaaaactacttcatgagaaagctgcacaaataaaacgacgatatgcaaaacccattggacgaccgaaaaataaattaaagcaacgattgttgtctgtaaccagtgatgaaggatccatgaatgcattcacaggaagggggtcacctggtaggggtcaaaagactaaagtctgtaccacaccttcatctggtcatgctgcatctgggaaggactcaagcagcagattggctgttacagaccccactcggcctggtgccaccaccaaaatcaccaccacctccacctacatttctgcctctacacttaaagttaacaagaaaaccaaagggctcattgatggccttactaagttttttacaccatcacctgatggtcgcagatcacgaggtgaaattatagacttttcaaagcactatcgtccaaggaaaaaggtctctcagaaacagtcatgcacttctcatgtgttggctacagatactgaaataaaaataaacatcaaacaagaaagtgcagatgtaaatgtgattggaaacaaggatgtcgttactgaagaggatttggatgtttttaagcaggcccaggaactttcttgggagaaaatagagtgtgagagtggggtggaagactgtggccggtacccttctgtgattgaatttggtaaatatgaaatccaaacctggtactcctcgccttacccacaggaatatgcaagattaccaaagctttacctgtgtgaattctgtcttaaatatatgaaaagtaaaaatattttgctaagacactccaagaagtgtggatggtttcatcctccagcaaatgaaatttaccgaaggaaagacctttcagtatttgaggttgatgggaatatgagcaaaatttattgccaaaacctttgcttgttagccaagctcttcctggaccacaaaacgttgtattatgatgtcgagccattccttttttatgtccttacaaaaaatgatgaaaagggctgtcatctggttggatacttctctaaggaaaagctttgccagcagaagtataatgtctcctgcataatgatcatgccccagcaccaaaggcaaggatttggacggtttctcattgatttcagctatttgctttctagaagagaaggccaagcagggtctcctgaaaagcctctctccgatctgggccgtctctcctacctggcatattggaagagcgtcatcttggagtatctctaccaccaccatgagaggcacatcagcatcaaggcaattagcagagcgacgggcatgtgcccacatgacattgccaccactctgcagcacctccacatgatcgacaagagagatggcagatttgtcatcattagacgggaaaagttgatattgagccacatggaaaagctgaaaacctgttccagagccaatgaacttgatccagacagtctgaggtggaccccaattttaatttctaatgctgcagtgtctgaagaagagcgagaagctgagaaagaggctgagcggctaatggaacaagctagctgctgggagaaggaggaacaagaaatcctgtcaactagagctaacagtaggcaatcacctgcaaaagtacaatcgaaaaataaatatttgcattccccggagagccggccagtcacaggggagcgagggcagctgctggagctgtctaaagagagcagtgaagaagaagaggaggaggaggacgaggaggaggaagaagaggaggaagaagaggaagaggatgaagaggaggaagaagaggaagaagaagaagaagaagaagaaaatattcaaagctctcccccaagattgacgaaaccacagtcagttgccataaagagaaagaggccttttgtactaaagaagaaaaggggtcgtaaacgcaggaggatcaacagcagtgtaacaacagagaccatttcagagacgacagaagtactgaatgagccctttgacaactcagatgaagagaggccaatgccacagctggagcctacctgtgagattgaagtggaggaagatggcaggaagccagtcctgagaaaagcattccagcatcagcctgggaagaaaagacaaacagaggaagaggaaggaaaagacaatcattgcttcaagaatgctgacccttgtagaaacaatatgaatgatgattcaagtaacttgaaagaaggcagtaaagacaatcccgaacctctaaagtgcaaacaagtgtggccaaaaggaacaaagcgcggtctatctaagtggaggcaaaacaaagagaggaagaccggatttaaactgaatttgtacaccccgccagaaacacccatggagcctgacgagcaggtaacagtggaagaacagaaggagacttcagaaggaaaaaccagccccagtcccatcaggattgaggaggaggtcaaggaaactggggaagccctgttgcctcaagaggaaaacagaagggaagaaacatgtgcccctgtaagtccaaacacatcaccaggtgaaaaaccagaagatgatctcatcaaacctgaggaagaggaagaggaggaggaggaggaagaggaagaagaggaagaagaggaaggggaagaagaagaaggaggaggaaatgtagaaaaagatccagatggtgctaaaagccaagaaaaagaggaaccagaaatctccacggaaaaagaagactctgcacgtttggatgatcacgaagaggaggaggaagaggatgaagagccatcccacaacgaggaccatgatgccgatgacgaggatgacagccacatggagtctgccgaagtggagaaggaagagctgcccagagaaagcttcaaagaagtactggaaaaccaggagacttttttagaccttaatgtgcagcctggtcactcgaacccagaggtcttaatggactgtggcgtcgacctgacagcttcttgtaacagtgagcccaaggagcttgctggggaccctgaagctgtacccgaatctgacgaggagccacccccaggagaacaggcacagaagcaggaccaaaagaacagcaaggaagtcgatacagagttcaaagagggaaacccagcaaccatggaaatcgactctgagactgtccaggccgttcagtctttgacccaggagagcagcgaacaggacgacacctttcaggattgtgccgagactcaagaggcctgtagaagcctacagaactacacccgtgcagaccaaagtccacagattgccaccacgctcgacgattgccaacagtcggaccacagtagcccagtttcatccgtccactcccatcctggccagtccgtacgttctgtcaacagcccaagtgtccctgctctggaaaacagctacgcccaaatcagcccagatcaaagtgccatctcagtgccatctctgcagaacatggaaaccagtcccatgatggatgtcccatcagtttcagatcattcacagcaagtcgtagacagtggatttagtgacctgggcagtatcgagagcacaactgagaactacgaaaacccaagcagctacgattctactatgggaggcagcatctgtggaaacggctcttcacagaacagctgctcctatagcaacctcacctccagcagtctgacacagagcagctgtgctgtcacccagcagatgtccaacatcagcgggagctgcagcatgctgcagcaaaccagcatcagctcccctccgacctgcagcgtcaagtctcctcaaggctgtgtggtggagaggcctccgagcagcagccagcagctggctcagtgcagcatggctgctaacttcaccccacccatgcagctggctgaaatccccgagacgagcaacgccaacattggcttatacgagcgaatgggtcagagtgattttggggctgggcattacccgcagccgtcagccaccttcagccttgccaaactgcagcagttaactaatacacttattgatcattcattgccttacagccattccgctgctgtgacttcctatgcaaacagtgcctctttgtccacaccattaagtaacacagggcttgttcaactttctcagtctccacactccgtccctgggggaccccaagcacaagctaccatgaccccaccccccaacctgactcctcctccaatgaatctgccgccgcctcttttgcaacggaacatggctgcatcaaatattggcatctctcacagccaaagactgcaaacccagattgccagcaagggccacatctccatgagaaccaagtcagcgtctctgtcaccagccgctgccacccatcagtcacaaatctatgggcgctcccagactgtagccatgcagggtcctgcacggactttaacgatgcaaagaggcatgaacatgagtgtgaacctgatgccagcgccagcctacaatgtcaactctgtgaacatgaacatgaacactctcaacgccatgaatgggtacagcatgtcccagccaatgatgaacagtggctaccacagcaatcatggctatatgaatcaaacgccccaataccctatgcagatgcagatgggcatgatgggcacccagccatatgcccagcagccaatgcagaccccaccccacggtaacatgatgtacacggcccccggacatcacggctacatgaacacaggcatgtccaaacagtctctcaatggctcctacatgagaaggtagacaacgtgggcagtccacaaaacctacggggcatcactattggattgatctgcacaaatacctttgaagagtacgatttcaaaaccagcaattggtgtgaatgcaaaaacatttgttggcaccatttatttaaaaaaaaaaaaagctgtatgcagcagaaagccttatacaagttgtttttctttttttcctttttcttttttttggtaccttcatttctgttacttttatataaaattctctgcaaaggaaggcctctctttggactacaatttggaggcagccacttgttgtgcctgcttctgttaaacaatgtggatatcaagcccccccaaattatctgttttaatattgaacctagagctttttttttcccttccctgtccactccatgtaaatgcctttagcatttcagttattgtatattttgtttaaggtgacacttcagcatgccgctaatgtctttgttagtgacagtgcattttgtagtactgtacaagtgttgtgctaacagtaagccatttcttaagttttttgccttgattagggtgccctaatttgagggttttaaaaaaaactatatttttgttaattataaaactgtaaagagctataaaagctattcccatttggttagtcaaaagggttttattgctaaatgtttggtgtaaagttgagacccttttccattttggtgacagatttctttggggaaaaaaggcagctttctgttttataaatgcagacttctgtttattgaatgaagcatatctcagtgtttatctgtcaggttttgaaacatttcatatatgtccaaatacttggcaggatttaaaaaaaaatagtgaatttggtgtaaagttgctattttatggaaatgcctctaactttacattttcattccatctgtagatttttctatctttataaaatattggagttattttttaaggaaaaatagaaaagtagcttgtgaatagctcaaactaagcttacaaatcgcatgtaaaaaagcaaaaaagttatttgtgtctgtttatattgcttccttttttgtagcctttgtacctgtacagggtgacagtaagggccaagcaggagaggcgtaatccttgtataaaataggatccagcgacactcttgtatttatctgttctctttttagtcagtcacttcaaaaaaacaaaaaacaaacaaaaaaaagctgtacattttaacataaaataaattatgatgagccatttttagcctcttgtgtcctgtcatattatgattgatagagaatgaccaatggaactgtatcatgtgtcacgcctcagaacacatacacattttgggaaaataaattatttagtgtaaattggagttatgggattttctgatttgttttgactttgggggaggggttggcaataaataagagtaatatctaataaaaccatcacatataccaaatacctatttaataaattaatttataatggattttaatgcttttcatgaaagtttattttatgcgagtgcataccttctgtatgccaatcattgtctttaaaataaagtgaaattgtttttt

SEQ ID NO: 15070 - DNA, 5892 bp, Homo sapiens
  source 1..5892: mol_type = unassigned DNA
acaaaatggcggcggcttagctcctacccctggcggcggcggcagcggtggcggaggcgacggcacctcctccaggcggcagccgcagtttctcaggcagcggcagcgcccccggcaggcgcggtggcggtggcgcgcagccaggtcttgatttcccagttaaagatgttcttcacccgaatgcagtctttcctgttggtaaaataagacaaccatcaacattgcctgtttgtctgcttttgaatctcttaaggatggatgtttgtaagatgttgcttaatacagtctggaatactctgtccatttgttgaattgtaaatgactttcaaatgtgcaagttctgttaaatacaaagagaacctctatgggtaacttttgtgttgaagaagtcatttgtcaaccatggtaaaacttgcaaacccactttatacagagtggattcttgaagctatacagaaaataaaaaagcaaaagcaaaggccctctgaagagagaatctgccatgcggtcagtacttcccatgggttggataagaagacagtctctgaacagctggaactcagtgttcaggatggctcagttctcaaagtcaccaacaaaggccttgcctcctataaggacccagacaaccctgggcgcttttcatcagttaaaccaggcacttttcctaagtcagccaaggggtctagaggatcatgtaatgatctccgcaatgtggattggaataaacttttaaggagagcaattgaaggacttgaggagccgaatggctcctccctgaagaacatagagaagtatctcagaagtcaaagtgatctcacaagcaccaccaacaacccagcctttcagcagcggctgcgactgggggccaaacgcgctgtgaataatgggaggttactgaaagacggaccgcagtacagggtcaattatgggagcttagatggcaaaggggcacctcagtatcccagtgcattcccatcctcgctcccacctgtcagccttctaccccatgagaaagaccagccccgtgctgatcccattccaatatgtagcttctgtttggggactaaagaatcaaatcgtgaaaagaaaccagaagaactcctctcttgtgcagattgtggcagtagtggacacccatcctgtttgaaattttgtcctgaattaacaacaaatgtaaaggccttaaggtggcagtgcatcgaatgcaagacatgcagtgcctgtagagtccaaggcagaaatgctgataatatgcttttttgtgattcctgtgatagaggatttcatatggaatgctgtgacccaccactttccagaatgccaaaagggatgtggatttgccaagtctgcagaccaaagaaaaagggaagaaaactacttcatgagaaagctgcacaaataaaacgacgatatgcaaaacccattggacgaccgaaaaataaattaaagcaacgattgttgtctgtaaccagtgatgaaggatccatgaatgcattcacaggaagggggtcacctgatactgaaataaaaataaacatcaaacaagaaagtgcagatgtaaatgtgattggaaacaaggatgtcgttactgaagaggatttggatgtttttaagcaggcccaggaactttcttgggagaaaatagagtgtgagagtggggtggaagactgtggccggtacccttctgtgattgaatttggtaaatatgaaatccaaacctggtactcctcgccttacccacaggaatatgcaagattaccaaagctttacctgtgtgaattctgtcttaaatatatgaaaagtaaaaatattttgctaagacactccaagaagtgtggatggtttcatcctccagcaaatgaaatttaccgaaggaaagacctttcagtatttgaggttgatgggaatatgagcaaaatttattgccaaaacctttgcttgttagccaagctcttcctggaccacaaaacgttgtattatgatgtcgagccattccttttttatgtccttacaaaaaatgatgaaaagggctgtcatctggttggatacttctctaaggaaaagctttgccagcagaagtataatgtctcctgcataatgatcatgccccagcaccaaaggcaaggatttggacggtttctcattgatttcagctatttgctttctagaagagaaggccaagcagggtctcctgaaaagcctctctccgatctgggccgtctctcctacctggcatattggaagagcgtcatcttggagtatctctaccaccaccatgagaggcacatcagcatcaaggcaattagcagagcgacgggcatgtgcccacatgacattgccaccactctgcagcacctccacatgatcgacaagagagatggcagatttgtcatcattagacgggaaaagttgatattgagccacatggaaaagctgaaaacctgttccagagccaatgaacttgatccagacagtctgaggtggaccccaattttaatttctaatgctgcagtgtctgaagaagagcgagaagctgagaaagaggctgagcggctaatggaacaagctagctgctgggagaaggaggaacaagaaatcctgtcaactagagctaacagtaggcaatcacctgcaaaagtacaatcgaaaaataaatatttgcattccccggagagccggccagtcacaggggagcgagggcagctgctggagctgtctaaagagagcagtgaagaagaagaggaggaggaggacgaggaggaggaagaagaggaggaagaagaggaagaggatgaagaggaggaagaagaggaagaagaagaagaagaagaagaaaatattcaaagctctcccccaagattgacgaaaccacagtcagttgccataaagagaaagaggccttttgtactaaagaagaaaaggggtcgtaaacgcaggaggatcaacagcagtgtaacaacagagaccatttcagagacgacagaagtactgaatgagccctttgacaactcagatgaagagaggccaatgccacagctggagcctacctgtgagattgaagtggaggaagatggcaggaagccagtcctgagaaaagcattccagcatcagcctgggaagaaaagacaaacagaggaagaggaaggaaaagacaatcattgcttcaagaatgctgacccttgtagaaacaatatgaatgatgattcaagtaacttgaaagaaggcagtaaagacaatcccgaacctctaaagtgcaaacaagtgtggccaaaaggaacaaagcgcggtctatctaagtggaggcaaaacaaagagaggaagaccggatttaaactgaatttgtacaccccgccagaaacacccatggagcctgacgagcaggtaacagtggaagaacagaaggagacttcagaaggaaaaaccagccccagtcccatcaggattgaggaggaggtcaaggaaactggggaagccctgttgcctcaagaggaaaacagaagggaagaaacatgtgcccctgtaagtccaaacacatcaccaggtgaaaaaccagaagatgatctcatcaaacctgaggaagaggaagaggaggaggaggaggaagaggaagaagaggaagaagaggaaggggaagaagaagaaggaggaggaaatgtagaaaaagatccagatggtgctaaaagccaagaaaaagaggaaccagaaatctccacggaaaaagaagactctgcacgtttggatgatcacgaagaggaggaggaagaggatgaagagccatcccacaacgaggaccatgatgccgatgacgaggatgacagccacatggagtctgccgaagtggagaaggaagagctgcccagagaaagcttcaaagaagtactggaaaaccaggagacttttttagaccttaatgtgcagcctggtcactcgaacccagaggtcttaatggactgtggcgtcgacctgacagcttcttgtaacagtgagcccaaggagcttgctggggaccctgaagctgtacccgaatctgacgaggagccacccccaggagaacaggcacagaagcaggaccaaaagaacagcaaggaagtcgatacagagttcaaagagggaaacccagcaaccatggaaatcgactctgagactgtccaggccgttcagtctttgacccaggagagcagcgaacaggacgacacctttcaggattgtgccgagactcaagaggcctgtagaagcctacagaactacacccgtgcagaccaaagtccacagattgccaccacgctcgacgattgccaacagtcggaccacagtagcccagtttcatccgtccactcccatcctggccagtccgtacgttctgtcaacagcccaagtgtccctgctctggaaaacagctacgcccaaatcagcccagatcaaagtgccatctcagtgccatctctgcagaacatggaaaccagtcccatgatggatgtcccatcagtttcagatcattcacagcaagtcgtagacagtggatttagtgacctgggcagtatcgagagcacaactgagaactacgaaaacccaagcagctacgattctactatgggaggcagcatctgtggaaacggctcttcacagaacagctgctcctatagcaacctcacctccagcagtctgacacagagcagctgtgctgtcacccagcagatgtccaacatcagcgggagctgcagcatgctgcagcaaaccagcatcagctcccctccgacctgcagcgtcaagtctcctcaaggctgtgtggtggagaggcctccgagcagcagccagcagctggctcagtgcagcatggctgctaacttcaccccacccatgcagctggctgaaatccccgagacgagcaacgccaacattggcttatacgagcgaatgggtcagagtgattttggggctgggcattacccgcagccgtcagccaccttcagccttgccaaactgcagcagttaactaatacacttattgatcattcattgccttacagccattccgctgctgtgacttcctatgcaaacagtgcctctttgtccacaccattaagtaacacagggcttgttcaactttctcagtctccacactccgtccctgggggaccccaagcacaagctaccatgaccccaccccccaacctgactcctcctccaatgaatctgccgccgcctcttttgcaacggaacatggctgcatcaaatattggcatctctcacagccaaagactgcaaacccagattgccagcaagggccacatctccatgagaaccaagtcagcgtctctgtcaccagccgctgccacccatcagtcacaaatctatgggcgctcccagactgtagccatgcagggtcctgcacggactttaacgatgcaaagaggcatgaacatgagtgtgaacctgatgccagcgccagcctacaatgtcaactctgtgaacatgaacatgaacactctcaacgccatgaatgggtacagcatgtcccagccaatgatgaacagtggctaccacagcaatcatggctatatgaatcaaacgccccaataccctatgcagatgcagatgggcatgatgggcacccagccatatgcccagcagccaatgcagaccccaccccacggtaacatgatgtacacggcccccggacatcacggctacatgaacacaggcatgtccaaacagtctctcaatggctcctacatgagaaggtagacaacgtgggcagtccacaaaacctacggggcatcactattggattgatctgcacaaatacctttgaagagtacgatttcaaaaccagcaattggtgtgaatgcaaaaacatttgttggcaccatttatttaaaaaaaaaaaaa

SEQ ID NO: 15071 - DNA, 7106 bp, Homo sapiens
  source 1..7106: mol_type = unassigned DNA
agtgtcatgtcggattcatgtcaacgacaacaacagggggacacaaaatggcggcggcttagctcctacccctggcggcggcggcagcggtggcggaggcgacggcacctcctccaggcggcagccgcagtttctcaggcagcggcagcgcccccggcaggcgcggtggcggtggcgcgcagccagatttgcctgaagacctggataatctccatttttgtcatggactgttaaaacgtttgaagttccaattctggtcttgatttcccagttaaagatgttcttcacccgaatgcagtctttcctgttggtaaaataagacaaccatcaacattgcctgtttgtctgcttttgaatctcttaaggatggatgtttgtaagatgttgcttaatacagtctggaatactctgtccatttgttgaattgtaaatgactttcaaatgtgcaagttctgttaaatacaaagagaacctctatgggtaacttttgtgttgaagaagtcatttgtcaaccatggtaaaacttgcaaacccactttatacagagtggattcttgaagctatacagaaaataaaaaagcaaaagcaaaggccctctgaagagagaatctgccatgcggtcagtacttcccatgggttggataagaagacagtctctgaacagctggaactcagtgttcaggatggctcagttctcaaagtcaccaacaaaggccttgcctcctataaggacccagacaaccctgggcgcttttcatcagttaaaccaggcacttttcctaagtcagccaaggggtctagaggatcatgtaatgatctccgcaatgtggattggaataaacttttaaggagagcaattgaaggacttgaggagccgaatggctcctccctgaagaacatagagaagtatctcagaagtcaaagtgatctcacaagcaccaccaacaacccagcctttcagcagcggctgcgactgggggccaaacgcgctgtgaataatgggaggttactgaaagacggaccgcagtacagggtcaattatgggagcttagatggcaaaggggcacctcagtatcccagtgcattcccatcctcgctcccacctgtcagccttctaccccatgagaaagaccagccccgtgctgatcccattccaatatgtagcttctgtttggggactaaagaatcaaatcgtgaaaagaaaccagaagaactcctctcttgtgcagattgtggcagtagtggacacccatcctgtttgaaattttgtcctgaattaacaacaaatgtaaaggccttaaggtggcagtgcatcgaatgcaagacatgcagtgcctgtagagtccaaggcagaaatgctgataatatgcttttttgtgattcctgtgatagaggatttcatatggaatgctgtgacccaccactttccagaatgccaaaagggatgtggatttgccaagtctgcagaccaaagaaaaagggaagaaaactacttcatgagaaagctgcacaaataaaacgacgatatgcaaaacccattggacgaccgaaaaataaattaaagcaacgattgttgtctgtaaccagtgatgaaggatccatgaatgcattcacaggaagggggtcacctgatactgaaataaaaataaacatcaaacaagaaagtgcagatgtaaatgtgattggaaacaaggatgtcgttactgaagaggatttggatgtttttaagcaggcccaggaactttcttgggagaaaatagagtgtgagagtggggtggaagactgtggccggtacccttctgtgattgaatttggtaaatatgaaatccaaacctggtactcctcgccttacccacaggaatatgcaagattaccaaagctttacctgtgtgaattctgtcttaaatatatgaaaagtaaaaatattttgctaagacactccaagaagtgtggatggtttcatcctccagcaaatgaaatttaccgaaggaaagacctttcagtatttgaggttgatgggaatatgagcaaaatttattgccaaaacctttgcttgttagccaagctcttcctggaccacaaaacgttgtattatgatgtcgagccattccttttttatgtccttacaaaaaatgatgaaaagggctgtcatctggttggatacttctctaaggaaaagctttgccagcagaagtataatgtctcctgcataatgatcatgccccagcaccaaaggcaaggatttggacggtttctcattgatttcagctatttgctttctagaagagaaggccaagcagggtctcctgaaaagcctctctccgatctgggccgtctctcctacctggcatattggaagagcgtcatcttggagtatctctaccaccaccatgagaggcacatcagcatcaaggcaattagcagagcgacgggcatgtgcccacatgacattgccaccactctgcagcacctccacatgatcgacaagagagatggcagatttgtcatcattagacgggaaaagttgatattgagccacatggaaaagctgaaaacctgttccagagccaatgaacttgatccagacagtctgaggtggaccccaattttaatttctaatgctgcagtgtctgaagaagagcgagaagctgagaaagaggctgagcggctaatggaacaagctagctgctgggagaaggaggaacaagaaatcctgtcaactagagctaacagtaggcaatcacctgcaaaagtacaatcgaaaaataaatatttgcattccccggagagccggccagtcacaggggagcgagggcagctgctggagctgtctaaagagagcagtgaagaagaagaggaggaggaggacgaggaggaggaagaagaggaggaagaagaggaagaggatgaagaggaggaagaagaggaagaagaagaagaagaagaagaaaatattcaaagctctcccccaagattgacgaaaccacagtcagttgccataaagagaaagaggccttttgtactaaagaagaaaaggggtcgtaaacgcaggaggatcaacagcagtgtaacaacagagaccatttcagagacgacagaagtactgaatgagccctttgacaactcagatgaagagaggccaatgccacagctggagcctacctgtgagattgaagtggaggaagatggcaggaagccagtcctgagaaaagcattccagcatcagcctgggaagaaaagacaaacagaggaagaggaaggaaaagacaatcattgcttcaagaatgctgacccttgtagaaacaatatgaatgatgattcaagtaacttgaaagaaggcagtaaagacaatcccgaacctctaaagtgcaaacaagtgtggccaaaaggaacaaagcgcggtctatctaagtggaggcaaaacaaagagaggaagaccggatttaaactgaatttgtacaccccgccagaaacacccatggagcctgacgagcaggtaacagtggaagaacagaaggagacttcagaaggaaaaaccagccccagtcccatcaggattgaggaggaggtcaaggaaactggggaagccctgttgcctcaagaggaaaacagaagggaagaaacatgtgcccctgtaagtccaaacacatcaccaggtgaaaaaccagaagatgatctcatcaaacctgaggaagaggaagaggaggaggaggaggaagaggaagaagaggaagaagaggaaggggaagaagaagaaggaggaggaaatgtagaaaaagatccagatggtgctaaaagccaagaaaaagaggaaccagaaatctccacggaaaaagaagactctgcacgtttggatgatcacgaagaggaggaggaagaggatgaagagccatcccacaacgaggaccatgatgccgatgacgaggatgacagccacatggagtctgccgaagtggagaaggaagagctgcccagagaaagcttcaaagaagtactggaaaaccaggagacttttttagaccttaatgtgcagcctggtcactcgaacccagaggtcttaatggactgtggcgtcgacctgacagcttcttgtaacagtgagcccaaggagcttgctggggaccctgaagctgtacccgaatctgacgaggagccacccccaggagaacaggcacagaagcaggaccaaaagaacagcaaggaagtcgatacagagttcaaagagggaaacccagcaaccatggaaatcgactctgagactgtccaggccgttcagtctttgacccaggagagcagcgaacaggacgacacctttcaggattgtgccgagactcaagaggcctgtagaagcctacagaactacacccgtgcagaccaaagtccacagattgccaccacgctcgacgattgccaacagtcggaccacagtagcccagtttcatccgtccactcccatcctggccagtccgtacgttctgtcaacagcccaagtgtccctgctctggaaaacagctacgcccaaatcagcccagatcaaagtgccatctcagtgccatctctgcagaacatggaaaccagtcccatgatggatgtcccatcagtttcagatcattcacagcaagtcgtagacagtggatttagtgacctgggcagtatcgagagcacaactgagaactacgaaaacccaagcagctacgattctactatgggaggcagcatctgtggaaacggctcttcacagaacagctgctcctatagcaacctcacctccagcagtctgacacagagcagctgtgctgtcacccagcagatgtccaacatcagcgggagctgcagcatgctgcagcaaaccagcatcagctcccctccgacctgcagcgtcaagtctcctcaaggctgtgtggtggagaggcctccgagcagcagccagcagctggctcagtgcagcatggctgctaacttcaccccacccatgcagctggctgaaatccccgagacgagcaacgccaacattggcttatacgagcgaatgggtcagagtgattttggggctgggcattacccgcagccgtcagccaccttcagccttgccaaactgcagcagttaactaatacacttattgatcattcattgccttacagccattccgctgctgtgacttcctatgcaaacagtgcctctttgtccacaccattaagtaacacagggcttgttcaactttctcagtctccacactccgtccctgggggaccccaagcacaagctaccatgaccccaccccccaacctgactcctcctccaatgaatctgccgccgcctcttttgcaacggaacatggctgcatcaaatattggcatctctcacagccaaagactgcaaacccagattgccagcaagggccacatctccatgagaaccaagtcagcgtctctgtcaccagccgctgccacccatcagtcacaaatctatgggcgctcccagactgtagccatgcagggtcctgcacggactttaacgatgcaaagaggcatgaacatgagtgtgaacctgatgccagcgccagcctacaatgtcaactctgtgaacatgaacatgaacactctcaacgccatgaatgggtacagcatgtcccagccaatgatgaacagtggctaccacagcaatcatggctatatgaatcaaacgccccaataccctatgcagatgcagatgggcatgatgggcacccagccatatgcccagcagccaatgcagaccccaccccacggtaacatgatgtacacggcccccggacatcacggctacatgaacacaggcatgtccaaacagtctctcaatggctcctacatgagaaggtagacaacgtgggcagtccacaaaacctacggggcatcactattggattgatctgcacaaatacctttgaagagtacgatttcaaaaccagcaattggtgtgaatgcaaaaacatttgttggcaccatttatttaaaaaaaaaaaaagctgtatgcagcagaaagccttatacaagttgtttttctttttttcctttttcttttttttggtaccttcatttctgttacttttatataaaattctctgcaaaggaaggcctctctttggactacaatttggaggcagccacttgttgtgcctgcttctgttaaacaatgtggatatcaagcccccccaaattatctgttttaatattgaacctagagctttttttttcccttccctgtccactccatgtaaatgcctttagcatttcagttattgtatattttgtttaaggtgacacttcagcatgccgctaatgtctttgttagtgacagtgcattttgtagtactgtacaagtgttgtgctaacagtaagccatttcttaagttttttgccttgattagggtgccctaatttgagggttttaaaaaaaactatatttttgttaattataaaactgtaaagagctataaaagctattcccatttggttagtcaaaagggttttattgctaaatgtttggtgtaaagttgagacccttttccattttggtgacagatttctttggggaaaaaaggcagctttctgttttataaatgcagacttctgtttattgaatgaagcatatctcagtgtttatctgtcaggttttgaaacatttcatatatgtccaaatacttggcaggatttaaaaaaaaatagtgaatttggtgtaaagttgctattttatggaaatgcctctaactttacattttcattccatctgtagatttttctatctttataaaatattggagttattttttaaggaaaaatagaaaagtagcttgtgaatagctcaaactaagcttacaaatcgcatgtaaaaaagcaaaaaagttatttgtgtctgtttatattgcttccttttttgtagcctttgtacctgtacagggtgacagtaagggccaagcaggagaggcgtaatccttgtataaaataggatccagcgacactcttgtatttatctgttctctttttagtcagtcacttcaaaaaaacaaaaaacaaacaaaaaaaagctgtacattttaacataaaataaattatgatgagccattttt

SEQ ID NO: 15072 - DNA, 6944 bp, Homo sapiens
  source 1..6944: mol_type = unassigned DNA
ggcaaaggacgaggcggaggctgaggaaggcagcggggagacccaggctgcagcaacaaagggcagcgagcgattggccgggctgcaggcgaggtcttgatttcccagttaaagatgttcttcacccgaatgcagtctttcctgttggtaaaataagacaaccatcaacattgcctgtttgtctgcttttgaatctcttaaggatggatgtttgtaagatgttgcttaatacagtctggaatactctgtccatttgttgaattgtaaatgactttcaaatgtgcaagttctgttaaatacaaagagaacctctatgggtaacttttgtgttgaagaagtcatttgtcaaccatggtaaaacttgcaaacccactttatacagagtggattcttgaagctatacagaaaataaaaaagcaaaagcaaaggccctctgaagagagaatctgccatgcggtcagtacttcccatgggttggataagaagacagtctctgaacagctggaactcagtgttcaggatggctcagttctcaaagtcaccaacaaaggccttgcctcctataaggacccagacaaccctgggcgcttttcatcagttaaaccaggcacttttcctaagtcagccaaggggtctagaggatcatgtaatgatctccgcaatgtggattggaataaacttttaaggagagcaattgaaggacttgaggagccgaatggctcctccctgaagaacatagagaagtatctcagaagtcaaagtgatctcacaagcaccaccaacaacccagcctttcagcagcggctgcgactgggggccaaacgcgctgtgaataatgggaggttactgaaagacggaccgcagtacagggtcaattatgggagcttagatggcaaaggggcacctcagtatcccagtgcattcccatcctcgctcccacctgtcagccttctaccccatgagaaagaccagccccgtgctgatcccattccaatatgtagcttctgtttggggactaaagaatcaaatcgtgaaaagaaaccagaagaactcctctcttgtgcagattgtggcagtagtggacacccatcctgtttgaaattttgtcctgaattaacaacaaatgtaaaggccttaaggtggcagtgcatcgaatgcaagacatgcagtgcctgtagagtccaaggcagaaatgctgataatatgcttttttgtgattcctgtgatagaggatttcatatggaatgctgtgacccaccactttccagaatgccaaaagggatgtggatttgccaagtctgcagaccaaagaaaaagggaagaaaactacttcatgagaaagctgcacaaataaaacgacgatatgcaaaacccattggacgaccgaaaaataaattaaagcaacgattgttgtctgtaaccagtgatgaaggatccatgaatgcattcacaggaagggggtcacctgatactgaaataaaaataaacatcaaacaagaaagtgcagatgtaaatgtgattggaaacaaggatgtcgttactgaagaggatttggatgtttttaagcaggcccaggaactttcttgggagaaaatagagtgtgagagtggggtggaagactgtggccggtacccttctgtgattgaatttggtaaatatgaaatccaaacctggtactcctcgccttacccacaggaatatgcaagattaccaaagctttacctgtgtgaattctgtcttaaatatatgaaaagtaaaaatattttgctaagacactccaagaagtgtggatggtttcatcctccagcaaatgaaatttaccgaaggaaagacctttcagtatttgaggttgatgggaatatgagcaaaatttattgccaaaacctttgcttgttagccaagctcttcctggaccacaaaacgttgtattatgatgtcgagccattccttttttatgtccttacaaaaaatgatgaaaagggctgtcatctggttggatacttctctaaggaaaagctttgccagcagaagtataatgtctcctgcataatgatcatgccccagcaccaaaggcaaggatttggacggtttctcattgatttcagctatttgctttctagaagagaaggccaagcagggtctcctgaaaagcctctctccgatctgggccgtctctcctacctggcatattggaagagcgtcatcttggagtatctctaccaccaccatgagaggcacatcagcatcaaggcaattagcagagcgacgggcatgtgcccacatgacattgccaccactctgcagcacctccacatgatcgacaagagagatggcagatttgtcatcattagacgggaaaagttgatattgagccacatggaaaagctgaaaacctgttccagagccaatgaacttgatccagacagtctgaggtggaccccaattttaatttctaatgctgcagtgtctgaagaagagcgagaagctgagaaagaggctgagcggctaatggaacaagctagctgctgggagaaggaggaacaagaaatcctgtcaactagagctaacagtaggcaatcacctgcaaaagtacaatcgaaaaataaatatttgcattccccggagagccggccagtcacaggggagcgagggcagctgctggagctgtctaaagagagcagtgaagaagaagaggaggaggaggacgaggaggaggaagaagaggaggaagaagaggaagaggatgaagaggaggaagaagaggaagaagaagaagaagaagaagaaaatattcaaagctctcccccaagattgacgaaaccacagtcagttgccataaagagaaagaggccttttgtactaaagaagaaaaggggtcgtaaacgcaggaggatcaacagcagtgtaacaacagagaccatttcagagacgacagaagtactgaatgagccctttgacaactcagatgaagagaggccaatgccacagctggagcctacctgtgagattgaagtggaggaagatggcaggaagccagtcctgagaaaagcattccagcatcagcctgggaagaaaagacaaacagaggaagaggaaggaaaagacaatcattgcttcaagaatgctgacccttgtagaaacaatatgaatgatgattcaagtaacttgaaagaaggcagtaaagacaatcccgaacctctaaagtgcaaacaagtgtggccaaaaggaacaaagcgcggtctatctaagtggaggcaaaacaaagagaggaagaccggatttaaactgaatttgtacaccccgccagaaacacccatggagcctgacgagcaggtaacagtggaagaacagaaggagacttcagaaggaaaaaccagccccagtcccatcaggattgaggaggaggtcaaggaaactggggaagccctgttgcctcaagaggaaaacagaagggaagaaacatgtgcccctgtaagtccaaacacatcaccaggtgaaaaaccagaagatgatctcatcaaacctgaggaagaggaagaggaggaggaggaggaagaggaagaagaggaagaagaggaaggggaagaagaagaaggaggaggaaatgtagaaaaagatccagatggtgctaaaagccaagaaaaagaggaaccagaaatctccacggaaaaagaagactctgcacgtttggatgatcacgaagaggaggaggaagaggatgaagagccatcccacaacgaggaccatgatgccgatgacgaggatgacagccacatggagtctgccgaagtggagaaggaagagctgcccagagaaagcttcaaagaagtactggaaaaccaggagacttttttagaccttaatgtgcagcctggtcactcgaacccagaggtcttaatggactgtggcgtcgacctgacagcttcttgtaacagtgagcccaaggagcttgctggggaccctgaagctgtacccgaatctgacgaggagccacccccaggagaacaggcacagaagcaggaccaaaagaacagcaaggaagtcgatacagagttcaaagagggaaacccagcaaccatggaaatcgactctgagactgtccaggccgttcagtctttgacccaggagagcagcgaacaggacgacacctttcaggattgtgccgagactcaagaggcctgtagaagcctacagaactacacccgtgcagaccaaagtccacagattgccaccacgctcgacgattgccaacagtcggaccacagtagcccagtttcatccgtccactcccatcctggccagtccgtacgttctgtcaacagcccaagtgtccctgctctggaaaacagctacgcccaaatcagcccagatcaaagtgccatctcagtgccatctctgcagaacatggaaaccagtcccatgatggatgtcccatcagtttcagatcattcacagcaagtcgtagacagtggatttagtgacctgggcagtatcgagagcacaactgagaactacgaaaacccaagcagctacgattctactatgggaggcagcatctgtggaaacggctcttcacagaacagctgctcctatagcaacctcacctccagcagtctgacacagagcagctgtgctgtcacccagcagatgtccaacatcagcgggagctgcagcatgctgcagcaaaccagcatcagctcccctccgacctgcagcgtcaagtctcctcaaggctgtgtggtggagaggcctccgagcagcagccagcagctggctcagtgcagcatggctgctaacttcaccccacccatgcagctggctgaaatccccgagacgagcaacgccaacattggcttatacgagcgaatgggtcagagtgattttggggctgggcattacccgcagccgtcagccaccttcagccttgccaaactgcagcagttaactaatacacttattgatcattcattgccttacagccattccgctgctgtgacttcctatgcaaacagtgcctctttgtccacaccattaagtaacacagggcttgttcaactttctcagtctccacactccgtccctgggggaccccaagcacaagctaccatgaccccaccccccaacctgactcctcctccaatgaatctgccgccgcctcttttgcaacggaacatggctgcatcaaatattggcatctctcacagccaaagactgcaaacccagattgccagcaagggccacatctccatgagaaccaagtcagcgtctctgtcaccagccgctgccacccatcagtcacaaatctatgggcgctcccagactgtagccatgcagggtcctgcacggactttaacgatgcaaagaggcatgaacatgagtgtgaacctgatgccagcgccagcctacaatgtcaactctgtgaacatgaacatgaacactctcaacgccatgaatgggtacagcatgtcccagccaatgatgaacagtggctaccacagcaatcatggctatatgaatcaaacgccccaataccctatgcagatgcagatgggcatgatgggcacccagccatatgcccagcagccaatgcagaccccaccccacggtaacatgatgtacacggcccccggacatcacggctacatgaacacaggcatgtccaaacagtctctcaatggctcctacatgagaaggtagacaacgtgggcagtccacaaaacctacggggcatcactattggattgatctgcacaaatacctttgaagagtacgatttcaaaaccagcaattggtgtgaatgcaaaaacatttgttggcaccatttatttaaaaaaaaaaaaagctgtatgcagcagaaagccttatacaagttgtttttctttttttcctttttcttttttttggtaccttcatttctgttacttttatataaaattctctgcaaaggaaggcctctctttggactacaatttggaggcagccacttgttgtgcctgcttctgttaaacaatgtggatatcaagcccccccaaattatctgttttaatattgaacctagagctttttttttcccttccctgtccactccatgtaaatgcctttagcatttcagttattgtatattttgtttaaggtgacacttcagcatgccgctaatgtctttgttagtgacagtgcattttgtagtactgtacaagtgttgtgctaacagtaagccatttcttaagttttttgccttgattagggtgccctaatttgagggttttaaaaaaaactatatttttgttaattataaaactgtaaagagctataaaagctattcccatttggttagtcaaaagggttttattgctaaatgtttggtgtaaagttgagacccttttccattttggtgacagatttctttggggaaaaaaggcagctttctgttttataaatgcagacttctgtttattgaatgaagcatatctcagtgtttatctgtcaggttttgaaacatttcatatatgtccaaatacttggcaggatttaaaaaaaaatagtgaatttggtgtaaagttgctattttatggaaatgcctctaactttacattttcattccatctgtagatttttctatctttataaaatattggagttattttttaaggaaaaatagaaaagtagcttgtgaatagctcaaactaagcttacaaatcgcatgtaaaaaagcaaaaaagttatttgtgtctgtttatattgcttccttttttgtagcctttgtacctgtacagggtgacagtaagggccaagcaggagaggcgtaatccttgtataaaataggatccagcgacactcttgtatttatctgttctctttttagtcagtcacttcaaaaaaacaaaaaacaaacaaaaaaaagctgtacattttaacataaaataaattatgatgagccattttta

SEQ ID NO: 15073 - DNA, 6537 bp, Homo sapiens
  source 1..6537: mol_type = unassigned DNA
gtgtgggaggactggtggctgtctttgcaggcaggcatttgcttagagcaggctgtgtgcgagcccagcgtcaagtgattccggcctcctcgagtcagcggtggtgggatgaggctctgccgaggggactggctgtgaaggatgagttcagggtgggatgacggaccgcttctgggaccagtggtatctctggtatctccgcttgctccggctgctggatcgagggtcttttcggaatgatggtttgaaagcttctgatgtccttcctatcctaaaggaaaaggtggccttcgtgtctgggggtcgtgataagcgaggcggacccatcctgaccttccctgctcgcagcaatcatgacagaataagacaggaagacctgcggaaactcgtgacgtatttggccagcgtgccaagtgaggacgtgtgcaaacgtggcttcactgtcatcatcgacatgcggggctccaagtgggacctcatcaagcccctcctcaaaacgctgcaggaagcctttccagctgagatccatgtggccctcatcattaaacccgacaacttctggcagaaacagaagaccaactttggcagctccaaattcatctttgagacgagcatggtatctgtggagggcctcacaaagctggtggacccctcccagctgacggaggagtttgatggctccctggactacaaccatgaggagtggatcgaactgcggctctccctggaggagttcttcaacagcgccgtgcacctgctctcgcgcctcgaggacctccaggagatgctagcccggaaggagtttcctgtggatgtggagggctctcggcggctcattgacgaacacacacagctcaagaaaaaggtgctgaaggcccctgtggaggagctggaccgggaggggcagcggctgctgcagtgcatccgctgcagcgacggcttctcaggacgcaactgcatcccgggcagtgctgacttccagagcctggtgcccaagatcaccagtctcctggacaagctgcactccacccggcagcacctgcaccagatgtggcatgtgcgcaagctcaagctggaccagtgctttcagctgcggctcttcgagcaggatgctgagaagatgtttgactggataagccacaacaaggagttattcctccagagccacacggagatcggagtcagctaccagtacgcccttgacctccagacgcagcacaatcactttgccatgaactccatgaatgcctatgtcaacatcaaccgcatcatgtccgtggcttcccgcctctctgaggccggtcattatgcctcacaacaaatcaagcagatctccacccagctggaccaggagtggaagagcttcgctgctgccctggatgaacgcagcaccatcctcgccatgtctgctgtgttccaccagaaggctgagcagttcctgtcgggagtggatgcctggtgcaagatgtgcagtgaaggtggtctgccatccgagatgcaagacctagagctggcaatccaccaccaccagaccttgtatgagcaggtgacccaagcctacacagaggtcagccaggatggcaaagcactacttgatgtgctgcagcggcccctgagccctgggaactccgaatccctcacggccacagccaactactccaaggcagtgcaccaggtgctggacgtggtgcatgaggtgttacatcaccagcgacggctggagagcatctggcagcaccgcaaggtgcggctccaccagcggctgcagctctgcgtcttccagcaggatgtacagcaggtgttggactggattgaaaaccatggtgaggcctttctcagcaaacacactggagttgggaagtccctacatcgagcccgggccctgcagaagaggcatgatgactttgaagaggtggctcagaatacgtacaccaatgcggacaagctcctagaagcagcagagcagttggctcagacgggggaatgtgaccccgaggagatctacaaggcagctcgacacctggaggtgcgcatccaagacttcgtgcgcagggtggagcagcggaagcttctcctggacatgtctgtttccttccacacacacaccaaagagttgtggacatggatggaagaccttcagaaggagatgttggaggatgtctgtgcagattctgtggatgcagtccaggaactgatcaagcagttccagcagcagcagaccgccactctagatgccacactcaatgtcatcaaggaaggcgaagaccttatccagcagctcaggtcagcgcctccctccctcggggagcccagcgaggccagggactcggctgtgtccaacaacaaaacaccccacagcagctccatcagccacatcgagtcggtcctgcagcagcttgatgatgcccaggtgcagatggaggagctgttccacgagcggaagatcaagctggacatcttcctgcaactgcgcatctttgagcagtacaccatcgaggtgacagcagagctagacgcctggaatgaagacttgcttcggcagatgaatgacttcaacacagaggacctaaccctggcagaacagcggctgcagcgccacacagaacggaagctagccatgaacaacatgacctttgaggttatccagcagggacaggatctgcaccagtacatcacggaggtccaggcatcaggaattgagttgatctgtgaaaaagacattgatctggcagcccaggtgcaagagttattggaatttctccatgagaagcagcatgaattggagctcaatgcagagcagactcataagcggctagagcagtgcctccaattacgtcacctccaggctgaagtcaaacaggttctgggatggatccgcaatggagagtcaatgctcaacgccagcctggtcaatgccagctctttgtcggaagcagagcagctgcagcgggagcacgagcagttccaactggccatcgagtccctctttcatgccacttccttgcagaagacgcaccagagtgccctgcaggtacagcagaaagccgaggtgctgctccaggccggccactacgatgccgatgccatccgggaatgtgctgagaaggtggccctccactggcagcagctcatgctgaagatggaagaccggctaaaattggtcaatgcctctgtggccttttacaaaacttctgaacaggtgtgtagtgtcctggagagcttagagcaagaataccggagagatgaggactggtgtggtggacgagataagctggggccagcagcagagatcgaccatgtcattcccctcatcagcaaacatttggaacaaaaggaggcctttcttaaggcctgcaccctggctcggcggaatgctgaggtgtttctcaagtacatccacaggaacaacgtcagcatgcccagtgtcgccagccacactcggggacccgagcaacaagtgaaagccatcctgagtgagctcctgcagagggagaatcgcgtgctgcatttctggaccttgaagaagcggcggttagaccaatgccagcaatatgtggtgttcgagcgcagcgctaagcaggcgcttgactggatccaagaaacaggtgaattttacctctcaacacatacctccactggagagaccacagaggagactcaggaactgctgaaagaatatggggaattcagggtgcctgccaagcaaacaaaggagaaggtgaagcttctgattcagctggccgatagctttgtggaaaaaggccacattcatgccacggagataaggaaatgggtgaccacggtggacaagcactacagagatttctccctgaggatgggaaagtaccgatactcactggagaaagccctaggagtcaacacagaggataataaggacctggagctggatattatcccagcaagcctttcggatcgggaggtcaagctgcgggacgccaaccacgaagtcaatgaagagaagcggaagtcagcccggaagaaagaatttattatggctgaactactccagacagagaaggcttatgtaagggatttgcatgagtgcttagagacctacctgtgggaaatgaccagtggtgtggaggagatcccccctgggatcctcaataaagagcatatcatctttggcaacatccaagagatctacgatttccataacaacatcttcctcaaagagctggagaagtacgagcaactgcctgaggatgtgggacactgctttgttacctgggcagacaaatttcagatgtatgtcacctactgtaaaaacaagcctgattccaaccagcttatcctggagcatgcgggcaccttctttgatgagatacaacagcggcatggtctggccaactccatctcttcctacctaattaagcctgtccaaaggatcaccaaatatcaactgctcctgaaggaacttttaacttgctgtgaagaagggaaaggggagctcaaggatggcctggaggtgatgctcagtgtcccaaagaaagccaatgatgccatgcatgtcagcatgctggaagggttcgacgagaacctggatgtgcagggggagttgattctccaggatgcctttcaagtgtgggacccgaagtcgctgatccggaaggggcgggagcggcacttgttcctctttgagatctccttggtttttagcaaggagatcaaagattcttcaggacacacgaaatatgtttacaagaacaagctactgacctcagagctgggtgtgaccgagcacgtggagggcgatccctgcaaattcgccttgtggtctgggcgcaccccatcctcagacaataaaacagtgctgaaagcctccaacattgaaaccaagcaggagtggatcaagaacattcgagaagtgattcaagaaaggatcattcacctgaaaggagctttaaaggagccacttcagctccccaaaacaccagccaaacagaggaacaatagtaagagggatggagtggaggatattgacagccagggggatgggagcagccaaccagacaccatctccattgcttctaggacctctcagaacacagtggacagtgacaaggatggcaaccttgttcctcggtggcacctgggacctggagatcctttctccacttacgtttagcgcgcatcctgggacttgtccctgcagctcaccgggttagccgtggcaccgttgggacctcccaccaggactccaatcacccacctctcttgagacttctctggcagggctggtgtggggtgcagcctttgctcagagggcaacatgttccaagcaaaatctccccgcctgggccatgggctcaccctcggggctcccttcttctctactgggtgcaattcgaggttgctgagcttctctccaaagtctaaaatggtggggcagtagggacctgtgagaggcccaatggcccaatgtacttcccccagatcccactcagaacagcaggtacgcccaggctcctgctgccctagaggtctgcaacatgagtgaagaggttaattagagggacacacttatctctgaagtttttctccaggctgaacatttctattatcagtggcccctaatctggaaaaacccatcattctaatctagcttgtatccccacatcatgagaaagagggaagaagaagaagggatgatgtgtggtagagaagatgagggttaactttagcctttcccaaacactggcaacaaccacttcctcaacaatttttctatttgcttcagcctactcagattttttcaggtttttctagctcctccataacctcactccctcccgaggtctctggttcaaagaccaccctaccagcccctatttgcttcaggttatcctgttgagggtgggtgggaagagtgagaagatataaatgaaaaactggccacatgttgataattgttgaaactagatgatggtacgtggacattcattataccattctccccacttctgtatttgtttgcaatttttcataataaaaaagttttaaaagtcctccagtttccaacacactcaagagagagccccaaccccaaacacagagtttcatggaaaccccacaccaaggcaagaggcagagatgatgattccatttcatatatacactcattttctaactttttttaaaggcccactgctttattttcaatagattaaacctgatttctgagaggtcctgaagttgggcttatttccctggctgggttatgggggagggcagggtaaagggatccttaaaaaagtttacacttctatgtatctcacaatcttattgtgaggatgtgacttgttcagtgttctgaacttttcgaaggaatcgtgctctcaatgcaaagtgtcattctctggaattgcacctggctcaggaaaggactgtctttgtacttgaatttaaatccaatggagaactttaacacgggcatttgcatgactgagaattgctgctgtcttttttccgtatgtcactttcttgaatgtgttctaataaaatgattctaaagca

SEQ ID NO: 15074 - DNA, 5752 bp, Homo sapiens
  source 1..5752: mol_type = unassigned DNA
gtggctcccagtaagtcagagctgcggccgcggtgcggggagagcacagcggggagggcgggagccggctctcgggcggcggcgctgaagtttccttcccgccgcgctctcaccccgggctggcgccccgtgccatgcgggagcgctggggcggcggggcaacatgaagggcggcgacagggcttacacccgaggtccctctttggggtggctctttgctaagtgctgctgttgcttcccgtgtagagatgcatactctcattcctcaagcgagaatggaggcaagtccgagtccgtggccaacctgcaggcccagccctccctgaactccatccacagttccccgggtcccaagcgctccaccaacactcttaagaagtggctgacgagtcctgtgcgtcggcttaacagcgggaaggcagatggaaacatcaaaaagcagaagaaagttcgcgatggtcggaagagctttgacctgggatctcccaagcctggggatgaaacaacccctcagggagacagcgctgatgagaagagcaagaaaggttggggtgaagatgagccggatgaagagtcacacacacccctcccaccacctatgaagatttttgacaacgaccctacacaggatgaaatgtcctcctctttgctagcagcccggcaggcttccactgaagtacctactgctgcagaccttgtcaatgcaatagaaaagttggtcaaaaacaagctgagtctagaaggaagctcataccgggggagcttgaaagaccctgcaggctgcctgaatgaggggatggccccacccacacctcctaaaaacccagaagaagaacagaaagccaaggccctgagaggcaggatgtttgtcctgaatgagctggtacagacagagaaagactatgtcaaggatctgggcattgtggtggagggcttcatgaagagaatagaagaaaagggtgtccctgaggatatgcgaggaaaggacaaaatcgtgtttggaaatattcatcagatttatgactggcataaggattttttcctggcggaactggaaaagtgtatccaggagcaagacagattggcacagctctttattaagcacgagcggaagctgcacatctacgtgtggtattgtcagaataagccgcgctcagagtacatcgttgctgagtatgacgcctactttgaggaggtaaaacaggagataaatcagaggctgacactgagtgacttcctcatcaagcccattcagagaataacaaaataccagttgctcctcaaggacttcctgagatacagtgagaaggctggtttggagtgttcagatattgagaaagcagtggagttaatgtgccttgttcccaaacgctgcaatgacatgatgaatctaggacgtctgcagggctttgagggcactctgactgctcaggggaagctgctgcagcaggacacattctatgtgatcgagctggatgcaggcatgcagtcccggaccaaagagaggcgcgtgttcctcttcgagcagattgtcatcttcagtgaactgctcaggaagggatccctcacccctggctacatgttcaaaaggagcatcaagatgaattacttggtcctggaggagaatgtggacaatgatccctgcaagtttgcactcatgaacagagagacttctgagagggttgttctgcaagccgccaacgctgacatccagcaggcctgggtgcaggacatcaatcaagtcttagaaacacagcgagactttttgaatgcactgcaatcgcccattgagtatcaacggaaagaaaggagcacagctgtgatgaggtctcaacctgccaggcttccccaagccagccccaggccctactcctctgttcctgcgggctcagagaagcccccaaagggctccagctataacccacctctgcctcccctgaagatatctacctccaatggcagtccagggtttgaataccaccagcctggggacaagttcgaagccagcaagcagaacgacctgggaggctgcaatgggacctcgtccatggccgtgatcaaagattactatgcactgaaggagaatgaaatctgtgtgagccaaggtgaggtggtccaggtcctcgccgtcaaccagcagaacatgtgtctggtgtaccagcctgccagcgaccattcccccgccgccgagggctgggtcccaggcagcatcctggcgcccctcaccaaagccacagcagcagaaagtagtgacgggagcatcaagaagtcatgttcatggcatactctacgcatgagaaagcgggcggaagtggagaacacgggtaaaaatgaagccacagggcctcgtaaacccaaggatattctgggcaacaaagtctctgttaaagagacgaacagttccgaggaatcagagtgtgatgatcttgaccctaatactagcatggagatcttaaatccaaatttcatccaagaagtggccccagaattccttgtgcccttggtggatgtgacctgcttgcttggggacacagtgatactgcagtgcaaagtctgtgggcggccaaagcccaccatcacttggaagggtccagaccagaacatccttgacactgataacagctcagccacatacacggtctcctcttgtgattctggagaaatcaccctgaagatctgtaatctgatgccccaagacagtgggatttatacctgcatagcaacaaatgaccacgggaccacatcaacgtctgcaacagtcaaagtgcaaggtgttccagcagcccctaaccgccccattgcccaggagagaagctgcacctccgtgattctccgctggctgcccccctccagcacaggaaactgcactatttctggttacactgtggagtacagagaggaaggttctcagatctggcagcagtcagtggcttcgaccttggacacttacctcgtcatcgaagaccttagtcccgggtgtccttatcagttcagagtcagtgccagtaacccctggggaatcagccttcccagcgagccctcggagtttgtgcgacttccagaatatgatgctgctgctgatggtgccaccatttcttggaaggaaaattttgactcagcttacactgagctgaatgaaattggaagaggccgtttctctatagtaaagaaatgcattcacaaagctacccgcaaagatgtggctgtgaaatttgttagcaaaaaaatgaagaagaaagaacaggctgcccacgaggctgccctgcttcagcacctacagcacccccagtacatcactctccatgacacctatgagtcccccacatcctacatcctgatcttggaactgatggatgatggccggctcttagactaccttatgaatcatgatgaactgatggaggaaaaagtagctttctatatccgagacatcatggaggctctgcagtaccttcacaactgcagggttgcacatttggacataaagcctgaaaacctgctcattgacctacggattccagtgcctcgagtgaagctcattgacttggaggatgctgtccagatctcgggtcacttccacattcaccacctgctggggaaccctgagtttgctgccccagaagtcattcaaggcatccccgtctccctggggacagacatctggagcatcggggttctgacatatgtcatgctgagtggggtctcccccttcttggatgagagcaaagaggagacatgtatcaacgtatgcagggtggatttcagcttcccccatgaatacttctgtggtgtgagcaatgctgccagagatttcatcaatgtgatcttacaggaagattttcggaggcggcccacagcagccacatgcttgcagcatccatggctgcagccccataatggcagctactctaagatccccctggacacctcccgcctagcatgcttcatagaacgtcgcaagcaccagaatgatgtgcggcctattcccaatgtcaagagctacattgtcaaccgggtgaaccaagggacgtagccatctcccagcccctatggtttcacatagacgtgcagtgtgaaccaaagcaagactgaatgtgactgtaaataattctgttcatcatttcactccgtgcagttctctgaattgagagatgtacctcttaaacctcgtcagtggttattcagggtctgagcagcagtaaaagtcaccctaaatcaaggggcttttcagaaggtcattctgaagaaataaagaggcaaagggtcacagaagtgttcagaagaagggcaaagataagaacaatattagctgttacgaaattttaactgtatcttccaaaatgagtggttaactgggcaaaccttaagctcacaagagtataaaagatctctggctttgctgaaattttaagcaagaagttctatttaatggagatgtcatgtatatcaactattctggtttagataacttagatatagtttcttaataggatagatacccacatacagtataatatatcccattcaggtttcagagttttctaatatagagatatatatattaaatcaatcacaagtaattttgagtgctccagttaagacagtaatttatttaccgaatcattacattgttttgactaagcacaattagatgacaagtttttttagagcattttatagatcttgtatagaaatcttttaccagaacctgtgcattaagagaaagcaatgttgcccttttgaatgagaaaattttttctgtcaatcgcaggttatttgattaagataggttctttctgtatatgaaacgctccccgcaaattcactggcagctcagaattattctggaaagaaagcctgccaggaaataaattcaaatacagtatgagctgcggggatatttttgtgtctacaccaggtttgaaataagtaaacaaatacaagaggttcatataaaagggcaaatgaaaacctttcctacagttcctatgaacaacgtaccaacactttctgatttcttctacagctgtagaataccatctttcagaaagttggctggctttatttctaactccttattgaagctaaggggtgcttactaaaaggaggcagccatataggccttttaaaggcctggttctaagtcctttttaaagccatggaacaaaacctgatacatcaccctaacagagcattaagttgtaactgagattgcaatacctgtcaccatgcagccgctgatagttctctgaactaaaaggactaattgtactttgaggccaatgctgctttctggtgtatattctccatacaagattattattaactgctctttttccctctggtggaaaaaaaattaaacctgggcatttcatgggttttctttctttatttttgttcatttgttttggagggagggagcttgttttttgtgtttgtacatgatccacccttagttttctagaatgtgtgttgaaaattgcgattatacaagtaagattttaaaaatgtaactcaagtgtttgttcaaatcaggtttaatggtgttgcttctctcctataatgggatagagaaaattaaaatcacgtagtacagaagtgcaagaagagaatttatgaaggatgaatagaactacaaacctatctaaatgaaaaagaaatggtggaaactaagcctgaactttaacatataaaaaacacttattcccacagagaaaatgtaaaattaaaaatcatcatctttttttttcca

SEQ ID NO: 15075 - DNA, 10806 bp, Homo sapiens
  source 1..10806: mol_type = unassigned DNA
gcaggcatttgcttagagcaggctgtgtgcgagcccagcgtcaagtgattccggcctcctcgagtcagcggtggtgggatgaggctctgccgaggggactggctgtgaaggatgagttcagggtgggatgacggaccgcttctgggaccagtggtatctctggtatctccgcttgctccggctgctggatcgagggtcttttcggaatgatggtttgaaagcttctgatgtccttcctatcctaaaggaaaaggtggccttcgtgtctgggggtcgtgataagcgaggcggacccatcctgaccttccctgctcgcagcaatcatgacagaataagacaggaagacctgcggaaactcgtgacgtatttggccagcgtgccaagtgaggacgtgtgcaaacgtggcttcactgtcatcatcgacatgcggggctccaagtgggacctcatcaagcccctcctcaaaacgctgcaggaagcctttccagctgagatccatgtggccctcatcattaaacccgacaacttctggcagaaacagaagaccaactttggcagctccaaattcatctttgagacgagcatggtatctgtggagggcctcacaaagctggtggacccctcccagctgacggaggagtttgatggctccctggactacaaccatgaggagtggatcgaactgcggctctccctggaggagttcttcaacagcgccgtgcacctgctctcgcgcctcgaggacctccaggagatgctagcccggaaggagtttcctgtggatgtggagggctctcggcggctcattgacgaacacacacagctcaagaaaaaggtgctgaaggcccctgtggaggagctggaccgggaggggcagcggctgctgcagtgcatccgctgcagcgacggcttctcaggacgcaactgcatcccgggcagtgctgacttccagagcctggtgcccaagatcaccagtctcctggacaagctgcactccacccggcagcacctgcaccagatgtggcatgtgcgcaagctcaagctggaccagtgctttcagctgcggctcttcgagcaggatgctgagaagatgtttgactggataagccacaacaaggagttattcctccagagccacacggagatcggagtcagctaccagtacgcccttgacctccagacgcagcacaatcactttgccatgaactccatgaatgcctatgtcaacatcaaccgcatcatgtccgtggcttcccgcctctctgaggccggtcattatgcctcacaacaaatcaagcagatctccacccagctggaccaggagtggaagagcttcgctgctgccctggatgaacgcagcaccatcctcgccatgtctgctgtgttccaccagaaggctgagcagttcctgtcgggagtggatgcctggtgcaagatgtgcagtgaaggtggtctgccatccgagatgcaagacctagagctggcaatccaccaccaccagaccttgtatgagcaggtgacccaagcctacacagaggtcagccaggatggcaaagcactacttgatgtgctgcagcggcccctgagccctgggaactccgaatccctcacggccacagccaactactccaaggcagtgcaccaggtgctggacgtggtgcatgaggtgttacatcaccagcgacggctggagagcatctggcagcaccgcaaggtgcggctccaccagcggctgcagctctgcgtcttccagcaggatgtacagcaggtgttggactggattgaaaaccatggtgaggcctttctcagcaaacacactggagttgggaagtccctacatcgagcccgggccctgcagaagaggcatgatgactttgaagaggtggctcagaatacgtacaccaatgcggacaagctcctagaagcagcagagcagttggctcagacgggggaatgtgaccccgaggagatctacaaggcagctcgacacctggaggtgcgcatccaagacttcgtgcgcagggtggagcagcggaagcttctcctggacatgtctgtttccttccacacacacaccaaagagttgtggacatggatggaagaccttcagaaggagatgttggaggatgtctgtgcagattctgtggatgcagtccaggaactgatcaagcagttccagcagcagcagaccgccactctagatgccacactcaatgtcatcaaggaaggcgaagaccttatccagcagctcaggtcagcgcctccctccctcggggagcccagcgaggccagggactcggctgtgtccaacaacaaaacaccccacagcagctccatcagccacatcgagtcggtcctgcagcagcttgatgatgcccaggtgcagatggaggagctgttccacgagcggaagatcaagctggacatcttcctgcaactgcgcatctttgagcagtacaccatcgaggtgacagcagagctagacgcctggaatgaagacttgcttcggcagatgaatgacttcaacacagaggacctaaccctggcagaacagcggctgcagcgccacacagaacggaagctagccatgaacaacatgacctttgaggttatccagcagggacaggatctgcaccagtacatcacggaggtccaggcatcaggaattgagttgatctgtgaaaaagacattgatctggcagcccaggtgcaagagttattggaatttctccatgagaagcagcatgaattggagctcaatgcagagcagactcataagcggctagagcagtgcctccaattacgtcacctccaggctgaagtcaaacaggttctgggatggatccgcaatggagagtcaatgctcaacgccagcctggtcaatgccagctctttgtcggaagcagagcagctgcagcgggagcacgagcagttccaactggccatcgagtccctctttcatgccacttccttgcagaagacgcaccagagtgccctgcaggtacagcagaaagccgaggtgctgctccaggccggccactacgatgccgatgccatccgggaatgtgctgagaaggtggccctccactggcagcagctcatgctgaagatggaagaccggctaaaattggtcaatgcctctgtggccttttacaaaacttctgaacaggtgtgtagtgtcctggagagcttagagcaagaataccggagagatgaggactggtgtggtggacgagataagctggggccagcagcagagatcgaccatgtcattcccctcatcagcaaacatttggaacaaaaggaggcctttcttaaggcctgcaccctggctcggcggaatgctgaggtgtttctcaagtacatccacaggaacaacgtcagcatgcccagtgtcgccagccacactcggggacccgagcaacaagtgaaagccatcctgagtgagctcctgcagagggagaatcgcgtgctgcatttctggaccttgaagaagcggcggttagaccaatgccagcaatatgtggtgttcgagcgcagcgctaagcaggcgcttgactggatccaagaaacaggtgaattttacctctcaacacatacctccactggagagaccacagaggagactcaggaactgctgaaagaatatggggaattcagggtgcctgccaagcaaacaaaggagaaggtgaagcttctgattcagctggccgatagctttgtggaaaaaggccacattcatgccacggagataaggaaatgggtgaccacggtggacaagcactacagagatttctccctgaggatgggaaagtaccgatactcactggagaaagccctaggagtcaacacagaggataataaggacctggagctggatattatcccagcaagcctttcggatcgggaggtcaagctgcgggacgccaaccacgaagtcaatgaagagaagcggaagtcagcccggaagaaagaatttattatggctgaactactccagacagagaaggcttatgtaagggatttgcatgagtgcttagagacctacctgtgggaaatgaccagtggtgtggaggagatcccccctgggatcctcaataaagagcatatcatctttggcaacatccaagagatctacgatttccataacaacatcttcctcaaagagctggagaagtacgagcaactgcctgaggatgtgggacactgctttgttacctgggcagacaaatttcagatgtatgtcacctactgtaaaaacaagcctgattccaaccagcttatcctggagcatgcgggcaccttctttgatgagatacaacagcggcatggtctggccaactccatctcttcctacctaattaagcctgtccaaaggatcaccaaatatcaactgctcctgaaggaacttttaacttgctgtgaagaagggaaaggggagctcaaggatggcctggaggtgatgctcagtgtcccaaagaaagccaatgatgccatgcatgtcagcatgctggaagggttcgacgagaacctggatgtgcagggggagttgattctccaggatgcctttcaagtgtgggacccgaagtcgctgatccggaaggggcgggagcggcacttgttcctctttgagatctccttggtttttagcaaggagatcaaagattcttcaggacacacgaaatatgtttacaagaacaagctactgacctcagagctgggtgtgaccgagcacgtggagggcgatccctgcaaattcgccttgtggtctgggcgcaccccatcctcagacaataaaacagtgctgaaagcctccaacattgaaaccaagcaggagtggatcaagaacattcgagaagtgattcaagaaaggatcattcacctgaaaggagctttaaaggagccacttcagctccccaaaacaccagccaaacagaggaacaatagtaagagggatggagtggaggatattgacagccagggggatgggagcagccaaccagacaccatctccattgcttctaggacctctcagaacacagtggacagtgacaagctctctggtggatgtgagctgacagtggtcctccaggacttcagtgcgggccacagcagtgagctgaccatccaggtggggcagacggtagagctgctggagcggcccagcgagcggcctggttggtgtctggtccgtaccaccgaacggagcccgcccttggagggtctggtccccagcagcgccctgtgcatctcacactcccgaagcagcgtggagatggactgcttcttccccttggtgaaagatgcatactctcattcctcaagcgagaatggaggcaagtccgagtccgtggccaacctgcaggcccagccctccctgaactccatccacagttccccgggtcccaagcgctccaccaacactcttaagaagtggctgacgagtcctgtgcgtcggcttaacagcgggaaggcagatggaaacatcaaaaagcagaagaaagttcgcgatggtcggaagagctttgacctgggatctcccaagcctggggatgaaacaacccctcagggagacagcgctgatgagaagagcaagaaaggttggggtgaagatgagccggatgaagagtcacacacacccctcccaccacctatgaagatttttgacaacgaccctacacaggatgaaatgtcctcctctttgctagcagcccggcaggcttccactgaagtacctactgctgcagaccttgtcaatgcaatagaaaagttggtcaaaaacaagctgagtctagaaggaagctcataccgggggagcttgaaagaccctgcaggctgcctgaatgaggggatggccccacccacacctcctaaaaacccagaagaagaacagaaagccaaggccctgagaggcaggatgtttgtcctgaatgagctggtacagacagagaaagactatgtcaaggatctgggcattgtggtggagggcttcatgaagagaatagaagaaaagggtgtccctgaggatatgcgaggaaaggacaaaatcgtgtttggaaatattcatcagatttatgactggcataaggattttttcctggcggaactggaaaagtgtatccaggagcaagacagattggcacagctctttattaagcacgagcggaagctgcacatctacgtgtggtattgtcagaataagccgcgctcagagtacatcgttgctgagtatgacgcctactttgaggaggtaaaacaggagataaatcagaggctgacactgagtgacttcctcatcaagcccattcagagaataacaaaataccagttgctcctcaaggacttcctgagatacagtgagaaggctggtttggagtgttcagatattgagaaagcagtggagttaatgtgccttgttcccaaacgctgcaatgacatgatgaatctaggacgtctgcagggctttgagggcactctgactgctcaggggaagctgctgcagcaggacacattctatgtgatcgagctggatgcaggcatgcagtcccggaccaaagagaggcgcgtgttcctcttcgagcagattgtcatcttcagtgaactgctcaggaagggatccctcacccctggctacatgttcaaaaggagcatcaagatgaattacttggtcctggaggagaatgtggacaatgatccctgcaagtttgcactcatgaacagagagacttctgagagggttgttctgcaagccgccaacgctgacatccagcaggcctgggtgcaggacatcaatcaagtcttagaaacacagcgagactttttgaatgcactgcaatcgcccattgagtatcaacggaaagaaaggagcacagctgtgatgaggtctcaacctgccaggcttccccaagccagccccaggccctactcctctgttcctgcgggctcagagaagcccccaaagggctccagctataacccacctctgcctcccctgaagatatctacctccaatggcagtccagggtttgaataccaccagcctggggacaagttcgaagccagcaagcagaacgacctgggaggctgcaatgggacctcgtccatggccgtgatcaaagattactatgcactgaaggagaatgaaatctgtgtgagccaaggtgaggtggtccaggtcctcgccgtcaaccagcagaacatgtgtctggtgtaccagcctgccagcgaccattcccccgccgccgagggctgggtcccaggcagcatcctggcgcccctcaccaaagccacagcagcagaaagtagtgacgggagcatcaagaagtcatgttcatggcatactctacgcatgagaaagcgggcggaagtggagaacacgggtaaaaatgaagccacagggcctcgtaaacccaaggatattctgggcaacaaagtctctgttaaagagacgaacagttccgaggaatcagagtgtgatgatcttgaccctaatactagcatggagatcttaaatccaaatttcatccaagaagtggccccagaattccttgtgcccttggtggatgtgacctgcttgcttggggacacagtgatactgcagtgcaaagtctgtgggcggccaaagcccaccatcacttggaagggtccagaccagaacatccttgacactgataacagctcagccacatacacggtctcctcttgtgattctggagaaatcaccctgaagatctgtaatctgatgccccaagacagtgggatttatacctgcatagcaacaaatgaccacgggaccacatcaacgtctgcaacagtcaaagtgcaaggtgttccagcagcccctaaccgccccattgcccaggagagaagctgcacctccgtgattctccgctggctgcccccctccagcacaggaaactgcactatttctggttacactgtggagtacagagaggaaggttctcagatctggcagcagtcagtggcttcgaccttggacacttacctcgtcatcgaagaccttagtcccgggtgtccttatcagttcagagtcagtgccagtaacccctggggaatcagccttcccagcgagccctcggagtttgtgcgacttccagaatatgatgctgctgctgatggtgccaccatttcttggaaggaaaattttgactcagcttacactgagctgaatgaaattggaagaggccgtttctctatagtaaagaaatgcattcacaaagctacccgcaaagatgtggctgtgaaatttgttagcaaaaaaatgaagaagaaagaacaggctgcccacgaggctgccctgcttcagcacctacagcacccccagtacatcactctccatgacacctatgagtcccccacatcctacatcctgatcttggaactgatggatgatggccggctcttagactaccttatgaatcatgatgaactgatggaggaaaaagtagctttctatatccgagacatcatggaggctctgcagtaccttcacaactgcagggttgcacatttggacataaagcctgaaaacctgctcattgacctacggattccagtgcctcgagtgaagctcattgacttggaggatgctgtccagatctcgggtcacttccacattcaccacctgctggggaaccctgagtttgctgccccagaagtcattcaaggcatccccgtctccctggggacagacatctggagcatcggggttctgacatatgtcatgctgagtggggtctcccccttcttggatgagagcaaagaggagacatgtatcaacgtatgcagggtggatttcagcttcccccatgaatacttctgtggtgtgagcaatgctgccagagatttcatcaatgtgatcttacaggaagattttcggaggcggcccacagcagccacatgcttgcagcatccatggctgcagccccataatggcagctactctaagatccccctggacacctcccgcctagcatgcttcatagaacgtcgcaagcaccagaatgatgtgcggcctattcccaatgtcaagagctacattgtcaaccgggtgaaccaagggacgtagccatctcccagcccctatggtttcacatagacgtgcagtgtgaaccaaagcaagactgaatgtgactgtaaataattctgttcatcatttcactccgtgcagttctctgaattgagagatgtacctcttaaacctcgtcagtggttattcagggtctgagcagcagtaaaagtcaccctaaatcaaggggcttttcagaaggtcattctgaagaaataaagaggcaaagggtcacagaagtgttcagaagaagggcaaagataagaacaatattagctgttacgaaattttaactgtatcttccaaaatgagtggttaactgggcaaaccttaagctcacaagagtataaaagatctctggctttgctgaaattttaagcaagaagttctatttaatggagatgtcatgtatatcaactattctggtttagataacttagatatagtttcttaataggatagatacccacatacagtataatatatcccattcaggtttcagagttttctaatatagagatatatatattaaatcaatcacaagtaattttgagtgctccagttaagacagtaatttatttaccgaatcattacattgttttgactaagcacaattagatgacaagtttttttagagcattttatagatcttgtatagaaatcttttaccagaacctgtgcattaagagaaagcaatgttgcccttttgaatgagaaaattttttctgtcaatcgcaggttatttgattaagataggttctttctgtatatgaaacgctccccgcaaattcactggcagctcagaattattctggaaagaaagcctgccaggaaataaattcaaatacagtatgagctgcggggatatttttgtgtctacaccaggtttgaaataagtaaacaaatacaagaggttcatataaaagggcaaatgaaaacctttcctacagttcctatgaacaacgtaccaacactttctgatttcttctacagctgtagaataccatctttcagaaagttggctggctttatttctaactccttattgaagctaaggggtgcttactaaaaggaggcagccatataggccttttaaaggcctggttctaagtcctttttaaagccatggaacaaaacctgatacatcaccctaacagagcattaagttgtaactgagattgcaatacctgtcaccatgcagccgctgatagttctctgaactaaaaggactaattgtactttgaggccaatgctgctttctggtgtatattctccatacaagattattattaactgctctttttccctctggtggaaaaaaaattaaacctgggcatttcatgggttttctttctttatttttgttcatttgttttggagggagggagcttgttttttgtgtttgtacatgatccacccttagttttctagaatgtgtgttgaaaattgcgattatacaagtaagattttaaaaatgtaactcaagtgtttgttcaaatcaggtttaatggtgttgcttctctcctataatgggatagagaaaattaaaatcacgtagtacagaagtgcaagaagagaatttatgaaggatgaatagaactacaaacctatctaaatgaaaaagaaatggtggaaactaagcctgaactttaacatataaaaaacacttattcccacagagaaaatgtaaaattaaaaatcatcatctttttttttcc

SEQ ID NO: 15076 - DNA, 5492 bp, Homo sapiens
  source 1..5492: mol_type = unassigned DNA
atgaagggcggcgacagggcttacacccgaggtccctctttggggtggctctttgctaagtgctgctgttgcttcccgtgtagagatgcatactctcattcctcaagcgagaatggaggcaagtccgagtccgtggccaacctgcaggcccagccctccctgaactccatccacagttccccgggtcccaagcgctccaccaacactcttaagaagtggctgacgagtcctgtgcgtcggcttaacagcgggaaggcagatggaaacatcaaaaagcagaagaaagttcgcgatggtcggaagagctttgacctgggatctcccaagcctggggatgaaacaacccctcagggagacagcgctgatgagaagagcaagaaaggttggggtgaagatgagccggatgaagagtcacacacacccctcccaccacctatgaagatttttgacaacgaccctacacaggatgaaatgagtctagaaggaagctcataccgggggagcttgaaagaccctgcaggctgcctgaatgaggggatggccccacccacacctcctaaaaacccagaagaagaacagaaagccaaggccctgagaggcaggatgtttgtcctgaatgagctggtacagacagagaaagactatgtcaaggatctgggcattgtggtggagggcttcatgaagagaatagaagaaaagggtgtccctgaggatatgcgaggaaaggacaaaatcgtgtttggaaatattcatcagatttatgactggcataaggattttttcctggcggaactggaaaagtgtatccaggagcaagacagattggcacagctctttattaagcacgagcggaagctgcacatctacgtgtggtattgtcagaataagccgcgctcagagtacatcgttgctgagtatgacgcctactttgaggaggtaaaacaggagataaatcagaggctgacactgagtgacttcctcatcaagcccattcagagaataacaaaataccagttgctcctcaaggacttcctgagatacagtgagaaggctggtttggagtgttcagatattgagaaagcagtggagttaatgtgccttgttcccaaacgctgcaatgacatgatgaatctaggacgtctgcagggctttgagggcactctgactgctcaggggaagctgctgcagcaggacacattctatgtgatcgagctggatgcaggcatgcagtcccggaccaaagagaggcgcgtgttcctcttcgagcagattgtcatcttcagtgaactgctcaggaagggatccctcacccctggctacatgttcaaaaggagcatcaagatgaattacttggtcctggaggagaatgtggacaatgatccctgcaagtttgcactcatgaacagagagacttctgagagggttgttctgcaagccgccaacgctgacatccagcaggcctgggtgcaggacatcaatcaagtcttagaaacacagcgagactttttgaatgcactgcaatcgcccattgagtatcaacggaaagaaaggagcacagctgtgatgaggtctcaacctgccaggcttccccaagccagccccaggccctactcctctgttcctgcgggctcagagaagcccccaaagggctccagctataacccacctctgcctcccctgaagatatctacctccaatggcagtccagggtttgaataccaccagcctggggacaagttcgaagccagcaagcagaacgacctgggaggctgcaatgggacctcgtccatggccgtgatcaaagattactatgcactgaaggagaatgaaatctgtgtgagccaaggtgaggtggtccaggtcctcgccgtcaaccagcagaacatgtgtctggtgtaccagcctgccagcgaccattcccccgccgccgagggctgggtcccaggcagcatcctggcgcccctcaccaaagccacagcagcagaaagtagtgacgggagcatcaagaagtcatgttcatggcatactctacgcatgagaaagcgggcggaagtggagaacacgggtaaaaatgaagccacagggcctcgtaaacccaaggatattctgggcaacaaagtctctgttaaagagacgaacagttccgaggaatcagagtgtgatgatcttgaccctaatactagcatggagatcttaaatccaaatttcatccaagaagtggccccagaattccttgtgcccttggtggatgtgacctgcttgcttggggacacagtgatactgcagtgcaaagtctgtgggcggccaaagcccaccatcacttggaagggtccagaccagaacatccttgacactgataacagctcagccacatacacggtctcctcttgtgattctggagaaatcaccctgaagatctgtaatctgatgccccaagacagtgggatttatacctgcatagcaacaaatgaccacgggaccacatcaacgtctgcaacagtcaaagtgcaaggtgttccagcagcccctaaccgccccattgcccaggagagaagctgcacctccgtgattctccgctggctgcccccctccagcacaggaaactgcactatttctggttacactgtggagtacagagaggaaggttctcagatctggcagcagtcagtggcttcgaccttggacacttacctcgtcatcgaagaccttagtcccgggtgtccttatcagttcagagtcagtgccagtaacccctggggaatcagccttcccagcgagccctcggagtttgtgcgacttccagaatatgatgctgctgctgatggtgccaccatttcttggaaggaaaattttgactcagcttacactgagctgaatgaaattggaagaggccgtttctctatagtaaagaaatgcattcacaaagctacccgcaaagatgtggctgtgaaatttgttagcaaaaaaatgaagaagaaagaacaggctgcccacgaggctgccctgcttcagcacctacagcacccccagtacatcactctccatgacacctatgagtcccccacatcctacatcctgatcttggaactgatggatgatggccggctcttagactaccttatgaatcatgatgaactgatggaggaaaaagtagctttctatatccgagacatcatggaggctctgcagtaccttcacaactgcagggttgcacatttggacataaagcctgaaaacctgctcattgacctacggattccagtgcctcgagtgaagctcattgacttggaggatgctgtccagatctcgggtcacttccacattcaccacctgctggggaaccctgagtttgctgccccagaagtcattcaaggcatccccgtctccctggggacagacatctggagcatcggggttctgacatatgtcatgctgagtggggtctcccccttcttggatgagagcaaagaggagacatgtatcaacgtatgcagggtggatttcagcttcccccatgaatacttctgtggtgtgagcaatgctgccagagatttcatcaatgtgatcttacaggaagattttcggaggcggcccacagcagccacatgcttgcagcatccatggctgcagccccataatggcagctactctaagatccccctggacacctcccgcctagcatgcttcatagaacgtcgcaagcaccagaatgatgtgcggcctattcccaatgtcaagagctacattgtcaaccgggtgaaccaagggacgtagccatctcccagcccctatggtttcacatagacgtgcagtgtgaaccaaagcaagactgaatgtgactgtaaataattctgttcatcatttcactccgtgcagttctctgaattgagagatgtacctcttaaacctcgtcagtggttattcagggtctgagcagcagtaaaagtcaccctaaatcaaggggcttttcagaaggtcattctgaagaaataaagaggcaaagggtcacagaagtgttcagaagaagggcaaagataagaacaatattagctgttacgaaattttaactgtatcttccaaaatgagtggttaactgggcaaaccttaagctcacaagagtataaaagatctctggctttgctgaaattttaagcaagaagttctatttaatggagatgtcatgtatatcaactattctggtttagataacttagatatagtttcttaataggatagatacccacatacagtataatatatcccattcaggtttcagagttttctaatatagagatatatatattaaatcaatcacaagtaattttgagtgctccagttaagacagtaatttatttaccgaatcattacattgttttgactaagcacaattagatgacaagtttttttagagcattttatagatcttgtatagaaatcttttaccagaacctgtgcattaagagaaagcaatgttgcccttttgaatgagaaaattttttctgtcaatcgcaggttatttgattaagataggttctttctgtatatgaaacgctccccgcaaattcactggcagctcagaattattctggaaagaaagcctgccaggaaataaattcaaatacagtatgagctgcggggatatttttgtgtctacaccaggtttgaaataagtaaacaaatacaagaggttcatataaaagggcaaatgaaaacctttcctacagttcctatgaacaacgtaccaacactttctgatttcttctacagctgtagaataccatctttcagaaagttggctggctttatttctaactccttattgaagctaaggggtgcttactaaaaggaggcagccatataggccttttaaaggcctggttctaagtcctttttaaagccatggaacaaaacctgatacatcaccctaacagagcattaagttgtaactgagattgcaatacctgtcaccatgcagccgctgatagttctctgaactaaaaggactaattgtactttgaggccaatgctgctttctggtgtatattctccatacaagattattattaactgctctttttccctctggtggaaaaaaaattaaacctgggcatttcatgggttttctttctttatttttgttcatttgttttggagggagggagcttgttttttgtgtttgtacatgatccacccttagttttctagaatgtgtgttgaaaattgcgattatacaagtaagattttaaaaatgtaactcaagtgtttgttcaaatcaggtttaatggtgttgcttctctcctataatgggatagagaaaattaaaatcacgtagtacagaagtgcaagaagagaatttatgaaggatgaatagaactacaaacctatctaaatgaaaaagaaatggtggaaactaagcctgaactttaacatataaaaaacacttattcccacagagaaaatgtaaaattaaaaatcatcatctttttttttcc

SEQ ID NO: 15077 - DNA, 6509 bp, Homo sapiens
  source 1..6509: mol_type = unassigned DNA
gtgtgggaggactggtggctgtctttgcaggcaggcatttgcttagagcaggctgtgtgcgagcccagcgtcaagtgattccggcctcctcgagtcagcggtggtgggatgaggctctgccgaggggactggctgtgaaggatgagttcagggtgggatgacggaccgcttctgggaccagtggtatctctggtatctccgcttgctccggctgctggatcgagggtcttttcggaatgatggtttgaaagcttctgatgtccttcctatcctaaaggaaaaggtggccttcgtgtctgggggtcgtgataagcgaggcggacccatcctgaccttccctgctcgcagcaatcatgacagaataagacaggaagacctgcggaaactcgtgacgtatttggccagcgtgccaagtgaggacgtgtgcaaacgtggcttcactgtcatcatcgacatgcggggctccaagtgggacctcatcaagcccctcctcaaaacgctgcaggaagcctttccagctgagatccatgtggccctcatcattaaacccgacaacttctggcagaaacagaagaccaactttggcagctccaaattcatctttgagacgagcatggtatctgtggagggcctcacaaagctggtggacccctcccagctgacggaggagtttgatggctccctggactacaaccatgaggagtggatcgaactgcggctctccctggaggagttcttcaacagcgccgtgcacctgctctcgcgcctcgaggacctccaggagatgctagcccggaaggagtttcctgtggatgtggagggctctcggcggctcattgacgaacacacacagctcaagaaaaaggtgctgaaggcccctgtggaggagctggaccgggaggggcagcggctgctgcagtgcatccgctgcagcgacggcttctcaggacgcaactgcatcccgggcagtgctgacttccagagcctggtgcccaagatcaccagtctcctggacaagctgcactccacccggcagcacctgcaccagatgtggcatgtgcgcaagctcaagctggaccagtgctttcagctgcggctcttcgagcaggatgctgagaagatgtttgactggataagccacaacaaggagttattcctccagagccacacggagatcggagtcagctaccagtacgcccttgacctccagacgcagcacaatcactttgccatgaactccatgaatgcctatgtcaacatcaaccgcatcatgtccgtggcttcccgcctctctgaggccggtcattatgcctcacaacaaatcaagcagatctccacccagctggaccaggagtggaagagcttcgctgctgccctggatgaacgcagcaccatcctcgccatgtctgctgtgttccaccagaaggctgagcagttcctgtcgggagtggatgcctggtgcaagatgtgcagtgaaggtggtctgccatccgagatgcaagacctagagctggcaatccaccaccaccagaccttgtatgagcaggtgacccaagcctacacagaggtcagccaggatggcaaagcactacttgatgtgctgcagcggcccctgagccctgggaactccgaatccctcacggccacagccaactactccaaggcagtgcaccaggtgctggacgtggtgcatgaggtgttacatcaccagcgacggctggagagcatctggcagcaccgcaaggtgcggctccaccagcggctgcagctctgcgtcttccagcaggatgtacagcaggtgttggactggattgaaaaccatggtgaggcctttctcagcaaacacactggagttgggaagtccctacatcgagcccgggccctgcagaagaggcatgatgactttgaagaggtggctcagaatacgtacaccaatgcggacaagctcctagaagcagcagagcagttggctcagacgggggaatgtgaccccgaggagatctacaaggcagctcgacacctggaggtgcgcatccaagacttcgtgcgcagggtggagcagcggaagcttctcctggacatgtctgtttccttccacacacacaccaaagagttgtggacatggatggaagaccttcagaaggagatgttggaggatgtctgtgcagattctgtggatgcagtccaggaactgatcaagcagttccagcagcagcagaccgccactctagatgccacactcaatgtcatcaaggaaggcgaagaccttatccagcagctcaggtcagcgcctccctccctcggggagcccagcgaggccagggactcggctgtgtccaacaacaaaacaccccacagcagctccatcagccacatcgagtcggtcctgcagcagcttgatgatgcccaggtgcagatggaggagctgttccacgagcggaagatcaagctggacatcttcctgcaactgcgcatctttgagcagtacaccatcgaggtgacagcagagctagacgcctggaatgaagacttgcttcggcagatgaatgacttcaacacagaggacctaaccctggcagaacagcggctgcagcgccacacagaacggaagctagccatgaacaacatgacctttgaggttatccagcagggacaggatctgcaccagtacatcacggaggtccaggcatcaggaattgagttgatctgtgaaaaagacattgatctggcagcccaggtgcaagagttattggaatttctccatgagaagcagcatgaattggagctcaatgcagagcagactcataagcggctagagcagtgcctccaattacgtcacctccaggctgaagtcaaacaggttctgggatggatccgcaatggagagtcaatgctcaacgccagcctggtcaatgccagctctttgtcggaagcagagcagctgcagcgggagcacgagcagttccaactggccatcgagaagacgcaccagagtgccctgcaggtacagcagaaagccgaggtgctgctccaggccggccactacgatgccgatgccatccgggaatgtgctgagaaggtggccctccactggcagcagctcatgctgaagatggaagaccggctaaaattggtcaatgcctctgtggccttttacaaaacttctgaacaggtgtgtagtgtcctggagagcttagagcaagaataccggagagatgaggactggtgtggtggacgagataagctggggccagcagcagagatcgaccatgtcattcccctcatcagcaaacatttggaacaaaaggaggcctttcttaaggcctgcaccctggctcggcggaatgctgaggtgtttctcaagtacatccacaggaacaacgtcagcatgcccagtgtcgccagccacactcggggacccgagcaacaagtgaaagccatcctgagtgagctcctgcagagggagaatcgcgtgctgcatttctggaccttgaagaagcggcggttagaccaatgccagcaatatgtggtgttcgagcgcagcgctaagcaggcgcttgactggatccaagaaacaggtgaattttacctctcaacacatacctccactggagagaccacagaggagactcaggaactgctgaaagaatatggggaattcagggtgcctgccaagcaaacaaaggagaaggtgaagcttctgattcagctggccgatagctttgtggaaaaaggccacattcatgccacggagataaggaaatgggtgaccacggtggacaagcactacagagatttctccctgaggatgggaaagtaccgatactcactggagaaagccctaggagtcaacacagaggataataaggacctggagctggatattatcccagcaagcctttcggatcgggaggtcaagctgcgggacgccaaccacgaagtcaatgaagagaagcggaagtcagcccggaagaaagaatttattatggctgaactactccagacagagaaggcttatgtaagggatttgcatgagtgcttagagacctacctgtgggaaatgaccagtggtgtggaggagatcccccctgggatcctcaataaagagcatatcatctttggcaacatccaagagatctacgatttccataacaacatcttcctcaaagagctggagaagtacgagcaactgcctgaggatgtgggacactgctttgttacctgggcagacaaatttcagatgtatgtcacctactgtaaaaacaagcctgattccaaccagcttatcctggagcatgcgggcaccttctttgatgagatacaacagcggcatggtctggccaactccatctcttcctacctaattaagcctgtccaaaggatcaccaaatatcaactgctcctgaaggaacttttaacttgctgtgaagaagggaaaggggagctcaaggatggcctggaggtgatgctcagtgtcccaaagaaagccaatgatgccatgcatgtcagcatgctggaagggttcgacgagaacctggatgtgcagggggagttgattctccaggatgcctttcaagtgtgggacccgaagtcgctgatccggaaggggcgggagcggcacttgttcctctttgagatctccttggtttttagcaaggagatcaaagattcttcaggacacacgaaatatgtttacaagaacaagctactgacctcagagctgggtgtgaccgagcacgtggagggcgatccctgcaaattcgccttgtggtctgggcgcaccccatcctcagacaataaaacagtgctgaaagcctccaacattgaaaccaagcaggagtggatcaagaacattcgagaagtgattcaagaaaggatcattcacctgaaaggagctttaaaggagccacttcagctccccaaaacaccagccaaacagaggaacaatagtaagagggatggagtggaggatattgacagccagggggatgggagcagccaaccagacaccatctccattgcttctaggacctctcagaacacagtggacagtgacaaggatggcaaccttgttcctcggtggcacctgggacctggagatcctttctccacttacgtttagcgcgcatcctgggacttgtccctgcagctcaccgggttagccgtggcaccgttgggacctcccaccaggactccaatcacccacctctcttgagacttctctggcagggctggtgtggggtgcagcctttgctcagagggcaacatgttccaagcaaaatctccccgcctgggccatgggctcaccctcggggctcccttcttctctactgggtgcaattcgaggttgctgagcttctctccaaagtctaaaatggtggggcagtagggacctgtgagaggcccaatggcccaatgtacttcccccagatcccactcagaacagcaggtacgcccaggctcctgctgccctagaggtctgcaacatgagtgaagaggttaattagagggacacacttatctctgaagtttttctccaggctgaacatttctattatcagtggcccctaatctggaaaaacccatcattctaatctagcttgtatccccacatcatgagaaagagggaagaagaagaagggatgatgtgtggtagagaagatgagggttaactttagcctttcccaaacactggcaacaaccacttcctcaacaatttttctatttgcttcagcctactcagattttttcaggtttttctagctcctccataacctcactccctcccgaggtctctggttcaaagaccaccctaccagcccctatttgcttcaggttatcctgttgagggtgggtgggaagagtgagaagatataaatgaaaaactggccacatgttgataattgttgaaactagatgatggtacgtggacattcattataccattctccccacttctgtatttgtttgcaatttttcataataaaaaagttttaaaagtcctccagtttccaacacactcaagagagagccccaaccccaaacacagagtttcatggaaaccccacaccaaggcaagaggcagagatgatgattccatttcatatatacactcattttctaactttttttaaaggcccactgctttattttcaatagattaaacctgatttctgagaggtcctgaagttgggcttatttccctggctgggttatgggggagggcagggtaaagggatccttaaaaaagtttacacttctatgtatctcacaatcttattgtgaggatgtgacttgttcagtgttctgaacttttcgaaggaatcgtgctctcaatgcaaagtgtcattctctggaattgcacctggctcaggaaaggactgtctttgtacttgaatttaaatccaatggagaactttaacacgggcatttgcatgactgagaattgctgctgtcttttttccgtatgtcactttcttgaatgtgttctaataaaatgattctaaagc

SEQ ID NO: 15078 - DNA, 874 bp, Homo sapiens
  source 1..874: mol_type = unassigned DNA
agttcctccacctgctggcccctggacacctctgtcaccatgtggttcctggttctgtgcctcgccctgtccctgggggggactggtgctgcgcccccgattcagtcccggattgtgggaggctgggagtgtgagcagcattcccagccctggcaggcggctctgtaccatttcagcactttccagtgtgggggcatcctggtgcaccgccagtgggtgctcacagctgctcattgcatcagcgacaattaccagctctggctgggtcgccacaacttgtttgacgacgaaaacacagcccagtttgttcatgtcagtgagagcttcccacaccctggcttcaacatgagcctcctggagaaccacacccgccaagcagacgaggactacagccacgacctcatgctgctccgcctgacagagcctgctgataccatcacagatgctgtgaaggtcgtggagttgcccaccgaggaacccgaagtggggagcacctgtttggcttccggctggggcagcatcgaaccagagaatttctcatttccagatgatctccagtgtgtggacctcaaaatcctgcctaatgatgagtgcaaaaaagcccacgtccagaaggtgacagacttcatgctgtgtgtcggacacctggaaggtggcaaagacacctgtgtgggtgattcagggggcccgctgatgtgtgatggtgtgctccaaggtgtcacatcatggggctacgtcccttgtggcacccccaataagccttctgtcgccgtcagagtgctgtcttatgtgaagtggatcgaggacaccatagcggagaactcctgaacgcccagccctgtcccctacccccagtaaaatcaaatgtgcatcc

SEQ ID NO: 15079 - DNA, 1854 bp, Homo sapiens
  source 1..1854: mol_type = unassigned DNA
agttcctccacctgctggcccctggacacctctgtcaccatgtggttcctggttctgtgcctcgccctgtccctgggggggactgctctggttttctggaaccccaccccaaggatcctgaatgccttctcagccagcgcttctgccctggcctcccccaagattgcctccaagaggaccccatatccttccagtaccctcagaccatgaaccccatccccatgagaaacgaagatcccatccttcaccctgtccgagaaggactgccactcacgcctccctcctcctgagccccgtcccagtcctgaccgcaactgtgttctcagggccccaacctcccctcagattgccattcctggttcacaggaaggaccccaaaacctctcggaagcccacctctagccttaaccatagccctttcttttaccctttaaccaggaagccctgaaatctaactgtcccagccaagctggccccttccaaccccaatgtagggaccccaagtcacccccaaactcttcagtccagatgctcttctttacctctcagacctggttccctaaagctgcatcctttcctgaacctcaaaagcccaacccaggtcctgtttccctagcctaggagccccttagccctccagattcttcctcagtgagcctctgatcctgtcccacccttggcgccttgatccctggtttccagaatccctttccactcccctaacccaccacctcccatcccccagccccagaccccaaatgacctgacgcccagatgcagtgtctgctccagacactgtctcctgtctcctaccctgatccctggaggctgctctactgtcagagcacaaaatctccccaccaggtccagccaccactccaaaagcccagggaacagtccagagtcccaccccttcccaacaccccttgcccatgtccccaacctccagccctggtcctctacccgcaatgtcccttcagacccacagcccagctccctctcctagccttgtccctggcctctcctgccaaccctgcccttcctgacccagcaccgcctctgcaggtgctgcgcccccgattcagtcccggattgtgggaggctgggagtgtgagcagcattcccagccctggcaggcggctctgtaccatttcagcactttccagtgtgggggcatcctggtgcaccgccagtgggtgctcacagctgctcattgcatcagcgacaattaccagctctggctgggtcgccacaacttgtttgacgacgaaaacacagcccagtttgttcatgtcagtgagagcttcccacaccctggcttcaacatgagcctcctggagaaccacacccgccaagcagacgaggactacagccacgacctcatgctgctccgcctgacagagcctgctgataccatcacagatgctgtgaaggtcgtggagttgcccaccgaggaacccgaagtggggagcacctgtttggcttccggctggggcagcatcgaaccagagaatttctcatttccagatgatctccagtgtgtggacctcaaaatcctgcctaatgatgagtgcaaaaaagcccacgtccagaaggtgacagacttcatgctgtgtgtcggacacctggaaggtggcaaagacacctgtgtgggtgattcagggggcccgctgatgtgtgatggtgtgctccaaggtgtcacatcatggggctacgtcccttgtggcacccccaataagccttctgtcgccgtcagagtgctgtcttatgtgaagtggatcgaggacaccatagcggagaactcctgaacgcccagccctgtcccctacccccagtaaaatcaaatgtgcatcc

SEQ ID NO: 15080 - DNA, 2363 bp, Homo sapiens
  source 1..2363: mol_type = unassigned DNA
ctgaacacggataggatgttcatggaatatgttgacaggacaaaaagttgaaactgttggcagaaacccaaagtcaatattgaagccaagcaaaatattgcctgcagtgccacattagaacagcttgaagaccgttcatttttaagtgacaagagactcacctccaagaagcaattgtgttttcagaatgattttattcaagcaagcaacttatttcatttccttgtttgctacagtttcctgtggatgtctgactcaactctatgaaaacgccttcttcagaggtggggatgtagcttccatgtacaccccaaatgcccaatactgccagatgaggtgcacattccacccaaggtgtttgctattcagttttcttccagcaagttcaatcaatgacatggagaaaaggtttggttgcttcttgaaagatagtgttacaggaaccctgccaaaagtacatcgaacaggtgcagtttctggacattccttgaagcaatgtggtcatcaaataagtgcttgccatcgagacatttataaaggagttgatatgagaggagtcaattttaatgtgtctaaggttagcagtgttgaagaatgccaaaaaaggtgcaccagtaacattcgctgccagtttttttcatatgccacgcaaacatttcacaaggcagagtaccggaacaattgcctattaaagtacagtcccggaggaacacctaccgctataaaggtgctgagtaacgtggaatctggattctcactgaagccctgtgccctttcagaaattggttgccacatgaacatcttccagcatcttgcgttctcagatgtggatgttgccagggttctcactccagatgcttttgtgtgtcggaccatctgcacctatcaccccaactgcctcttctttacattctatacaaatgtatggaaaatcgagtcacaaagaaatgtttgtcttcttaaaacatctgaaagtggcacaccaagttcctctactcctcaagaaaacaccatatctggatatagccttttaacctgcaaaagaactttacctgaaccctgccattctaaaatttacccgggagttgactttggaggagaagaattgaatgtgacttttgttaaaggagtgaatgtttgccaagagacttgcacaaagatgattcgctgtcagtttttcacttattctttactcccagaagactgtaaggaagagaagtgtaagtgtttcttaagattatctatggatggttctccaactaggattgcgtatgggacacaagggagctctggttactctttgagattgtgtaacactggggacaactctgtctgcacaacaaaaacaagcacacgcattgttggaggaacaaactcttcttggggagagtggccctggcaggtgagcctgcaggtgaagctgacagctcagaggcacctgtgtggagggtcactcataggacaccagtgggtcctcactgctgcccactgctttgatgggcttcccctgcaggatgtttggcgcatctatagtggcattttaaatctgtcagacattacaaaagatacacctttctcacaaataaaagagattattattcaccaaaactataaagtctcagaagggaatcatgatatcgccttgataaaactccaggctcctttgaattacactgaattccaaaaaccaatatgcctaccttccaaaggtgacacaagcacaatttataccaactgttgggtaaccggatggggcttctcgaaggagaaaggtgaaatccaaaatattctacaaaaggtaaatattcctttggtaacaaatgaagaatgccagaaaagatatcaagattataaaataacccaacggatggtctgtgctggctataaagaagggggaaaagatgcttgtaagggagattcaggtggtcccttagtttgcaaacacaatggaatgtggcgtttggtgggcatcaccagctggggtgaaggctgtgcccgcagggagcaacctggtgtctacaccaaagtcgctgagtacatggactggattttagagaaaacacagagcagtgatggaaaagctcagatgcagtcaccagcatgagaagcagtccagagtctaggcaatttttacaacctgagttcaagtcaaattctgagcctggggggtcctcatctgcaaagcatggagagtggcatcttctttgcatcctaaggacgaaaaacacagtgcactcagagctgctgaggacaatgtctggctgaagcccgctttcagcacgccgtaaccaggggctgacaatgcgaggtcgcaactgagatctccatgactgtgtgttgtgaaataaaatggtgaaagatca

SEQ ID NO: 15081 - DNA, 2173 bp, Homo sapiens
  source 1..2173: mol_type = unassigned DNA
agaacagcttgaagaccgttcatttttaagtgacaagagactcacctccaagaagcaattgtgttttcagattacagagggagttttctctgtgtccccacaaggcatgattctgggtctatggtgacttaagagggccacacaacaatgagtatttaattttcctcagatgtatggctacaataaacatctataggatgtctgactcaactctatgaaaacgccttcttcagaggtggggatgtagcttccatgtacaccccaaatgcccaatactgccagatgaggtgcacattccacccaaggtgtttgctattcagttttcttccagcaagttcaatcaatgacatggagaaaaggtttggttgcttcttgaaagatagtgttacaggaaccctgccaaaagtacatcgaacaggtgcagtttctggacattccttgaagcaatgtggtcatcaaataagtgcttgccatcgagacatttataaaggagttgatatgagaggagtcaattttaatgtgtctaaggttagcagtgttgaagaatgccaaaaaaggtgcaccagtaacattcgctgccagtttttttcatatgccacgcaaacatttcacaaggcagagtaccggaacaattgcctattaaagtacagtcccggaggaacacctaccgctataaaggtgctgagtaacgtggaatctggattctcactgaagccctgtgccctttcagaaattggttgccacatgaacatcttccagcatcttgcgttctcagatgtggatgttgccagggttctcactccagatgcttttgtgtgtcggaccatctgcacctatcaccccaactgcctcttctttacattctatacaaatgtatggaaaatcgagtcacaaagaaatgtttgtcttcttaaaacatctgaaagtggcacaccaagttcctctactcctcaagaaaacaccatatctggatatagccttttaacctgcaaaagaactttacctgaaccctgccattctaaaatttacccgggagttgactttggaggagaagaattgaatgtgacttttgttaaaggagtgaatgtttgccaagagacttgcacaaagatgattcgctgtcagtttttcacttattctttactcccagaagactgtaaggaagagaagtgtaagtgtttcttaagattatctatggatggttctccaactaggattgcgtatgggacacaagggagctctggttactctttgagattgtgtaacactggggacaactctgtctgcacaacaaaaacaagcacacgcattgttggaggaacaaactcttcttggggagagtggccctggcaggtgagcctgcaggtgaagctgacagctcagaggcacctgtgtggagggtcactcataggacaccagtgggtcctcactgctgcccactgctttgatgggcttcccctgcaggatgtttggcgcatctatagtggcattttaaatctgtcagacattacaaaagatacacctttctcacaaataaaagagattattattcaccaaaactataaagtctcagaagggaatcatgatatcgccttgataaaactccaggctcctttgaattacactgaattccaaaaaccaatatgcctaccttccaaaggtgacacaagcacaatttataccaactgttgggtaaccggatggggcttctcgaaggagaaagggagattcaggtggtcccttagtttgcaaacacaatggaatgtggcgtttggtgggcatcaccagctggggtgaaggctgtgcccgcagggagcaacctggtgtctacaccaaagtcgctgagtacatggactggattttagagaaaacacagagcagtgatggaaaagctcagatgcagtcaccagcatgagaagcagtccagagtctaggcaatttttacaacctgagttcaagtcaaattctgagcctggggggtcctcatctgcaaagcatggagagtggcatcttctttgcatcctaaggacgaaaaacacagtgcactcagagctgctgaggacaatgtctggctgaagcccgctttcagcacgccgtaaccaggggctgacaatgcgaggtcgcaactgagatctccatgactgtgtgttgtgaaataaaatggtgaaagatc

SEQ ID NO: 15082 - DNA, 645 bp, Homo sapiens
  source 1..645: mol_type = unassigned DNA
tggtgggctgtctgttggggtctatgcacaggatttctgctggagttctaaggacaaaaagttgaaactgttggcagaaacccaaagtcaatattgaagccaagcaaaatattgcctgcagtgccacattagaacagcttgaagaccgttcatttttaagtgacaagagactcacctccaagaagcaattgtgttttcagaatgattttattcaagcaagcaacttatttcatttccttgtttgctacagtttcctgtggatgtctgactcaactctatgaaaacgccttcttcagaggtggggatgtagcttccatgtacaccccaaatgcccaatactgccagatgaggtgcacattccacccaaggtgtttgctattcagttttcttccagcaagttcaatcaatgacatggagaaaaggtttggttgcttcttgaaagatagtgttacaggaaccctgccaaaagtacatcgaacaggtgcagtttctggacattccttgaagcaatgtggtcatcaaataagtgcttgccatcgagacatttataaaggagttgatatgagaggagtcaattttaatgtgtctaaggttagcagtgttgaagaatgccaaaaaaggtgcaccagtaacattcgctgccag

SEQ ID NO: 15083 - DNA, 1191 bp, Homo sapiens
  source 1..1191: mol_type = unassigned DNA
ggagtgcaggcttggaaagcaggagagctcagcctacgtctttaatcctcctgcccaccccttggattctgtctccactgggactcaagagaggaacctggggcccgctcctcccccctccaggccatgaggattctgcagttaatcctgcttgctctggcaacagggcttgtagggggagagaccaggatcatcaaggggttcgagtgcaagcctcactcccagccctggcaggcagccctgttcgagaagacgcggctactctgtggggcgacgctcatcgcccccagatggctcctgacagcagcccactgcctcaagccccgctacatagttcacctggggcagcacaacctccagaaggaggagggctgtgagcagacccggacagccactgagtccttcccccaccccggcttcaacaacagcctccccaacaaagaccaccgcaatgacatcatgctggtgaagatggcatcgccagtctccatcacctgggctgtgcgacccctcaccctctcctcacgctgtgtcactgctggcaccagctgcctcatttccggctggggcagcacgtccagcccccagttacgcctgcctcacaccttgcgatgcgccaacatcaccatcattgagcaccagaagtgtgagaacgcctaccccggcaacatcacagacaccatggtgtgtgccagcgtgcaggaagggggcaaggactcctgccagggtgactccgggggccctctggtctgtaaccagtctcttcaaggcattatctcctggggccaggatccgtgtgcgatcacccgaaagcctggtgtctacacgaaagtctgcaaatatgtggactggatccaggagacgatgaagaacaattagactggacccacccaccacagcccatcaccctccatttccacttggtgtttggttcctgttcactctgttaataagaaaccctaagccaagaccctctacgaacattctttgggcctcctggactacaggagatgctgtcacttaataatcaacctggggttcgaaatcagtgagacctggattcaaattctgccttgaaatattgtgactctgggaatgacaacacctggtttgttctctgttgtatccccagccccaaagacagctcctggccatatatcaaggtttcaataaatatttgctaaatgagtg

SEQ ID NO: 15084 - DNA, 1273 bp, Homo sapiens
  source 1..1273: mol_type = unassigned DNA
ctgccttgctccacacctggtcaggggagagaggggaggaaagccaagggaagggacctaactgaaaacaaacaagctgggagaagcaggaatctgcgctcgggttccgcagatgcagaggttgaggtggctgcgggactggaagtcatcgggcagaggtctcacagcagccaaggaacctggggcccgctcctcccccctccaggccatgaggattctgcagttaatcctgcttgctctggcaacagggcttgtagggggagagaccaggatcatcaaggggttcgagtgcaagcctcactcccagccctggcaggcagccctgttcgagaagacgcggctactctgtggggcgacgctcatcgcccccagatggctcctgacagcagcccactgcctcaagccccgctacatagttcacctggggcagcacaacctccagaaggaggagggctgtgagcagacccggacagccactgagtccttcccccaccccggcttcaacaacagcctccccaacaaagaccaccgcaatgacatcatgctggtgaagatggcatcgccagtctccatcacctgggctgtgcgacccctcaccctctcctcacgctgtgtcactgctggcaccagctgcctcatttccggctggggcagcacgtccagcccccagttacgcctgcctcacaccttgcgatgcgccaacatcaccatcattgagcaccagaagtgtgagaacgcctaccccggcaacatcacagacaccatggtgtgtgccagcgtgcaggaagggggcaaggactcctgccagggtgactccgggggccctctggtctgtaaccagtctcttcaaggcattatctcctggggccaggatccgtgtgcgatcacccgaaagcctggtgtctacacgaaagtctgcaaatatgtggactggatccaggagacgatgaagaacaattagactggacccacccaccacagcccatcaccctccatttccacttggtgtttggttcctgttcactctgttaataagaaaccctaagccaagaccctctacgaacattctttgggcctcctggactacaggagatgctgtcacttaataatcaacctggggttcgaaatcagtgagacctggattcaaattctgccttgaaatattgtgactctgggaatgacaacacctggtttgttctctgttgtatccccagccccaaagacagctcctggccatatatcaaggtttcaataaatatttgctaaatgagtg

SEQ ID NO: 15085 - DNA, 1266 bp, Homo sapiens
  source 1..1266: mol_type = unassigned DNA
ggagtgcaggcttggaaagcaggagagctcagcctacgtctttaatcctcctgcccaccccttggattctgtctccactgggactcaagagaggaacctggggcccgctcctcccccctccaggccatgaggattctgcagttaatcctgcttgctctggcaacagggcttgtagggggagagaccaggatcatcaaggggttcgagtgcaagcctcactcccagccctggcaggcagccctgttcgagaagacgcggctactctgtggggcgacgctcatcgcccccagatggctcctgacagcagcccactgcctcaagccgtgggtgtcactcacctctcccacccatgtctcccccgacctttcctcctccaactactgtctctcccacctcagccgctacatagttcacctggggcagcacaacctccagaaggaggagggctgtgagcagacccggacagccactgagtccttcccccaccccggcttcaacaacagcctccccaacaaagaccaccgcaatgacatcatgctggtgaagatggcatcgccagtctccatcacctgggctgtgcgacccctcaccctctcctcacgctgtgtcactgctggcaccagctgcctcatttccggctggggcagcacgtccagcccccagttacgcctgcctcacaccttgcgatgcgccaacatcaccatcattgagcaccagaagtgtgagaacgcctaccccggcaacatcacagacaccatggtgtgtgccagcgtgcaggaagggggcaaggactcctgccagggtgactccgggggccctctggtctgtaaccagtctcttcaaggcattatctcctggggccaggatccgtgtgcgatcacccgaaagcctggtgtctacacgaaagtctgcaaatatgtggactggatccaggagacgatgaagaacaattagactggacccacccaccacagcccatcaccctccatttccacttggtgtttggttcctgttcactctgttaataagaaaccctaagccaagaccctctacgaacattctttgggcctcctggactacaggagatgctgtcacttaataatcaacctggggttcgaaatcagtgagacctggattcaaattctgccttgaaatattgtgactctgggaatgacaacacctggtttgttctctgttgtatccccagccccaaagacagctcctggccatatatcaaggtttcaataaatatttgctaaatgagtg

SEQ ID NO: 15086 - DNA, 1179 bp, Homo sapiens
  source 1..1179: mol_type = unassigned DNA
aacccagcctacctgctgtagctgccgccactgccgtctccgccgccactgggcccccagagccccagccccagagcctaggaacctggggcccgctcctcccccctccaggccatgaggattctgcagttaatcctgcttgctctggcaacagggcttgtagggggagagaccaggatcatcaaggggttcgagtgcaagcctcactcccagccctggcaggcagccctgttcgagaagacgcggctactctgtggggcgacgctcatcgcccccagatggctcctgacagcagcccactgcctcaagccccgctacatagttcacctggggcagcacaacctccagaaggaggagggctgtgagcagacccggacagccactgagtccttcccccaccccggcttcaacaacagcctccccaacaaagaccaccgcaatgacatcatgctggtgaagatggcatcgccagtctccatcacctgggctgtgcgacccctcaccctctcctcacgctgtgtcactgctggcaccagctgcctcatttccggctggggcagcacgtccagcccccagttacgcctgcctcacaccttgcgatgcgccaacatcaccatcattgagcaccagaagtgtgagaacgcctaccccggcaacatcacagacaccatggtgtgtgccagcgtgcaggaagggggcaaggactcctgccagggtgactccgggggccctctggtctgtaaccagtctcttcaaggcattatctcctggggccaggatccgtgtgcgatcacccgaaagcctggtgtctacacgaaagtctgcaaatatgtggactggatccaggagacgatgaagaacaattagactggacccacccaccacagcccatcaccctccatttccacttggtgtttggttcctgttcactctgttaataagaaaccctaagccaagaccctctacgaacattctttgggcctcctggactacaggagatgctgtcacttaataatcaacctggggttcgaaatcagtgagacctggattcaaattctgccttgaaatattgtgactctgggaatgacaacacctggtttgttctctgttgtatccccagccccaaagacagctcctggccatatatcaaggtttcaataaatatttgctaaatgagtg

SEQ ID NO: 15087 - DNA, 1347 bp, Homo sapiens
  source 1..1347: mol_type = unassigned DNA
agtcatagtagtaggaagaggaagcacctaggtttgaggccagggctggctgctgtcagaacctaggccctcccctgccttgctccacacctggtcaggggagagaggggaggaaagccaagggaagggacctaactgaaaacaaacaagctgggagaagcaggaatctgcgctcgggttccgcagatgcagaggttgaggtggctgcgggactggaagtcatcgggcagaggtctcacagcagccaaggaacctggggcccgctcctcccccctccaggccatgaggattctgcagttaatcctgcttgctctggcaacagggcttgtagggggagagaccaggatcatcaaggggttcgagtgcaagcctcactcccagccctggcaggcagccctgttcgagaagacgcggctactctgtggggcgacgctcatcgcccccagatggctcctgacagcagcccactgcctcaagccccgctacatagttcacctggggcagcacaacctccagaaggaggagggctgtgagcagacccggacagccactgagtccttcccccaccccggcttcaacaacagcctccccaacaaagaccaccgcaatgacatcatgctggtgaagatggcatcgccagtctccatcacctgggctgtgcgacccctcaccctctcctcacgctgtgtcactgctggcaccagctgcctcatttccggctggggcagcacgtccagcccccagttacgcctgcctcacaccttgcgatgcgccaacatcaccatcattgagcaccagaagtgtgagaacgcctaccccggcaacatcacagacaccatggtgtgtgccagcgtgcaggaagggggcaaggactcctgccagggtgactccgggggccctctggtctgtaaccagtctcttcaaggcattatctcctggggccaggatccgtgtgcgatcacccgaaagcctggtgtctacacgaaagtctgcaaatatgtggactggatccaggagacgatgaagaacaattagactggacccacccaccacagcccatcaccctccatttccacttggtgtttggttcctgttcactctgttaataagaaaccctaagccaagaccctctacgaacattctttgggcctcctggactacaggagatgctgtcacttaataatcaacctggggttcgaaatcagtgagacctggattcaaattctgccttgaaatattgtgactctgggaatgacaacacctggtttgttctctgttgtatccccagccccaaagacagctcctggccatatatcaaggtttcaataaatatttgctaaatgagtg

SEQ ID NO: 15088 - DNA, 882 bp, Homo sapiens
  source 1..882: mol_type = unassigned DNA
gcaggtaggtggacggagagatagcagcgacgaggacaggccaaacagtgacagccacgtagaggatctggcagacaaagagacaaggtgagaaggagactttggaagtgacccaccatggggctcagcatctttttgctcctgtgtgttcttgggctcagccaggcagccacaccgaagattttcaatggcactgagtgtgggcgtaactcacagccgtggcaggtggggctgtttgagggcaccagcctgcgctgcgggggtgtccttattgaccacaggtgggtcctcacagcggctcactgcagcggcagcaggtactgggtgcgcctgggggaacacagcctcagccagctcgactggaccgagcagatccggcacagcggcttctctgtgacccatcccggctacctgggagcctcgacgagccacgagcacgacctccggctgctgcggctgcgcctgcccgtccgcgtaaccagcagcgttcaacccctgcccctgcccaatgactgtgcaaccgctggcaccgagtgccacgtctcaggctggggcatcaccaaccacccacggaacccattcccggatctgctccagtgcctcaacctctccatcgtctcccatgccacctgccatggtgtgtatcccgggagaatcacgagcaacatggtgtgtgcaggcggcgtcccggggcaggatgcctgccagggtgattctgggggccccctggtgtgtgggggagtccttcaaggtctggtgtcctgggggtctgtggggccctgtggacaagatggcatccctggagtctacacctatatttgcaactccactcttgttggcctgggaacttcttggaactttaactcctgccagcccttctaa

SEQ ID NO: 15089 - DNA, 1170 bp, Homo sapiens
  source 1..1170: mol_type = unassigned DNA
gggcttgcagaggagagagggagtggggctgggtcttcccaccctgggtcctttcctccttccccactccgtttagctgtaaagctcaattaagtgtgattagctgagaagagtttctgcagaattagagcacgccccacccctgtcttcgtggtccccttcccttaacccggaaactggatgggccaggacaaagagagttaagagctttgtcagtggtctgtctggagcgacagatggaaggaaagggaccggttgagcaacatgacaggtggctgaggagccaggtgcagagtggtagagttggctggcggagtggccagcacatgagaagacaggcaggtaggtggacggagagatagcagcgacgaggacaggccaaacagtgacagccacgtagaggatctggcagacaaagagacaagactttggaagtgacccaccatggggctcagcatctttttgctcctgtgtgttcttggtgagttctcccggagcagggagagggcaggactgcgactggatcccttcacccccatgaggaggccccaccaccctccccatctcagctctggcccccagcctggtggtgaggaggagaggggctttctctgtgcctccatttacctgcagctctcaggggctcagccaggcagccacaccgaagattttcaatggcactgagtgtgggcgtaactcacagccgtggcaggtggggctgtttgagggcaccagcctgcgctgcgggggtgtccttattgaccacaggtgggtcctcacagcggctcactgcagcggcagacccattcccggatctgctccagtgcctcaacctctccatcgtctcccatgccacctgccatggtgtgtatcccgggagaatcacgagcaacatggtgtgtgcaggcggcgtcccggggcaggatgcctgccagggtgattctgggggccccctggtgtgtgggggagtccttcaaggtctggtgtcctgggggtctgtggggccctgtggacaagatggcatccctggagtctacacctatatttgcaactccactcttgttggcctgggaacttcttggaactttaactcctgccagcccttctaagacccacgagcggggtgagagaagtgtgcaatagtctggaataaatataaatgaaggaggg

SEQ ID NO: 15090 - DNA, 1074 bp, Homo sapiens
  source 1..1074: mol_type = unassigned DNA
gcaggtaggtggacggagagatagcagcgacgaggacaggccaaacagtgacagccacgtagaggatctggcagacaaagagacaaggtgagaaggagactttggaagtgacccaccatggggctcagcatctttttgctcctgtgtgttcttgggctcagccaggcagccacaccgaagattttcaatggcactgagtgtgggcgtaactcacagccgtggcaggtggggctgtttgagggcaccagcctgcgctgcgggggtgtccttattgaccacaggtgggtcctcacagcggctcactgcagcggcagcaggtactgggtgcgcctgggggaacacagcctcagccagctcgactggaccgagcagatccggcacagcggcttctctgtgacccatcccggctacctgggagcctcgacgagccacgagcacgacctccggctgctgcggctgcgcctgcccgtccgcgtaaccagcagcgttcaacccctgcccctgcccaatgactgtgcaaccgctggcaccgagtgccacgtctcaggctggggcatcaccaaccacccacggaacccattcccggatctgctccagtgcctcaacctctccatcgtctcccatgccacctgccatggtgtgtatcccgggagaatcacgagcaacatggtgtgtgcaggcggcgtcccggggcaggatgcctgccagggtgattctgggggccccctggtgtgtgggggagtccttcaaggtctggtgtcctgggggtctgtggggccctgtggacaagatggcatccctggagtctacacctatatttgcaagtatgtggactggatccggatgatcatgaggaacaactgacctgtttcctccacctccacccccaccccttaacttgggtacccctctggccctcagagcaccaatatctcctccatcacttcccctagctccactcttgttggcctgggaacttcttggaactttaactcctgccagcccttctaagacccacgagcggggtgagagaagtgtgcaatagtctggaataaatataaatgaaggaggggc

SEQ ID NO: 15091 - DNA, 1077 bp, Homo sapiens
  source 1..1077: mol_type = unassigned DNA
caagcaggtcatccccttggtgaccttcaaagagaagcagagagggcagaggtggggggcacagggaaagggtgacctctgagattccccttttcccccagactttggaagtgacccaccatggggctcagcatctttttgctcctgtgtgttcttgggctcagccaggcagccacaccgaagattttcaatggcactgagtgtgggcgtaactcacagccgtggcaggtggggctgtttgagggcaccagcctgcgctgcgggggtgtccttattgaccacaggtgggtcctcacagcggctcactgcagcggcagcaggtactgggtgcgcctgggggaacacagcctcagccagctcgactggaccgagcagatccggcacagcggcttctctgtgacccatcccggctacctgggagcctcgacgagccacgagcacgacctccggctgctgcggctgcgcctgcccgtccgcgtaaccagcagcgttcaacccctgcccctgcccaatgactgtgcaaccgctggcaccgagtgccacgtctcaggctggggcatcaccaaccacccacggaacccattcccggatctgctccagtgcctcaacctctccatcgtctcccatgccacctgccatggtgtgtatcccgggagaatcacgagcaacatggtgtgtgcaggcggcgtcccggggcaggatgcctgccagggtgattctgggggccccctggtgtgtgggggagtccttcaaggtctggtgtcctgggggtctgtggggccctgtggacaagatggcatccctggagtctacacctatatttgcaagtatgtggactggatccggatgatcatgaggaacaactgacctgtttcctccacctccacccccaccccttaacttgggtacccctctggccctcagagcaccaatatctcctccatcacttcccctagctccactcttgttggcctgggaacttcttggaactttaactcctgccagcccttctaagacccacgagcggggtgagagaagtgtgcaatagtctggaataaatataaatgaaggaggggc

SEQ ID NO: 15092 - DNA, 735 bp, Homo sapiens
  source 1..735: mol_type = unassigned DNA
cgaggacaggccaaacagtgacagccacgtagaggatctggcagacaaagagacaagactttggaagtgacccaccatggggctcagcatctttttgctcctgtgtgttcttgggctcagccaggcagccacaccgaagattttcaatggcactgagtgtgggcgtaactcacagccgtggcaggtggggctgtttgagggcaccagcctgcgctgcgggggtgtccttattgaccacaggtgggtcctcacagcggctcactgcagcggcagacccattcccggatctgctccagtgcctcaacctctccatcgtctcccatgccacctgccatggtgtgtatcccgggagaatcacgagcaacatggtgtgtgcaggcggcgtcccggggcaggatgcctgccagggtgattctgggggccccctggtgtgtgggggagtccttcaaggtctggtgtcctgggggtctgtggggccctgtggacaagatggcatccctggagtctacacctatatttgcaagtatgtggactggatccggatgatcatgaggaacaactgacctgtttcctccacctccacccccaccccttaacttgggtacccctctggccctcagagcaccaatatctcctccatcacttcccctagctccactcttgttggcctgggaacttcttggaactttaactcctgccagcccttctaagacccacgagcggggtgagagaagt

SEQ ID NO: 15093 - DNA, 1258 bp, Homo sapiens
  source 1..1258: mol_type = unassigned DNA
tcaggccccgcccgccctgccctcccctcccgatcccggagccatgtggcccctggccctagtgatcgcctccctgaccttggccttgtcaggaggtgtctcccaggagtcttccaaggttctcaacaccaatgggaccagtgggtttctcccaggtggctacacctgcttcccccactctcagccctggcaggctgccctactagtgcaagggcggctactctgtgggggagtcctggtccaccccaaatgggtcctcactgccgcacactgtctaaaggaggggctcaaagtttacctaggcaagcacgccctagggcgtgtggaagctggtgagcaggtgagggaagttgtccactctatcccccaccctgaataccggagaagccccacccacctgaaccacgaccatgacatcatgcttctggagctgcagtccccggtccagctcacaggctacatccaaaccctgcccctttcccacaacaaccgcctaacccctggcaccacctgtcgggtgtctggctggggcaccaccaccagcccccaggtgaattaccccaaaactctacaatgtgccaacatccaacttcgctcagatgaggagtgtcgtcaagtctacccaggaaagatcactgacaacatgttgtgtgccggcacaaaagagggtggcaaagactcctgtgagggtgactctgggggccccctggtctgtaacagaacactgtatggcatcgtctcctggggagacttcccatgtgggcaacctgaccggcctggtgtctacacccgtgtctcaagatacgtcctgtggatccgtgaaacaatccgaaaatatgaaacccagcagcaaaaatggttgaagggcccacaataaaagttgagaaatgtaccggcttccatcctgtcaccatgacttcctcacatggtctgcttagcccttctctgctccttattcccagtgttccatttgaaccagtgatccatgtcctgaaaaatgctcaatctcagctaacattccatgtttcagaagcattcaggcactgccaggcttgcagtctcccagatgttgcatccctgaaacatctcaacaacctgaatgtcccaacccagacaatggcccaggtctctcaacttcatcagtgtggcttctatgagcccagatcaccacctgaacgttctgtctgtggcacattcttaaatatttccatcagcccatctcaacaatatatgtcctataaatggaccatccttgaca

SEQ ID NO: 15094 - DNA, 378 bp, Homo sapiens
  source 1..378: mol_type = unassigned DNA
atgtggcccctggccctagtgatcgcctccctgaccttggccttgtcaggagtgaattaccccaaaactctacaatgtgccaacatccaacttcgctcagatgaggagtgtcgtcaagtctacccaggaaagatcactgacaacatgttgtgtgccggcacaaaagagggtggcaaagactcctgtgagggtgactctgggggccccctggtctgtaacagaacactgtatggcatcgtctcctggggagacttcccatgtgggcaacctgaccggcctggtgtctacacccgtgtctcaagatacgtcctgtggatccgtgaaacaatccgaaaatatgaaacccagcagcaaaaatggttgaagggcccacaataa

SEQ ID NO: 15095 - DNA, 1239 bp, Homo sapiens
  source 1..1239: mol_type = unassigned DNA
cagctcagagctcttcctgcttgtccctgggtgacctggtttcccggctgaggttggccctccgaccccagacccttcacctcccaaaataccctcgcagcagcccctcccgcgttcaaggcttcctgtcctctctggaaagctgaaagacatgggttcgcgtcctgacgctgccgctttgagccagtagcctagcagctgctttgtgcctaaattgttttcatctggaaaatgggcttaatctataagtgcttaccagagaaggtcactgtgaatattgaaacgaggtgtctcccaggagtcttccaaggttctcaacaccaatgggaccagtgggtttctcccaggtggctacacctgcttcccccactctcagccctggcaggctgccctactagtgcaagggcggctactctgtgggggagtcctggtccaccccaaatgggtcctcactgccgcacactgtctaaaggaggggctcaaagtttacctaggcaagcacgccctagggcgtgtggaagctggtgagcagtgaattaccccaaaactctacaatgtgccaacatccaacttcgctcagatgaggagtgtcgtcaagtctacccaggaaagatcactgacaacatgttgtgtgccggcacaaaagagggtggcaaagactcctgtgagggtgactctgggggccccctggtctgtaacagaacactgtatggcatcgtctcctggggagacttcccatgtgggcaacctgaccggcctggtgtctacacccgtgtctcaagatacgtcctgtggatccgtgaaacaatccgaaaatatgaaacccagcagcaaaaatggttgaagggcccacaataaaagttgagaaatgtaccggcttccatcctgtcaccatgacttcctcacatggtctgcttagcccttctctgctccttattcccagtgttccatttgaaccagtgatccatgtcctgaaaaatgctcaatctcagctaacattccatgtttcagaagcattcaggcactgccaggcttgcagtctcccagatgttgcatccctgaaacatctcaacaacctgaatgtcccaacccagacaatggcccaggtctctcaacttcatcagtgtggcttctatgagcccagatcaccacctgaacgttctgtctgtggcacattcttaaatatttccatcagcccatctcaacaatatatgtcctataaatggaccatccttgaca

SEQ ID NO: 15096 - DNA, 1614 bp, Homo sapiens
  source 1..1614: mol_type = unassigned DNA
tcaggccccgcccgccctgccctcccctcccgatcccggagccatgtggcccctggccctagtgatcgcctccctgaccttggccttgtcaggaggtgaagacttcaaggagccaagccaggggcctagagatgtaatggcggcttcccgaccagaggccttcccaaagggcttgacccttgagccaagacctgaaaaaggagggatctgtgggtgcctggcacctggcaccatccttggcctgaaggtggggtggcttttctcctctggcgacactccctggattcatgcccgtgccactcctgagtgccacaccctaggctaggagacccacacgctacgccttgtggagtcctcaacaacctggcgaggtgtctcccaggagtcttccaaggttctcaacaccaatgggaccagtgggtttctcccaggtggctacacctgcttcccccactctcagccctggcaggctgccctactagtgcaagggcggctactctgtgggggagtcctggtccaccccaaatgggtcctcactgccgcacactgtctaaaggaggggctcaaagtttacctaggcaagcacgccctagggcgtgtggaagctggtgagcaggtgagggaagttgtccactctatcccccaccctgaataccggagaagccccacccacctgaaccacgaccatgacatcatgcttctggagctgcagtccccggtccagctcacaggctacatccaaaccctgcccctttcccacaacaaccgcctaacccctggcaccacctgtcgggtgtctggctggggcaccaccaccagcccccagggtatgcacccacacaggtggcctgaggccccataggagtggctggggaaacaggggcagagatgggagggaaggtctgagtgaattaccccaaaactctacaatgtgccaacatccaacttcgctcagatgaggagtgtcgtcaagtctacccaggaaagatcactgacaacatgttgtgtgccggcacaaaagagggtggcaaagactcctgtgagggtgactctgggggccccctggtctgtaacagaacactgtatggcatcgtctcctggggagacttcccatgtgggcaacctgaccggcctggtgtctacacccgtgtctcaagatacgtcctgtggatccgtgaaacaatccgaaaatatgaaacccagcagcaaaaatggttgaagggcccacaataaaagttgagaaatgtaccggcttccatcctgtcaccatgacttcctcacatggtctgcttagcccttctctgctccttattcccagtgttccatttgaaccagtgatccatgtcctgaaaaatgctcaatctcagctaacattccatgtttcagaagcattcaggcactgccaggcttgcagtctcccagatgttgcatccctgaaacatctcaacaacctgaatgtcccaacccagacaatggcccaggtctctcaacttcatcagtgtggcttctatgagcccagatcaccacctgaacgttctgtctgtggcacattcttaaatatttccatcagcccatctcaacaatatatgtcctataaatggaccatccttgaca

SEQ ID NO: 15097 - DNA, 927 bp, Homo sapiens
  source 1..927: mol_type = unassigned DNA
tcaggccccgcccgccctgccctcccctcccgatcccggagccatgtggcccctggccctagtgatcgcctccctgaccttggccttgtcaggaggtgtctcccaggagtcttccaaggttctcaacaccaatgggaccagtgggtttctcccaggtggctacacctgcttcccccactctcagccctggcaggctgccctactagtgcaagggcggctactctgtgggggagtcctggtccaccccaaatgggtcctcactgccgcacactgtctaaaggaggggctcaaagtttacctaggcaagcacgccctagggcgtgtggaagctggtgagcaggtgagggaagttgtccactctatcccccaccctgaataccggagaagccccacccacctgaaccacgaccatgacatcatgcttctggagctgcagtccccggtccagctcacaggctacatccaaaccctgcccctttcccacaacaaccgcctaacccctggcaccacctgtcgggtgtctggctggggcaccaccaccagcccccaggtgaattaccccaaaactctacaatgtgccaacatccaacttcgctcagatgaggagtgtcgtcaagtctacccaggaaagatcactgacaacatgttgtgtgccggcacaaaagagggtggcaaagactcctgtgagggtgactctgggggccccctggtctgtaacagaacactgtatggcatcgtctcctggggagacttcccatgtgggcaacctgaccggcctggtgtctacacccgtgtctcaagatacgtcctgtggatccgtgaaacaatccgaaaatatgaaacccagcagcaaaaatggttgaagggcccacaataaaagttgagaaatgtaccggcttccatcctgtcaccatgacttcctcacat

SEQ ID NO: 15098 - DNA, 1060 bp, Homo sapiens
  source 1..1060: mol_type = unassigned DNA
gcacctagcagatcccaagctggggaatgccagttctggcaccaaccttcctgctccctgctggggcctctgctcccccatctctcaggagtcgaaagtgagaaagcaagacatcaaggagggacctgtgccctgctccacatcctcccacctgccgcccgcagagcctgcaggccccgcccccctcgtctctggtccctacctctctgctgtgtcttcatgtccctgagggtcttgggctctgggacctggccctcagcccctaaaatgttcctcctgctgacagcacttcaagtcctggctatagccatgacacagagccaagaggatgagaacaagataattggtggccatacgtgcacccggagctcccagccgtggcaggcggccctgctggcgggtcccaggcgccgcttcctctgcggaggcgccctgctttcaggccagtgggtcatcactgctgctcactgcggccgcccgatccttcaggttgccctgggcaagcacaacctgaggaggtgggaggccacccagcaggtgctgcgcgtggttcgtcaggtgacgcaccccaactacaactcccggacccacgacaacgacctcatgctgctgcagctacagcagcccgcacggatcgggagggcagtcaggcccattgaggtcacccaggcctgtgccagccccgggacctcctgccgagtgtcaggctggggaactatatccagccccatcgccaggtaccccgcctctctgcaatgcgtgaacatcaacatctccccggatgaggtgtgccagaaggcctatcctagaaccatcacgcctggcatggtctgtgcaggagttccccagggcgggaaggactcttgtcagggtgactctgggggacccctggtgtgcagaggacagctccagggcctcgtgtcttggggaatggagcgctgcgccctgcctggctaccccggtgtctacaccaacctgtgcaagtacagaagctggattgaggaaacgatgcgggacaaatgatggtcttcacgagcagttgcttcaggcgttttctccc

SEQ ID NO: 15099 - DNA, 1133 bp, Homo sapiens
  source 1..1133: mol_type = unassigned DNA
gcacctagcagatcccaagctggggaatgccagttctggcaccaaccttcctgctccctgctggggcctctgctcccccatctctcaggagtcgaaagtgagaaagcaagacatcaaggagggacctgtgccctgctccacatcctcccacctgccgcccgcagagcctgcaggccccgcccccctcgtctctggtccctacctctctgctgtgtcttcatgtccctgagggtcttgggctctgggacctggccctcagcccctaaaatgttcctcctgctgacagcacttcaagtcctggctatagccatgacacagagccaagaggatgagaacaagataattggtggccatacgtgcacccggagctcccagccgtggcaggcggccctgctggcgggtcccaggcgccgcttcctctgcggaggcgccctgctttcaggccagtgggtcatcactgctgctcactgcggccgcccgatccttcaggttgccctgggcaagcacaacctgaggaggtgggaggccacccagcaggtgctgcgcgtggttcgtcaggtgacgcaccccaactacaactcccggacccacgacaacgacctcatgctgctgcagctacagcagcccgcacggatcgggagggcagtcaggcccattgaggtcacccaggcctgtgccagccccgggacctcctgccgagtgtcaggctggggaactatatccagccccatcgccaggtaccccgcctctctgcaatgcgtgaacatcaacatctccccggatgaggtgtgccagaaggcctatcctagaaccatcacgcctggcatggtctgtgcaggagttccccagggcgggaaggactcttgtcagggtgactctgggggacccctggtgtgcagaggacagctccagggcctcgtgtcttggggaatggagcgctgcgccctgcctggctaccccggtgtctacaccaacctgtgcaagtacagaagctggattgaggaaacgatgcgggacaaatgatggtcttcacggtgggatggacctcgtcagctgcccaggccctcctctctctactcaggacccaggagtccaggccccagcccctcctccctcagacccaggagtccagg

SEQ ID NO: 15100 - DNA, 1282 bp, Homo sapiens
  source 1..1282: mol_type = unassigned DNA
ccgcccccctcgtctctggtccctacctctctgctgtgtcttcatgtccctgagggtcttgggctctgggacctggccctcagcccctaaaatgttcctcctgctgacagcacttcaagtcctggctatagccatgacacagagccaagaggatgagaacaagataattggtggccatacgtgcacccggagctcccagccgtggcaggcggccctgctggcgggtcccaggcgccgcttcctctgcggaggcgccctgctttcaggccagtgggtcatcactgctgctcactgcggccgcccgatccttcaggttgccctgggcaagcacaacctgaggaggtgggaggccacccagcaggtgctgcgcgtggttcgtcaggtgacgcaccccaactacaactcccggacccacgacaacgacctcatgctgctgcagctacagcagcccgcacggatcgggagggcagtcaggcccattgaggtcacccaggcctgtgccagccccgggacctcctgccgagtgtcaggctggggaactatatccagccccatcgccaggtaccccgcctctctgcaatgcgtgaacatcaacatctccccggatgaggtgtgccagaaggcctatcctagaaccatcacgcctggcatggtctgtgcaggagttccccagggcgggaaggactcttgtcagggtgactctgggggacccctggtgtgcagaggacagctccagggcctcgtgtcttggggaatggagcgctgcgccctgcctggctaccccggtgtctacaccaacctgtgcaagtacagaagctggattgaggaaacgatgcgggacaaatgatggtcttcacggtgggatggacctcgtcagctgcccaggccctcctctctctactcaggacccaggagtccaggccccagcccctcctccctcagacccaggagtccaggcccccagcccctcctccctcagacccgggagtccaggcccccagcccctcctccctcagacccaggaccccagtccccagcatcctgatctttactccggctctgatctctcctttcccagagcagttgcttcaggcgttttctccccaccaagcccccacccttgctgtgtcaccatcactactcaagaccggaggcacagagggcaggagcacagaccccttaaaccggcattgtattccaaagacgacaatttttaacacgcttagtgtctctaaaaaccgaataaataatgacaataaaaatggaatcatcctaaattgta

SEQ ID NO: 15101 - DNA, 1172 bp, Homo sapiens
  source 1..1172: mol_type = unassigned DNA
actgcagccgaaccctggtccctcctccacaatgtggcttctcctcactctctccttcctgctggcatccacagcagcccaggatggtgacaagttgctggaaggtgacgagtgtgcaccccactcccagccatggcaagtggctctctacgagcgtggacgctttaactgtggcgcttccctcatctccccacactgggtgctgtctgcggcccactgccaaagccgcttcatgagagtgcgcctgggagagcacaacctgcgcaagcgcgatggcccagagcaactacggaccacgtctcgggtcattccacacccgcgctacgaagcgcgcagccaccgcaacgacatcatgttgctgcgcctagtccagcccgcacgcctgaacccccaggtgcgccccgcggtgctacccacgcgttgcccccacccgggggaggcctgtgtggtgtctggctggggcctggtgtcccacaacgagcctgggaccgctgggagcccccggtcacaagggtgactctgggggacccctggtctgtgggggcatcctgcagggcattgtgtcctggggtgacgtcccttgtgacaacaccaccaagcctggtgtctataccaaagtctgccactacttggagtggatcagggaaaccatgaagaggaactgactattctagcctatctcctgtgcccctgactgagcagaagcccccacagctggccagcagccccgcctgacatggaacagaacggagccatcccccaagaccctgtccaaggcccagatgttagccaaggacttgtcccacctgaggacaaagctggcgctcaaggtcacctgtttaatgccaagataacaaagcgctgatccaagttgctctgtaggaatttctgtgacttttttctggggtcaaagagaaaccccgagacactgtacactgttccttttcacccaccaccccgatccctaggtgaggagaagcggcttgaagcagggctccattcattcaacacacatgaccacccgtgtgatcttgaacaagaggcccaatctcacttcgccttggtttccttatctgtaaaatgagaccatcttattgctgacttcaaagggctgttgtgaggattaaatgagatgattcgtctgaactgattaaaatcgtgtctggcactga

SEQ ID NO: 15102 - DNA, 1309 bp, Homo sapiens
  source 1..1309: mol_type = unassigned DNA
actgcagccgaaccctggtccctcctccacaatgtggcttctcctcactctctccttcctgctggcatccacagcagcccaggatggtgacaagttgctggaaggtgacgagtgtgcaccccactcccagccatggcaagtggctctctacgagcgtggacgctttaactgtggcgcttccctcatctccccacactgggtgctgtctgcggcccactgccaaagccgcttcatgagagtgcgcctgggagagcacaacctgcgcaagcgcgatggcccagagcaactacggaccacgtctcgggtcattccacacccgcgctacgaagcgcgcagccaccgcaacgacatcatgttgctgcgcctagtccagcccgcacgcctgaacccccaggtgcgccccgcggtgctacccacgcgttgcccccacccgggggaggcctgtgtggtgtctggctggggcctggtgtcccacaacgagcctgggaccgctgggagcccccggtcacaagtgagtctcccagatacgttgcattgtgccaacatcagcattatctcggacacatcttgtgacaagagctacccagggcgcctgacaaacaccatggtgtgtgcaggcgcggagggcagaggcgcagaatcctgtgagggtgactctgggggacccctggtctgtgggggcatcctgcagggcattgtgtcctggggtgacgtcccttgtgacaacaccaccaagcctggtgtctataccaaagtctgccactacttggagtggatcagggaaaccatgaagaggaactgactattctagcctatctcctgtgcccctgactgagcagaagcccccacagctggccagcagccccgcctgacatggaacagaacggagccatcccccaagaccctgtccaaggcccagatgttagccaaggacttgtcccacctgaggacaaagctggcgctcaaggtcacctgtttaatgccaagataacaaagcgctgatccaagttgctctgtaggaatttctgtgacttttttctggggtcaaagagaaaccccgagacactgtacactgttccttttcacccaccaccccgatccctaggtgaggagaagcggcttgaagcagggctccattcattcaacacacatgaccacccgtgtgatcttgaacaagaggcccaatctcacttcgccttggtttccttatctgtaaaatgagaccatcttattgctgacttcaaagggctgttgtgaggattaaatgagatgattcgtctgaactgattaaaatcgtgtctggcactga

SEQ ID NO: 15103 - DNA, 1054 bp, Homo sapiens
  source 1..1054: mol_type = unassigned DNA
actgcagccgaaccctggtccctcctccacaatgtggcttctcctcactctctccttcctgctggcatccacagcagcccaggatggtgacaagttgctggaaggtgacgagtgtgcaccccactcccagccatggcaagtggctctctacgagcgtggacgctttaactgtggcgcttccctcatctccccacactgggtgctgtctgcggcccactgccaaagccgcttcatgagagtgcgcctgggagagcacaacctgcgcaagcgcgatggcccagagcaactacggaccacgtctcgggtcattccacacccgcgctacgaagcgcgcagccaccgcaacgacatcatgttgctgcgcctagtccagcccgcacgcctgaacccccagggtgactctgggggacccctggtctgtgggggcatcctgcagggcattgtgtcctggggtgacgtcccttgtgacaacaccaccaagcctggtgtctataccaaagtctgccactacttggagtggatcagggaaaccatgaagaggaactgactattctagcctatctcctgtgcccctgactgagcagaagcccccacagctggccagcagccccgcctgacatggaacagaacggagccatcccccaagaccctgtccaaggcccagatgttagccaaggacttgtcccacctgaggacaaagctggcgctcaaggtcacctgtttaatgccaagataacaaagcgctgatccaagttgctctgtaggaatttctgtgacttttttctggggtcaaagagaaaccccgagacactgtacactgttccttttcacccaccaccccgatccctaggtgaggagaagcggcttgaagcagggctccattcattcaacacacatgaccacccgtgtgatcttgaacaagaggcccaatctcacttcgccttggtttccttatctgtaaaatgagaccatcttattgctgacttcaaagggctgttgtgaggattaaatgagatgattcgtctgaactgattaaaatcgtgtctggcactga

SEQ ID NO: 15104 - DNA, 1261 bp, Homo sapiens
  source 1..1261: mol_type = unassigned DNA
atgtggcttctcctcactctctccttcctgctggcatccacagcagcccaggatggtgacaagttgctggaaggtgacgagtgtgcaccccactcccagccatggcaagtggctctctacgagcgtggacgctttaactgtggcgcttccctcatctccccacactgggtgctgtctgcggcccactgccaaagccgcttcatgagagtgcgcctgggagagcacaacctgcgcaagcgcgatggcccagagcaactacggaccacgtctcgggtcattccacacccgcgctacgaagcgcgcagccaccgcaacgacatcatgttgctgcgcctagtccagcccgcacgcctgaacccccaggtgcgccccgcggtgctacccacgcgttgcccccacccgggggaggcctgtgtggtgtctggctggggcctggtgtcccacaacgagcctgggaccgctgggagcccccggtcacaaggtgcgtgaaaggatggagctggatgcgaggcctcaaggaatcctatgctccagggctcttgggcggaggggacaagggccggaatttatggatctgctccaagtccactgtcttccccagggtgactctgggggacccctggtctgtgggggcatcctgcagggcattgtgtcctggggtgacgtcccttgtgacaacaccaccaagcctggtgtctataccaaagtctgccactacttggagtggatcagggaaaccatgaagaggaactgactattctagcctatctcctgtgcccctgactgagcagaagcccccacagctggccagcagccccgcctgacatggaacagaacggagccatcccccaagaccctgtccaaggcccagatgttagccaaggacttgtcccacctgaggacaaagctggcgctcaaggtcacctgtttaatgccaagataacaaagcgctgatccaagttgctctgtaggaatttctgtgacttttttctggggtcaaagagaaaccccgagacactgtacactgttccttttcacccaccaccccgatccctaggtgaggagaagcggcttgaagcagggctccattcattcaacacacatgaccacccgtgtgatcttgaacaagaggcccaatctcacttcgccttggtttccttatctgtaaaatgagaccatcttattgctgacttcaaagggctgttgtgaggattaaatgagatgattcgtctgaactgattaaaatcgtgtctggcactga

SEQ ID NO: 15105 - DNA, 855 bp, Homo sapiens
  source 1..855: mol_type = unassigned DNA
actgcagccgaaccctggtccctcctccacaatgtggcttctcctcactctctccttcctgctggcatccacagcagcccaggatggtgacaagttgctggaaggtgacgagtgtgcaccccactcccagccatggcaagtggctctctacgagcgtggacgctttaactgtggcgcttccctcatctccccacactgggtgctgtctgcggcccactgccaaagccgcttcatgagagtgcgcctgggagagcacaacctgcgcaagcgcgatggcccagagcaactacggaccacgtctcgggtcattccacacccgcgctacgaagcgcgcagccaccgcaacgacatcatgttgctgcgcctagtccagcccgcacgcctgaacccccaggtgcgccccgcggtgctacccacgcgttgcccccacccgggggaggcctgtgtggtgtctggctggggcctggtgtcccacaacgagcctgggaccgctgggagcccccggtcacaagtgagtctcccagatacgttgcattgtgccaacatcagcattatctcggacacatcttgtgacaagagctacccagggcgcctgacaaacaccatggtgtgtgcaggcgcggagggcagaggcgcagaatcctgtgagggtgactctgggggacccctggtctgtgggggcatcctgcagggcattgtgtcctggggtgacgtcccttgtgacaacaccaccaagcctggtgtctataccaaagtctgccactacttggagtggatcagggaaaccatgaagaggaactgactattctagcctatctcctgtgcccctgactgagcagaagcccccacagctgg

SEQ ID NO: 15106 - DNA, 2834 bp, Homo sapiens
  source 1..2834: mol_type = unassigned DNA
agccccaaactcaccacctggccgtggacacctgtgtcagcatgtgggacctggttctctccatcgccttgtctgtggggtgcactggtgccgtgcccctcatccagtctcggattgtgggaggctgggagtgtgagaagcattcccaaccctggcaggtggctgtgtacagtcatggatgggcacactgtgggggtgtcctggtgcacccccagtgggtgctcacagctgcccattgcctaaagaagaatagccaggtctggctgggtcggcacaacctgtttgagcctgaagacacaggccagagggtccctgtcagccacagcttcccacacccgctctacaatatgagccttctgaagcatcaaagccttagaccagatgaagactccagccatgacctcatgctgctccgcctgtcagagcctgccaagatcacagatgttgtgaaggtcctgggcctgcccacccaggagccagcactggggaccacctgctacgcctcaggctggggcagcatcgaaccagaggagttcttgcgccccaggagtcttcagtgtgtgagcctccatctcctgtccaatgacatgtgtgctagagcttactctgagaaggtgacagagttcatgttgtgtgctgggctctggacaggtggtaaagacacttgtgggggtgattctgggggtccacttgtctgtaatggtgtgcttcaaggtatcacatcatggggccctgagccatgtgccctgcctgaaaagcctgctgtgtacaccaaggtggtgcattaccggaagtggatcaaggacaccatcgcagccaacccctgagtgcccctgtcccacccctacctctagtaaatttaagtccacctcacgttctggcatcacttggcctttctggatgctggacacctgaagcttggaactcacctggccgaagctcgagcctcctgagtcctactgacctgtgctttctggtgtggagtccagggctgctaggaaaaggaatgggcagacacaggtgtatgccaatgtttctgaaatgggtataatttcgtcctctccttcggaacactggctgtctctgaagacttctcgctcagtttcagtgaggacacacacaaagacgtgggtgaccatgttgtttgtggggtgcagagatgggaggggtggggcccaccctggaagagtggacagtgacacaaggtggacactctctacagatcactgaggataagctggagccacaatgcatgaggcacacacacagcaaggatgacgctgtaaacatagcccacgctgtcctgggggcactgggaagcctagataaggccgtgagcagaaagaaggggaggatcctcctatgttgttgaaggagggactagggggagaaactgaaagctgattaattacaggaggtttgttcaggtcccccaaaccaccgtcagatttgatgatttcctagcaggacttacagaaataaagagctatcatgctgtggtttattatggtttgttacattgataggatacatactgaaatcagcaaacaaaacagatgtatagattagagtgtggagaaaacagaggaaaacttgcagttacgaagactggcaacttggctttactaagttttcagactggcaggaagtcaaacctattaggctgaggaccttgtggagtgtagctgatccagctgatagaggaactagccaggtgggggcctttccctttggatggggggcatatctgacagttattctctccaagtggagacttacggacagcatataattctccctgcaaggatgtatgataatatgtacaaagtaattccaactgaggaagctcacctgatccttagtgtccagggtttttactgggggtctgtaggacgagtatggagtacttgaataattgacctgaagtcctcagacctgaggttccctagagttcaaacagatacagcatggtccagagtcccagatgtacaaaaacagggattcatcacaaatcccatctttagcatgaagggtctggcatggcccaaggccccaagtatatcaaggcacttgggcagaacatgccaaggaatcaaatgtcatctcccaggagttattcaagggtgagccctttacttgggatgtacaggctttgagcagtgcagggctgctgagtcaaccttttattgtacaggggatgagggaaagggagaggatgaggaagcccccctggggatttggtttggtcttgtgatcaggtggtctatggggctatccctacaaagaagaatccagaaataggggcacattgaggaatgatactgagcccaaagagcattcaatcattgttttatttgccttcttttcacaccattggtgagggagggattaccaccctggggttatgaagatggttgaacaccccacacatagcaccggagatatgagatcaacagtttcttagccatagagattcacagcccagagcaggaggacgctgcacaccatgcaggatgacatgggggatgcgctcgggattggtgtgaagaagcaaggactgttagaggcaggctttatagtaacaagacggtggggcaaactctgatttccgtgggggaatgtcatggtcttgctttactaagttttgagactggcaggtagtgaaactcattaggctgagaaccttgtggaatgcagctgacccagctgatagaggaagtagccaggtgggagcctttcccagtgggtgtgggacatatctggcaagattttgtggcactcctggttacagatactggggcagcaaataaaactgaatcttgttttcagacctt

SEQ ID NO: 15107 - DNA, 2871 bp, Homo sapiens
  source 1..2871: mol_type = unassigned DNA
agccccaaactcaccacctggccgtggacacctgtgtcagcatgtgggacctggttctctccatcgccttgtctgtggggtgcactggtgccgtgcccctcatccagtctcggattgtgggaggctgggagtgtgagaagcattcccaaccctggcaggtggctgtgtacagtcatggatgggcacactgtgggggtgtcctggtgcacccccagtgggtgctcacagctgcccattgcctaaagaagaatagccaggtctggctgggtcggcacaacctgtttgagcctgaagacacaggccagagggtccctgtcagccacagcttcccacacccgctctacaatatgagccttctgaagcatcaaagccttagaccagatgaagactccagccatgacctcatgctgctccgcctgtcagagcctgccaagatcacagatgttgtgaaggtcctgggcctgcccacccaggagccagcactggggaccacctgctacgcctcaggctggggcagcatcgaaccagaggagttcttgcgccccaggagtcttcagtgtgtgagcctccatctcctgtccaatgacatgtgtgctagagcttactctgagaaggtgacagagttcatgttgtgtgctgggctctggacaggtggtaaagacacttgtggggtgagtcatccctactcccaacatctggaggggaaagggtgattctgggggtccacttgtctgtaatggtgtgcttcaaggtatcacatcatggggccctgagccatgtgccctgcctgaaaagcctgctgtgtacaccaaggtggtgcattaccggaagtggatcaaggacaccatcgcagccaacccctgagtgcccctgtcccacccctacctctagtaaatttaagtccacctcacgttctggcatcacttggcctttctggatgctggacacctgaagcttggaactcacctggccgaagctcgagcctcctgagtcctactgacctgtgctttctggtgtggagtccagggctgctaggaaaaggaatgggcagacacaggtgtatgccaatgtttctgaaatgggtataatttcgtcctctccttcggaacactggctgtctctgaagacttctcgctcagtttcagtgaggacacacacaaagacgtgggtgaccatgttgtttgtggggtgcagagatgggaggggtggggcccaccctggaagagtggacagtgacacaaggtggacactctctacagatcactgaggataagctggagccacaatgcatgaggcacacacacagcaaggatgacgctgtaaacatagcccacgctgtcctgggggcactgggaagcctagataaggccgtgagcagaaagaaggggaggatcctcctatgttgttgaaggagggactagggggagaaactgaaagctgattaattacaggaggtttgttcaggtcccccaaaccaccgtcagatttgatgatttcctagcaggacttacagaaataaagagctatcatgctgtggtttattatggtttgttacattgataggatacatactgaaatcagcaaacaaaacagatgtatagattagagtgtggagaaaacagaggaaaacttgcagttacgaagactggcaacttggctttactaagttttcagactggcaggaagtcaaacctattaggctgaggaccttgtggagtgtagctgatccagctgatagaggaactagccaggtgggggcctttccctttggatggggggcatatctgacagttattctctccaagtggagacttacggacagcatataattctccctgcaaggatgtatgataatatgtacaaagtaattccaactgaggaagctcacctgatccttagtgtccagggtttttactgggggtctgtaggacgagtatggagtacttgaataattgacctgaagtcctcagacctgaggttccctagagttcaaacagatacagcatggtccagagtcccagatgtacaaaaacagggattcatcacaaatcccatctttagcatgaagggtctggcatggcccaaggccccaagtatatcaaggcacttgggcagaacatgccaaggaatcaaatgtcatctcccaggagttattcaagggtgagccctttacttgggatgtacaggctttgagcagtgcagggctgctgagtcaaccttttattgtacaggggatgagggaaagggagaggatgaggaagcccccctggggatttggtttggtcttgtgatcaggtggtctatggggctatccctacaaagaagaatccagaaataggggcacattgaggaatgatactgagcccaaagagcattcaatcattgttttatttgccttcttttcacaccattggtgagggagggattaccaccctggggttatgaagatggttgaacaccccacacatagcaccggagatatgagatcaacagtttcttagccatagagattcacagcccagagcaggaggacgctgcacaccatgcaggatgacatgggggatgcgctcgggattggtgtgaagaagcaaggactgttagaggcaggctttatagtaacaagacggtggggcaaactctgatttccgtgggggaatgtcatggtcttgctttactaagttttgagactggcaggtagtgaaactcattaggctgagaaccttgtggaatgcagctgacccagctgatagaggaagtagccaggtgggagcctttcccagtgggtgtgggacatatctggcaagattttgtggcactcctggttacagatactggggcagcaaataaaactgaatcttgttttcagacctt

SEQ ID NO: 15108 - DNA, 892 bp, Homo sapiens
  source 1..892: mol_type = unassigned DNA
aaactcaccacctggccgtggacacctgtgtcagcatgtgggacctggttctctccatcgccttgtctgtggggtgcactggaatagccaggtctggctgggtcggcacaacctgtttgagcctgaagacacaggccagagggtccctgtcagccacagcttcccacacccgctctacaatatgagccttctgaagcatcaaagccttagaccagatgaagactccagccatgacctcatgctgctccgcctgtcagagcctgccaagatcacagatgttgtgaaggtcctgggcctgcccacccaggagccagcactggggaccacctgctacgcctcaggctggggcagcatcgaaccagaggagttcttgcgccccaggagtcttcagtgtgtgagcctccatctcctgtccaatgacatgtgtgctagagcttactctgagaaggtgacagagttcatgttgtgtgctgggctctggacaggtggtaaagacacttgtgggggtgattctgggggtccacttgtctgtaatggtgtgcttcaaggtatcacatcatggggccctgagccatgtgccctgcctgaaaagcctgctgtgtacaccaaggtggtgcattaccggaagtggatcaaggacaccatcgcagccaacccctgagtgcccctgtcccacccctacctctagtaaatttaagtccacctcacgttctggcatcacttggcctttctggatgctggacacctgaagcttggaactcacctggccgaagctcgagcctcctgagtcctactgacctgtgctttctggtgtggagtccagggctgctaggaaaaggaatgggcagacacaggtgtatgccaatgtttctgaaatgggtataatttcgtc

SEQ ID NO: 15109 - DNA, 1464 bp, Homo sapiens
  source 1..1464: mol_type = unassigned DNA
agccccaagcttaccacctgcacccggagagctgtgtcaccatgtgggtcccggttgtcttcctcaccctgtccgtgacgtggattggtgctgcacccctcatcctgtctcggattgtgggaggctgggagtgcgagaagcattcccaaccctggcaggtgcttgtggcctctcgtggcagggcagtctgcggcggtgttctggtgcacccccagtgggtcctcacagctgcccactgcatcaggaacaaaagcgtgatcttgctgggtcggcacagcctgtttcatcctgaagacacaggccaggtatttcaggtcagccacagcttcccacacccgctctacgatatgagcctcctgaagaatcgattcctcaggccaggtgatgactccagccacgacctcatgctgctccgcctgtcagagcctgccgagctcacggatgctgtgaaggtcatggacctgcccacccaggagccagcactggggaccacctgctacgcctcaggctggggcagcattgaaccagaggagttcttgaccccaaagaaacttcagtgtgtggacctccatgttatttccaatgacgtgtgtgcgcaagttcaccctcagaaggtgaccaagttcatgctgtgtgctggacgctggacagggggcaaaagcacctgctcgggtgattctgggggcccacttgtctgtaatggtgtgcttcaaggtatcacgtcatggggcagtgaaccatgtgccctgcccgaaaggccttccctgtacaccaaggtggtgcattaccggaagtggatcaaggacaccatcgtggccaacccctgagcacccctatcaaccccctattgtagtaaacttggaaccttggaaatgaccaggccaagactcaagcctccccagttctactgacctttgtccttaggtgtgaggtccagggttgctaggaaaagaaatcagcagacacaggtgtagaccagagtgtttcttaaatggtgtaattttgtcctctctgtgtcctggggaatactggccatgcctggagacatatcactcaatttctctgaggacacagataggatggggtgtctgtgttatttgtggggtacagagatgaaagaggggtgggatccacactgagagagtggagagtgacatgtgctggacactgtccatgaagcactgagcagaagctggaggcacaacgcaccagacactcacagcaaggatggagctgaaaacataacccactctgtcctggaggcactgggaagcctagagaaggctgtgagccaaggagggagggtcttcctttggcatgggatggggatgaagtaaggagagggactggaccccctggaagctgattcactatggggggaggtgtattgaagtcctccagacaaccctcagatttgatgatttcctagtagaactcacagaaataaagagctgttatactgtg

SEQ ID NO: 15110 - DNA, 834 bp, Homo sapiens
  source 1..834: mol_type = unassigned DNA
cacccggagagctgtgtcaccatgtgggtcccggttgtcttcctcaccctgtccgtgacgtggattggtgctgcacccctcatcctgtctcggattgtgggaggctgggagtgcgagaagcattcccaaccctggcaggtgcttgtggcctctcgtggcagggcagtctgcggcggtgttctggtgcacccccagtgggtcctcacagctgcccactgcatcaggaacaaaagcgtgatcttgctgggtcggcacagcctgtttcatcctgaagacacaggccaggtatttcaggtcagccacagcttcccacacccgctctacgatatgagcctcctgaagaatcgattcctcaggccaggtgatgactccagcattgaaccagaggagttcttgaccccaaagaaacttcagtgtgtggacctccatgttatttccaatgacgtgtgtgcgcaagttcaccctcagaaggtgaccaagttcatgctgtgtgctggacgctggacagggggcaaaagcacctgctcgggtgattctgggggcccacttgtctgtaatggtgtgcttcaaggtatcacgtcatggggcagtgaaccatgtgccctgcccgaaaggccttccctgtacaccaaggtggtgcattaccggaagtggatcaaggacaccatcgtggccaacccctgagcacccctatcaaccccctattgtagtaaacttggaaccttggaaatgaccaggccaagactcaagcctccccagttctactgacctttgtccttaggtgtgaggtccagggttgctaggaaaagaaatcagcagacacaggtgtagacc

SEQ ID NO: 15111 - DNA, 1906 bp, Homo sapiens
  source 1..1906: mol_type = unassigned DNA
agccccaagcttaccacctgcacccggagagctgtgtcaccatgtgggtcccggttgtcttcctcaccctgtccgtgacgtggattggtgctgcacccctcatcctgtctcggattgtgggaggctgggagtgcgagaagcattcccaaccctggcaggtgcttgtggcctctcgtggcagggcagtctgcggcggtgttctggtgcacccccagtgggtcctcacagctgcccactgcatcaggaacaaaagcgtgatcttgctgggtcggcacagcctgtttcatcctgaagacacaggccaggtatttcaggtcagccacagcttcccacacccgctctacgatatgagcctcctgaagaatcgattcctcaggccaggtgatgactccagccacgacctcatgctgctccgcctgtcagagcctgccgagctcacggatgctgtgaaggtcatggacctgcccacccaggagccagcactggggaccacctgctacgcctcaggctggggcagcattgaaccagaggagttcttgaccccaaagaaacttcagtgtgtggacctccatgttatttccaatgacgtgtgtgcgcaagttcaccctcagaaggtgaccaagttcatgctgtgtgctggacgctggacagggggcaaaagcacctgctcgtgggtcattctgatcaccgaactgaccatgccagccctgccgatggtcctccatggctccctagtgccctggagaggaggtgtctagtcagagagtagtcctggaaggtggcctctgtgaggagccacggggacagcatcctgcagatggtcctggcccttgtcccaccgacctgtctacaaggactgtcctcgtggaccctcccctctgcacaggagctggaccctgaagtcccttccccaccggccaggactggagcccctacccctctgttggaatccctgcccaccttcttctggaagtcggctctggagacatttctctcttcttccaaagctgggaactgctatctgttatctgcctgtccaggtctgaaagataggattgcccaggcagaaactgggactgacctatctcactctctccctgcttttacccttagggtgattctgggggcccacttgtctgtaatggtgtgcttcaaggtatcacgtcatggggcagtgaaccatgtgccctgcccgaaaggccttccctgtacaccaaggtggtgcattaccggaagtggatcaaggacaccatcgtggccaacccctgagcacccctatcaaccccctattgtagtaaacttggaaccttggaaatgaccaggccaagactcaagcctccccagttctactgacctttgtccttaggtgtgaggtccagggttgctaggaaaagaaatcagcagacacaggtgtagaccagagtgtttcttaaatggtgtaattttgtcctctctgtgtcctggggaatactggccatgcctggagacatatcactcaatttctctgaggacacagataggatggggtgtctgtgttatttgtggggtacagagatgaaagaggggtgggatccacactgagagagtggagagtgacatgtgctggacactgtccatgaagcactgagcagaagctggaggcacaacgcaccagacactcacagcaaggatggagctgaaaacataacccactctgtcctggaggcactgggaagcctagagaaggctgtgagccaaggagggagggtcttcctttggcatgggatggggatgaagtaaggagagggactggaccccctggaagctgattcactatggggggaggtgtattgaagtcctccagacaaccctcagatttgatgatttcctagtagaactcacagaaataaagagctgttatactgtg

SEQ ID NO: 15112 - DNA, 1335 bp, Homo sapiens
  source 1..1335: mol_type = unassigned DNA
agccccaagcttaccacctgcacccggagagctgtgtcaccatgtgggtcccggttgtcttcctcaccctgtccgtgacgtggattggtgctgcacccctcatcctgtctcggattgtgggaggctgggagtgcgagaagcattcccaaccctggcaggtgcttgtggcctctcgtggcagggcagtctgcggcggtgttctggtgcacccccagtgggtcctcacagctgcccactgcatcaggaagccaggtgatgactccagccacgacctcatgctgctccgcctgtcagagcctgccgagctcacggatgctgtgaaggtcatggacctgcccacccaggagccagcactggggaccacctgctacgcctcaggctggggcagcattgaaccagaggagttcttgaccccaaagaaacttcagtgtgtggacctccatgttatttccaatgacgtgtgtgcgcaagttcaccctcagaaggtgaccaagttcatgctgtgtgctggacgctggacagggggcaaaagcacctgctcgggtgattctgggggcccacttgtctgtaatggtgtgcttcaaggtatcacgtcatggggcagtgaaccatgtgccctgcccgaaaggccttccctgtacaccaaggtggtgcattaccggaagtggatcaaggacaccatcgtggccaacccctgagcacccctatcaaccccctattgtagtaaacttggaaccttggaaatgaccaggccaagactcaagcctccccagttctactgacctttgtccttaggtgtgaggtccagggttgctaggaaaagaaatcagcagacacaggtgtagaccagagtgtttcttaaatggtgtaattttgtcctctctgtgtcctggggaatactggccatgcctggagacatatcactcaatttctctgaggacacagataggatggggtgtctgtgttatttgtggggtacagagatgaaagaggggtgggatccacactgagagagtggagagtgacatgtgctggacactgtccatgaagcactgagcagaagctggaggcacaacgcaccagacactcacagcaaggatggagctgaaaacataacccactctgtcctggaggcactgggaagcctagagaaggctgtgagccaaggagggagggtcttcctttggcatgggatggggatgaagtaaggagagggactggaccccctggaagctgattcactatggggggaggtgtattgaagtcctccagacaaccctcagatttgatgatttcctagtagaactcacagaaataaagagctgttatactgtg

SEQ ID NO: 15113 - DNA, 555 bp, Homo sapiens
  source 1..555: mol_type = unassigned DNA
agccccaagcttaccacctgcacccggagagctgtgtcaccatgtgggtcccggttgtcttcctcaccctgtccgtgacgtggattggtgctgcacccctcatcctgtctcggattgtgggaggctgggagtgcgagaagcattcccaaccctggcaggtgcttgtggcctctcgtggcagggcagtctgcggcggtgttctggtgcacccccagtgggtcctcacagctgcccactgcatcaggaagtgagtaggggcctggggtctggggagcaggtgtctgtgtcccagaggaataacagctgggcattttccccaggataacctctaaggccagccttgggactgggggagagagggaaagttctggttcaggtcacatggggaggcagggttggggctggaccaccctccccatggctgcctgggtctccatctgtgttcctctatgtctctttgtgtcgctttcattatgtctcttggtaactggcttcggttgtgtctctccgtgtgactattttgttctctctctccctctcttctctgtcttcagt

SEQ ID NO: 15114 - DNA, 1347 bp, Homo sapiens
  source 1..1347: mol_type = unassigned DNA
atggccacagcaggaaatccctggggctggttcctggggtacctcatccttggtgtcgcaggatcgctcgtctctggtagctgcagccaaatcataaacggcgaggactgcagcccgcactcgcagccctggcaggcggcactggtcatggaaaacgaattgttctgctcgggcgtcctggtgcatccgcagtgggtgctgtcagccgcacactgtttccagaactcctacaccatcgggctgggcctgcacagtcttgaggccgaccaagagccagggagccagatggtggaggccagcctctccgtacggcacccagagtacaacagacccttgctcgctaacgacctcatgctcatcaagttggacgaatccgtgtccgagtctgacaccatccggagcatcagcattgcttcgcagtgccctaccgcggggaactcttgcctcgtttctggctggggtctgctggcgaacggcagaatgcctaccgtgctgcagtgcgtgaacgtgtcggtggtgtctgaggaggtctgcagtaagctctatgacccgctgtaccaccccagcatgttctgcgccggcggagggcacgaccagaaggactcctgcaacggtgactctggggggcccctgatctgcaacgggtacttgcagggccttgtgtctttcggaaaagccccgtgtggccaagttggcgtgccaggtgtctacaccaacctctgcaaattcactgagtggatagagaaaaccgtccaggccagttaactctggggactgggaacccatgaaattgacccccaaatacatcctgcggaaggaattcaggaatatctgttcccagcccctcctccctcaggcccaggagtccaggcccccagcccctcctccctcaaaccaagggtacagatccccagcccctcctccctcagacccaggagtccagaccccccagcccctcctccctcagacccaggagtccagcccctcctccctcagacccaggagtccagaccccccagcccctcctccctcagacccaggagtccagcccctcctccctcagacccaggagtccagaccccccagcccctcctccctcagacccaggggtccaggcccccaacccctcctccctcagactcagaggtccaggcccccaacccctccttccccagacccagaggtccaggtcccagcccctcctccctcagacccagcggtccaatgccacctagactctccctgtacacagtgcccccttgtggcacgttgacccaaccttaccagttggtttttcattttttgtccctttcccctagatccagaaataaagtctaagagaagcgc

SEQ ID NO: 15115 - DNA, 481 bp, Homo sapiens
  source 1..481: mol_type = unassigned DNA
atggaaaacgaattgttctgctcgggcgtcctggtgcatccgcagtgggtgctgtcagccgcacactgtttccagaactcctacaccatcgggctgggcctgcacagtcttgaggccgaccaagagccagggagccagatggtggaggccagcctctccgtacggcacccagagtacaacagacccttgctcgctaacgacctcatgctcatcaagttggacgaatccgtgtccgagtctgacaccatccggagcatcagcattgcttcgcagtgccctaccgcggggaactcttgcctcgtttctggctggggtctgctggcgaacgggtgactctggggggcccctgatctgcaacgggtacttgcagggccttgtgtctttcggaaaagccccgtgtggccaagttggcgtgccaggtgtctacaccaacctctgcaaattcactgagtggatagagaaaaccgtccaggccagttaa

SEQ ID NO: 15116 - DNA, 1510 bp, Homo sapiens
  source 1..1510: mol_type = unassigned DNA
ggcggacaaagcccgattgttcctgggccctttccccatcgcgcctgggcctgctccccagcccggggcaggggcgggggccagtgtggtgacacacgctgtagctgtctccccggctggctggctcgctctctcctggggacacagaggtcggcaggcagcacacagagggacctacgggcagctgttccttcccccgactcaagaatccccggagcccggaggcctgcagcaggagcggccatgaagaagctgatggtggtgctgagtctgattgctgcagcctgggcagaggagcagaataagttggtgcatggcggaccctgcgacaagacatctcacccctaccaagctgccctctacacctcgggccacttgctctgtggtggggtccttatccatccactgtgggtcctcacagctgcccactgcaaaaaaccgaatcttcaggtcttcctggggaagcataaccttcggcaaagggagagttcccaggagcagagttctgttgtccgggctgtgatccaccctgactatgatgccgccagccatgaccaggacatcatgctgttgcgcctggcacgcccagccaaactctctgaactcatccagccccttcccctggagagggactgctcagccaacaccaccagctgccacatcctgggctggggcaagacagcagatggtgatttccctgacaccatccagtgtgcatacatccacctggtgtcccgtgaggagtgtgagcatgcctaccctggccagatcacccagaacatgttgtgtgctggggatgagaagtacgggaaggattcctgccagggtgattctgggggtccgctggtatgtggagaccacctccgaggccttgtgtcatggggtaacatcccctgtggatcaaaggagaagccaggagtctacaccaacgtctgcagatacacgaactggatccaaaaaaccattcaggccaagtgaccctgacatgtgacatctacctcccgacctaccaccccactggctggttccagaacgtctctcacctagaccttgcctcccctcctctcctgcccagctctgaccctgatgcttaataaacgcagcgacgtgagggtcctgattctccctggttttaccccagctccatccttgcatcactggggaggacgtgatgagtgaggacttgggtcctcggtcttacccccaccactaagagaatacaggaaaatcccttctaggcatctcctctccccaacccttccacacgtttgatttcttcctgcagaggcccagccacgtgtctggaatcccagctccgctgcttactgtcggtgtccccttgggatgtacctttcttcactgcagatttctcacctgtaagatgaagataaggatgatacagtctccataaggcagtggctgttggaaagatttaaggtttcacacctatgacatacatggaatagcacctgggccaccatgcactcaataaagaatgaattttattatg

SEQ ID NO: 15117 - DNA, 1526 bp, Homo sapiens
  source 1..1526: mol_type = unassigned DNA
aggacgttccagaagcatctggggacagaaccagcctcttccagggaggcctgggagctgggggtgtgtgtctggcagtccctgcagccctgggctctgcggcccctgcgtcctccgcttggctctgccactgcatctgagtgtcttctctcctcacggctccccgcatttctaactctttctgcctcctcgtctcaaagctgttccttcccccgactcaagaatccccggagcccggaggcctgcagcaggagcggccatgaagaagctgatggtggtgctgagtctgattgctgcagcctgggcagaggagcagaataagttggtgcatggcggaccctgcgacaagacatctcacccctaccaagctgccctctacacctcgggccacttgctctgtggtggggtccttatccatccactgtgggtcctcacagctgcccactgcaaaaaaccgaatcttcaggtcttcctggggaagcataaccttcggcaaagggagagttcccaggagcagagttctgttgtccgggctgtgatccaccctgactatgatgccgccagccatgaccaggacatcatgctgttgcgcctggcacgcccagccaaactctctgaactcatccagccccttcccctggagagggactgctcagccaacaccaccagctgccacatcctgggctggggcaagacagcagatggtgatttccctgacaccatccagtgtgcatacatccacctggtgtcccgtgaggagtgtgagcatgcctaccctggccagatcacccagaacatgttgtgtgctggggatgagaagtacgggaaggattcctgccagggtgattctgggggtccgctggtatgtggagaccacctccgaggccttgtgtcatggggtaacatcccctgtggatcaaaggagaagccaggagtctacaccaacgtctgcagatacacgaactggatccaaaaaaccattcaggccaagtgaccctgacatgtgacatctacctcccgacctaccaccccactggctggttccagaacgtctctcacctagaccttgcctcccctcctctcctgcccagctctgaccctgatgcttaataaacgcagcgacgtgagggtcctgattctccctggttttaccccagctccatccttgcatcactggggaggacgtgatgagtgaggacttgggtcctcggtcttacccccaccactaagagaatacaggaaaatcccttctaggcatctcctctccccaacccttccacacgtttgatttcttcctgcagaggcccagccacgtgtctggaatcccagctccgctgcttactgtcggtgtccccttgggatgtacctttcttcactgcagatttctcacctgtaagatgaagataaggatgatacagtctccataaggcagtggctgttggaaagatttaaggtttcacacctatgacatacatggaatagcacctgggccaccatgcactcaataaagaatgaattttattatg

SEQ ID NO: 15118 - DNA, 376 bp, Homo sapiens
  source 1..376: mol_type = unassigned DNA
caggagcggccatgaagaagctgatggtggtgctgagtctgattgctgcagcctgggcagaggagcagaataagttggtgcatggcggaccctgcgacaagacatctcacccctaccaagctgccctctacacctcgggccacttgctctgtggtggggtccttatccatccactgtgggtcctcacagctgcccactgcaaaaaaccggtgattctgggggtccgctggtatgtggagaccacctccgaggccttgtgtcatggggtaacatcccctgtggatcaaaggagaagccaggagtctacaccaacgtctgcagatacacgaactggatccaaaaaaccattcaggccaagtgaccctgacatgtgaca

SEQ ID NO: 15119 - DNA, 1478 bp, Homo sapiens
  source 1..1478: mol_type = unassigned DNA
aggacgttccagaagcatctggggacagaaccagcctcttccagggaggcctgggagctgggggtgtgtgtctggcagtccctgcagccctgggctctgcggcccctgcgtcctccgcttggctctgccactgcatctgagtgtcttctctcctcacggctccccgcatttctaactctttctgcctcctcgtctcaaagctgttccttcccccgactcaagaatccccggagcccggaggcctgcagcagcctgggcagaggagcagaataagttggtgcatggcggaccctgcgacaagacatctcacccctaccaagctgccctctacacctcgggccacttgctctgtggtggggtccttatccatccactgtgggtcctcacagctgcccactgcaaaaaaccgaatcttcaggtcttcctggggaagcataaccttcggcaaagggagagttcccaggagcagagttctgttgtccgggctgtgatccaccctgactatgatgccgccagccatgaccaggacatcatgctgttgcgcctggcacgcccagccaaactctctgaactcatccagccccttcccctggagagggactgctcagccaacaccaccagctgccacatcctgggctggggcaagacagcagatggtgatttccctgacaccatccagtgtgcatacatccacctggtgtcccgtgaggagtgtgagcatgcctaccctggccagatcacccagaacatgttgtgtgctggggatgagaagtacgggaaggattcctgccagggtgattctgggggtccgctggtatgtggagaccacctccgaggccttgtgtcatggggtaacatcccctgtggatcaaaggagaagccaggagtctacaccaacgtctgcagatacacgaactggatccaaaaaaccattcaggccaagtgaccctgacatgtgacatctacctcccgacctaccaccccactggctggttccagaacgtctctcacctagaccttgcctcccctcctctcctgcccagctctgaccctgatgcttaataaacgcagcgacgtgagggtcctgattctccctggttttaccccagctccatccttgcatcactggggaggacgtgatgagtgaggacttgggtcctcggtcttacccccaccactaagagaatacaggaaaatcccttctaggcatctcctctccccaacccttccacacgtttgatttcttcctgcagaggcccagccacgtgtctggaatcccagctccgctgcttactgtcggtgtccccttgggatgtacctttcttcactgcagatttctcacctgtaagatgaagataaggatgatacagtctccataaggcagtggctgttggaaagatttaaggtttcacacctatgacatacatggaatagcacctgggccaccatgcactcaataaagaatgaattttattatg

SEQ ID NO: 15120 - DNA, 134 bp, Homo sapiens
  source 1..134: mol_type = unassigned DNA
caggagcggccatgaagaagctgatggtggtgctgagtctgattgctgcaggaatcttcaggtcttcctggggaagcataaccttcggcaaagggagagttcccaggagcagagttctgttgtccgggctgtga

SEQ ID NO: 15121 - DNA, 429 bp, Homo sapiens
  source 1..429: mol_type = unassigned DNA
atgctgttgcgcctggcacgcccagccaaactctctgaactcatccagccccttcccctggagagggactgctcagccaacaccaccagctgccacatcctgggctggggcaagacagcagatggtgatttccctgacaccatccagtgtgcatacatccacctggtgtcccgtgaggagtgtgagcatgcctaccctggccagatcacccagaacatgttgtgtgctggggatgagaagtacgggaaggattcctgccagggtgattctgggggtccgctggtatgtggagaccacctccgaggccttgtgtcatggggtaacatcccctgtggatcaaaggagaagccaggagtctacaccaacgtctgcagatacacgaactggatccaaaaaaccattcaggccaagtgaccctgacatgtgaca

SEQ ID NO: 15122 - DNA, 1013 bp, Homo sapiens
  source 1..1013: mol_type = unassigned DNA
gttcccagaagctccccaggctctagtgcaggaggagaaggaggaggagcaggaggtggagattcccagttaaaaggctccagaatcgtgtaccaggcagagaactgaagtactggggcctcctccactgggtccgaatcagtaggtgaccccgcccctggattctggaagacctcaccatgggacgcccccgacctcgtgcggccaagacgtggatgttcctgctcttgctggggggagcctgggcaggacactccagggcacaggaggacaaggtgctggggggtcatgagtgccaaccccattcgcagccttggcaggcggccttgttccagggccagcaactactctgtggcggtgtccttgtaggtggcaactgggtccttacagctgcccactgtaaaaaaccgaaatacacagtacgcctgggagaccacagcctacagaataaagatggcccagagcaagaaatacctgtggttcagtccatcccacacccctgctacaacagcagcgatgtggaggaccacaaccatgatctgatgcttcttcaactgcgtgaccaggcatccctggggtccaaagtgaagcccatcagcctggcagatcattgcacccagcctggccagaagtgcaccgtctcaggctggggcactgtcaccagtccccgagagaattttcctgacactctcaactgtgcagaagtaaaaatctttccccagaagaagtgtgaggatgcttacccggggcagatcacagatggcatggtctgtgcaggcagcagcaaaggggctgacacgtgccagggcgattctggaggccccctggtgtgtgatggtgcactccagggcatcacatcctggggctcagacccctgtgggaggtccgacaaacctggcgtctataccaacatctgccgctacctggactggatcaagaagatcataggcagcaagggctgattctaggataagcactagatctcccttaataaactcacaactctctggttc

SEQ ID NO: 15123 - DNA, 456 bp, Homo sapiens
  source 1..456: mol_type = unassigned DNA
gttcccagaagctccccaggctctagtgcaggaggagaaggaggaggagcaggaggtggagattcccagttaaaaggctccagaatcgtgtaccaggcagagaactgaagtactggggcctcctccactgggtccgaatcagtaggtgaccccgcccctggattctggaagacctcaccatgggacgcccccgacctcgtgcggccaagacgtggatgttcctgctcttgctggggggagcctgggcagggcgattctggaggccccctggtgtgtgatggtgcactccagggcatcacatcctggggctcagacccctgtgggaggtccgacaaacctggcgtctataccaacatctgccgctacctggactggatcaagaagatcataggcagcaagggctgattctaggataagcactagatctcccttaataaactcacaactctctggttc

SEQ ID NO: 15124 - DNA, 590 bp, Homo sapiens
  source 1..590: mol_type = unassigned DNA
gttcccagaagctccccaggctctagtgcaggaggagaaggaggaggagcaggaggtggagattcccagttaaaaggctccagaatcgtgtaccaggcagagaactgaagtactggggcctcctccactgggtccgaatcagtaggtgaccccgcccctggattctggaagacctcaccatgggacgcccccgacctcgtgcggccaagacgtggatgttcctgctcttgctggggggagcctgggcagagaattttcctgacactctcaactgtgcagaagtaaaaatctttccccagaagaagtgtgaggatgcttacccggggcagatcacagatggcatggtctgtgcaggcagcagcaaaggggctgacacgtgccagggcgattctggaggccccctggtgtgtgatggtgcactccagggcatcacatcctggggctcagacccctgtgggaggtccgacaaacctggcgtctataccaacatctgccgctacctggactggatcaagaagatcataggcagcaagggctgattctaggataagcactagatctcccttaataaactcacaactctctggttc

SEQ ID NO: 15125 - DNA, 1148 bp, Homo sapiens
  source 1..1148: mol_type = unassigned DNA
gttcccagaagctccccaggctctagtgcaggaggagaaggaggaggagcaggaggtggagattcccagttaaaaggctccagaatcgtgtaccaggcagagaactgaagtactggggcctcctccactgggtccgaatcagtaggtgaccccgcccctggattctggaagacctcaccatgggacgcccccgacctcgtgcggccaagacgtggatgttcctgctcttgctggggggagcctgggcagcgtgtggaagcctggacctcctcactaagttgtatgcggagaacttgccgtgtgtccatttgaacccacagtggccttcccagccctcgcactgccccagagggtggcgatccaaccctctccctcctgctgcaggacactccagggcacaggaggacaaggtgctggggggtcatgagtgccaaccccattcgcagccttggcaggcggccttgttccagggccagcaactactctgtggcggtgtccttgtaggtggcaactgggtccttacagctgcccactgtaaaaaaccgaaatacacagtacgcctgggagaccacagcctacagaataaagatggcccagagcaagaaatacctgtggttcagtccatcccacacccctgctacaacagcagcgatgtggaggaccacaaccatgatctgatgcttcttcaactgcgtgaccaggcatccctggggtccaaagtgaagcccatcagcctggcagatcattgcacccagcctggccagaagtgcaccgtctcaggctggggcactgtcaccagtccccgagagaattttcctgacactctcaactgtgcagaagtaaaaatctttccccagaagaagtgtgaggatgcttacccggggcagatcacagatggcatggtctgtgcaggcagcagcaaaggggctgacacgtgccagggcgattctggaggccccctggtgtgtgatggtgcactccagggcatcacatcctggggctcagacccctgtgggaggtccgacaaacctggcgtctataccaacatctgccgctacctggactggatcaagaagatcataggcagcaagggctgattctaggataagcactagatctcccttaataaactcacaactctctggttc

SEQ ID NO: 15126 - DNA, 1324 bp, Homo sapiens
  source 1..1324: mol_type = unassigned DNA
cgcccctcgtgatgtcaggggcgcagtagctccgcccacgtggagctcgggcggtgtagagctcagccccttgtggccccgtcctgggcgtgtgctgggtttgaatcctggcggagacctggggggaaattgagggagggtctggatacctttagagccaatgcaacggatgatttttcagtaaacgcgggaaacctcaccttctttctgcctgagctgtgagatgagtggagagcaaacgggtgggcggtgaagggcagatgagggaaccggtaccgccttgcaactcccccttaaacccctatgttccagttcccagaagctccccaggctctagtgcaggaggagaaggaggaggagcaggaggtggagattcccagttaaaaggctccagaatcgtgtaccaggcagagaactgaagtactggggcctcctccactgggtccgaatcagtaggtgaccccgcccctggattctggaagacctcaccatgggacgcccccgacctcgtgcggccaagacgtggatgttcctgctcttgctggggggagcctgggcaggacactccagggcacaggaggacaaggtgctggggggtcatgagtgccaaccccattcgcagccttggcaggcggccttgttccagggccagcaactactctgtggcggtgtccttgtaggtggcaactgggtccttacagctgcccactgtaaaaaaccgaaatacacagtacgcctgggagaccacagcctacagaataaagatggcccagagcaagaaatacctgtggttcagtccatcccacacccctgctacaacagcagcgatgtggaggaccacaaccatgatctgatgcttcttcaactgcgtgaccaggcatccctggggtccaaagtgaagcccatcagcctggcagatcattgcacccagcctggccagaagtgcaccgtctcaggctggggcactgtcaccagtccccgagagaattttcctgacactctcaactgtgcagaagtaaaaatctttccccagaagaagtgtgaggatgcttacccggggcagatcacagatggcatggtctgtgcaggcagcagcaaaggggctgacacgtgccagggcgattctggaggccccctggtgtgtgatggtgcactccagggcatcacatcctggggctcagacccctgtgggaggtccgacaaacctggcgtctataccaacatctgccgctacctggactggatcaagaagatcataggcagcaagggctgattctaggataagcactagatctcccttaataaactcacaactctctggttc

SEQ ID NO: 15127 - DNA, 1438 bp, Homo sapiens
  source 1..1438: mol_type = unassigned DNA
catggaggaggaaggagatggcatggcttaccataaagaagcactggacgccgggtgcacgttccaggatccaggtgcccaggggtcatgaagctgggactcctctgtgctctgctctctctgctggcagggcatggctgggcagacacccgtgccatcggggccgaggaatgtcgccccaactcccagccttggcaggccggcctcttccaccttactcggctcttctgtggggcgaccctcatcagtgaccgctggctgctcacagctgcccactgccgcaagccgtatctgtgggtccgccttggagagcaccacctctggaaatgggagggtccggagcagctgttccgggttacggacttcttcccccaccctggcttcaacaaggacctcagcgccaatgaccacaatgatgacatcatgctgatccgcctgcccaggcaggcacgtctgagtcctgctgtgcagcccctcaacctcagccagacctgtgtctccccaggcatgcagtgtctcatctcaggctggggggccgtgtccagccccaaggcgctgtttccagtcacactgcagtgtgccaacatcagcatcctggagaacaaactctgtcactgggcataccctggacacatctcggacagcatgctctgtgcgggcctgtgggaggggggccgaggttcctgccagggtgactctgggggccccctggtttgcaatggaaccttggcaggcgtggtgtctgggggtgctgagccctgctccagaccccggcgccccgcagtctacaccagcgtatgccactaccttgactggatccaagaaatcatggagaactgagcccgcgcgccacgggggcaccttggaagaccaagagaggccgaagggcacggggtagggggttctcgtagggtcccagcctcaatggttcccgccctggacctccagctgccctgactcccctctggacactaagactccgcccctgaggctccgccccctcacgaggtcaagcaagacacagtcgcgccccctcggaacggagcagggacacgcccttcagagcccgtctctatgacgtcaccgacagccatcacctccttcttggaacagcacagcctgtggctccgccccaaggaaccacttacacaaaatagctccgcccctcggaactttgcccagtgggacttcccctcgggactccaccccttgtggccccgcctccttcaccagagatctcgcccctcgtgatgtcaggggcgcagtagctccgcccacgtggagctcgggcggtgtagagctcagccccttgtggccccgtcctgggcgtgtgctgggtttgaatcctggcggagacctggggggaaattgagggagggtctggatacctttagagccaatgcaacggatgatttttcagtaaacgcgggaaacctca

SEQ ID NO: 15128 - DNA, 1602 bp, Homo sapiens
  source 1..1602: mol_type = unassigned DNA
ggtgcacgttccaggatccaggtgcccaggggtcatgaagctgggactcctctgtgctctgctctctctgctggcagggcatggctgggcagacacccgtgccatcggggccgaggaatgtcgccccaactcccagccttggcaggccggcctcttccaccttactcggctcttctgtggggcgaccctcatcagtgaccgctggctgctcacagctgcccactgccgcaagccgtatctgtgggtccgccttggagagcaccacctctggaaatgggagggtccggagcagctgttccgggttacggacttcttcccccaccctggcttcaacaaggacctcagcgccaatgaccacaatgatgacatcatgctgatccgcctgcccaggcaggcacgtctgagtcctgctgtgcagcccctcaacctcagccagacctgtgtctccccaggcatgcagtgtctcatctcaggctggggggccgtgtccagccccaaggcgctgtttccagtcacactgcagtgtgccaacatcagcatcctggagaacaaactctgtcactgggcataccctggacacatctcggacagcatgctctgtgcgggcctgtgggaggggggccgaggttcctgccagggtgactctgggggccccctggtttgcaatggaaccttggcaggcgtggtgtctgggggtgctgagccctgctccagaccccggcgccccgcagtctacaccagcgtatgccactaccttgactggatccaagaaatcatggagaactgagcccgcgcgccacgggggcaccttggaagaccaagagaggccgaagggcacggggtagggggttctcgtagggtcccagcctcaatggttcccgccctggacctccagctgccctgactcccctctggacactaagactccgcccctgaggctccgccccctcacgaggtcaagcaagacacagtcgcgccccctcggaacggagcagggacacgcccttcagagcccgtctctatgacgtcaccgacagccatcacctccttcttggaacagcacagcctgtggctccgccccaaggaaccacttacacaaaatagctccgcccctcggaactttgcccagtgggacttcccctcgggactccaccccttgtggccccgcctccttcaccagagatctcgcccctcgtgatgtcaggggcgcagtagctccgcccacgtggagctcgggcggtgtagagctcagccccttgtggccccgtcctgggcgtgtgctgggtttgaatcctggcggagacctggggggaaattgagggagggtctggatacctttagagccaatgcaacggatgatttttcagtaaacgcgggaaacctcaccttctttctgcctgagctgtgagatgagtggagagcaaacgggtgggcggtgaagggcagatgagggaaccggtaccgccttgcaactcccccttaaacccctaacctcaccatgggacgcccccgacctcgtgcggccaagacgtggatgttcctgctcttgctggggggagcctgggcaggacactccagggcacaggaggacaaggtgctggg

SEQ ID NO: 15129 - DNA, 683 bp, Homo sapiens
  source 1..683: mol_type = unassigned DNA
catggaggaggaaggagatggcatggcttaccataaagaagcactggacgccgggtgcacgttccaggatccaggtgcccaggggtcatgaagctgggactcctctgtgctctgctctctctgctggcaggtatctgtgggtccgccttggagagcaccacctctggaaatgggagggtccggagcagctgttccgggttacggacttcttcccccaccctggcttcaacaaggacctcagcgccaatgaccacaatgatgacatcatgctgatccgcctgcccaggcaggcacgtctgagtcctgctgtgcagcccctcaacctcagccagacctgtgtctccccaggcatgcagtgtctcatctcaggctggggggccgtgtccagccccaaggcgctgtttccagtcacactgcagtgtgccaacatcagcatcctggagaacaaactctgtcactgggcataccctggacacatctcggacagcatgctctgtgcgggcctgtgggaggggggccgaggttcctgccagggtgactctgggggccccctggtttgcaatggaaccttggcaggcgtggtgtctgggggtgctgagccctgctccagaccccggcgccccgcagtctacaccagcgtatgccactaccttgactggatccaagaaatcatggagaactga

SEQ ID NO: 15130 - DNA, 6314 bp, Homo sapiens
  source 1..6314: mol_type = unassigned DNA
gtcggcgaggagggtccggccggagttgaaggattgaactttccggctcagtcgcggcgtctgcctggtcctcagcagtgcagccccggcgcggagcagggagcctcggcccgcgcccggcgccctcgccctcgccctcgacccgcagccatggtgcccggggtgcccggcgcggtcctgaccctctgcctctggctggcggcctccagcggctgcctggcggccggccccggcgcggctgctgcgcggcggctggacgagtcgctgtctgccgggagcgtccagcgcgctcgctgcgcctccaggtgcctgagcctgcagatcactcgcatctccgccttcttccagcacttccagaacaatggttccctggtttggtgccagaatcacaagcaatgttctaagtgcctggagccctgcaaggaatcaggggacctgaggaaacaccagtgccaaagcttttgtgagcctctcttccccaagaagagctacgaatgcttgaccagctgtgagttcctcaaatacatcctgttggtgaagcagggggactgtccggctcctgagaaagccagtggatttgcggccgcctgtgttgaaagctgcgaagttgacaatgagtgctctggggtgaagaaatgttgttcgaatgggtgtggacacacctgtcaagtacccaagactctgtacaaaggtgtccccctgaagcccagaaaagagttacgatttacagaactgcagtctggacagctggaggttaagtggtcctcgaaattcaatatttctattgagcctgtgatctatgtggtacaaagaagatggaattatggaatccatcctagcgaagatgacgccactcactggcagacagtggcccagaccacagacgagcgagttcaactgactgacataagacccagccgatggtaccagtttcgagtggctgctgtgaatgtgcatggaactcgaggcttcactgcccccagcaaacacttccgttcttccaaagatccatctgccccaccagcaccggctaacctccggctggccaactccaccgtcaacagtgatgggagtgtgaccgtcactatagtttgggatctccccgaggagccggacatccctgtgcatcattacaaggtcttttggagctggatggtcagcagtaagtctcttgtcccaacaaagaagaagcggagaaagactacggatgggtttcaaaattctgtgatcctggagaaactccagccagactgtgactatgttgtggaattgcaagccataacgtactggggacagacacggctgaagagtgcaaaggtgtcccttcacttcacatcgacacatgcaaccaacaacaaagaacagcttgtgaaaactagaaaaggtggaattcaaacacaactcccttttcaaagacgacgacccactcgcccgctggaagtcggagctcccttctatcaggatggccaactgcaagttaaagtctactggaagaagacagaagatcccactgtcaaccgatatcatgtgcggtggtttcctgaagcgtgtgcccacaacagaacaaccggatcagaggcatcatctggcatgacccacgaaaattacataattcttcaagatctgtcattttcctgcaagtataaggtgactgtccaaccaatacggccaaaaagtcactccaaggcagaagctgttttcttcactactccaccatgctctgctcttaaggggaagagccacaagcctgttggctgcctgggcgaagcaggtcatgttctttctaaggtgctagctaagcctgagaacctttctgcttcattcatcgtccaggatgtgaacatcaccggtcacttttcttggaagatggccaaggccaatctctatcagcccatgactgggtttcaagtgacttgggctgaggtcactacggaaagcagacagaacagcctacccaacagcattatttcacagtcccagatcctgccttccgatcattatgtcctaacagtgcccaatctgagaccatctactctttaccgactggaagtgcaagtgctgaccccaggaggggaggggccggccaccatcaagacgttccggacgccggagctcccaccctcttcagcacacagatctcatcttaagcatcgtcatccacatcattacaagccttctccagaaagatactaaactgttcaaaaagattttgtgaaattgcacagatgtgtaagcttgttgaacttcggccacgagacatgcacacttccagaggcagtgggaactgctcagaggcccggactctcctatgtgactttagtgcaggaagaacttctgtcaatcatggacgcatctggagacaagtgagaaacagtagattggtgaagacagacaccagttccctacaagcatggagaaaatgaagaataggcctgtttaatgctaaattttgttttcatgtatggtgtcgctcatttctattgaattacaacagaactcagttttccctgaatttggagcaccaaactccgccccaaaaaggagagtaacaaatacacaattcacacataacactaagcgtaaatctaatcaataaaatatatttttgactaaattattgattcgatatgaaaaatcaactaagattacacagctttgtttttttgaatctttcctaagatcatttttatcctaggtgatttttaaatgaaaatgtgtaatctaaaatataccagcgaatttaaatctaaaaatgctcctactttaagtaccttgtgctgctctttatgcaaaggtaaatcaaagttccctctataaattatgatttacaaaagacacccaagccagaggaactcaatgaaataagctgctaatcagattttaccttggagaaatgaaaattatttcttggggatgccttttaatatttgatcctattatgtgagagattttcctgatatgttatcttatttatattttcccttattttcctcaatgcagataatagcttttggtgcacttttgtttcaccatctgaaaattcacaaaacttcttgcttcaaatgaaaaaatcccaactattgagcatgtttaaatctttgcagagatttgccttttcttaatcaaagaaaggtctttgtgtgctagaatattattggtaatgttttaaaaattcctttgattgatagagaaggacagttatttgcatttaattcacccatatgctttcaaatctagtatatcttactttttggaaatgttttatgctacaaattagtgccttgtagcatgaacttaagtcaaaacgtgttatcaatatagagtgttgcagtgtatattgtaacaacctaaaacgcagagaagtttaatttaatactgttttttttcttgaaggaatactcacatacatggtttgaaatgtgcatagatatgcatgtctatataattataaatgcatgtgtatatatatgcaaatatatgtacatatacatgtatatacacacagacacatgcatatacatgaatataccttgagcatgaatccctggagaaatcgttttcgtagctcaccaatggtgagtaaagatacagctcttttaaaggtcataaggataatatattttccccatcaatgctgattctgagaaaagagcaatttatcaaaattaaacactgtaaaagaaaggtgtccatatgtctttacctacctaagtaaaacaggaagaaaatcagtaacattatccttaggttttgacaatggtacttgcttcttgttgttttattgtttcctgaattcatgcagatgcctggccattcctgggaagagtggataactcagaagtcactgtactccacagagcctcactgcagtgtctaaaggtagatgcaaattaaaatgcagggaaaataacttttctgatgttgatgcatgtctttgggaaacacatttataaacatggatacctgataatagatattgaaacccatttcctgtgtgttaaaatatttaaaaagtggatattccaggaatgttttgcagctttgtacaagtaacataaattggacacctcagaatgaaagttcatgttggttctgaatggttcactgcagctcctgtcacaagctgggatggatttatcacattgagttatgaaattacctggttctaagaatttttgagtggcaaaaatagaaaacaatcttcatttgaaaacatccctaagcttgaataaatggataccatagatagcttctcttttttattctggtgtcattaccagcatctgaatttcaagttcttaaaatttcaaaaattaaaatttttcattattagctatccatttatcttttacatgaacttgtcatgaacaaattcaaatgtttatgccagcaaatttttgtactgttgcatagttaaaaatgctgggagtctctgcatagatacaaaatattattaaattattacataaatttaattttataaaatttaatcatgcttcttttgtctgggtaatagacattggacagatatttttagttcagatggtgattctgaagcttacatctcccttaaaaaaatctaaagcagctcttatgggcttctaattttaatataaataaataatttaaattttattggtgttattggaagaaaaatgctattaatgggctaataaaaaacatgtgtttctcttatggattttaataagctccagtattattcaaatgatcaaaaatatagttataattttttgaattttaaaaatgtgattgctctaataaagaataaaatctatgctttttaacaaacatagttttggtgcctaattctgtaatatgttttattgaaattagattcatttctctaatgtgagaaaaatatatccagtaatagtattgactgtttaaaaaattgagctcatcaaaaatattgtcatcaaatacaggtggttaatctgacatacattgcagttacatgcattatttttatttacaacatttgctccttaatgatgaatttatctgtgttaccctgtttttctacctggaactccatagaatgatgtttgcaaaccaacatgtgctcttttcagtcattcactgttttaatatgacatggtagagaagataaggtttatggcaggtaattttttgtaatgtgtattaaacgaagttcaaagattagaaatacatctgtgtcctgaaaaccttagatacatagccgactgtatacagaggttcatctcaacctcaacactattgacttttggggctggatagttctctgttgtgggggtttgtcttgtgcactgtaggtttttagtagcatccacactttctcctcaccagatgccagttgcaccctcccccaagttgagacaaccaaaaatgtctccagatattgccagctaccccttgagggatggtacctctggttgagaaccattgctagagaatgatctttactgaatttgccctttataagaaacccagtgaatttctagagcaagtcccaaaaactaagggacagctaagaagttattatggttgacttcaaaggcctaaactgtgttttttatgtccactaaacaacttgattaaaagacggaattttgactcgtgtctgtatcatacaagtacaaatactaattttgccctatgtatccgtaaatgtcatttgtgattttgacttatttatttaatgccctttcttatgccgtgggttttcaagtttactcatttctatggttgcaaataactctaaaacttattatataaactttcatattataggcagaacacaatggctaaatatctgttgcatgtactttaaagtttattataaaatataaacagatatataaagatgttgactcttacctgtgattttgcatggtcagactcggtgtcaggtacggagaggattctcatgactgtcttacctctactgaatattctagtgagttatatgatttacggagtgattaacagaggtctatataaagttacttttcccctttacttaattatattgtagtgtgcagataacaaaactgctaccttctcatccaagtggtctgtagaattcatgtcccttacagtggtcatttaaagtcaatatttatttatgtatgtaataaaaaaagttggatttttgtgtatgtctgtcacattatttagagagaagtaatcttgtaaaaatgttttgtaaaaaacaaaaaagtattgtaaatagtcttgatattctgtgactcattattttcatgttagagtttgtacatactggttcaataataaagtatccttaaaccaga

SEQ ID NO: 15131 - DNA, 4195 bp, Homo sapiens
  source 1..4195: mol_type = unassigned DNA
ctccctcgctccctccctgcgcgccgcctctcactcacagcctcccttccttctttctccctccgcctcccgagcaccagcgcgctctgagctgcccccagggtccctcccccgccgccagcagcccatttggagggaggaagtaagggaagaggagaggaaggggagccggaccgactacccagacagagccggtgaatgggtttgtggtgacccccgccccccaccccaccctcccttcccacccgacccccaacccccatccccagttcgagccgccgcccgaaaggccgggccgtcgtcttaggaggagtcgccgccgccgccacctccgccatggagctgatcaccattctcgagaagaccgtgtctcccgatcggctggagctggaagcggcgcagaagttcctggagcgtgcggccgtggagaacctgcccactttccttgtggaactgtccagagtgctggcaaatccaggaaacagtcaggttgccagagttgcagctggtctacaaatcaagaactctttgacatctaaagatccagatatcaaggcacaatatcagcagaggtggcttgctattgatgctaatgctcgacgagaagtcaagaactatgttttgcagacattgggtacagaaacttaccggcctagttctgcctcacagtgtgtggctggtattgcttgtgcagagatcccagtaaaccagtggccagaactcattcctcagctggtggccaatgtcacaaaccccaacagcacagagcacatgaaggagtcgacattggaagccatcggttatatttgccaagatatagacccagagcagctacaagataaatccaatgagattctgactgccataatccaggggatgaggaaagaagagcctagtaataatgtgaagctagctgctacgaatgcactcctgaactcattggagttcaccaaagcaaactttgataaagagtctgaaaggcactttattatgcaggtggtctgtgaagccacacagtgtccagatacgagggtacgagtggctgctttacagaatctggtgaagataatgtccttatattatcagtacatggagacatatatgggtcctgctctttttgcaatcacaatcgaagcaatgaaaagtgacattgatgaggtggctttacaagggatagaattctggtccaatgtctgtgatgaggaaatggatttggccattgaagcttcagaggcagcagaacaaggacggccccctgagcacaccagcaagttttatgcgaagggagcactacagtatctggttccaatcctcacacagacactaactaaacaggacgaaaatgatgatgacgatgactggaacccctgcaaagcagcaggggtgtgcctcatgcttctggccacctgctgtgaagatgacattgtcccacatgtcctccccttcattaaagaacacatcaagaacccagattggcggtaccgggatgcagcagtgatggcttttggttgtatcttggaaggaccagagcccagtcagctcaaaccactagttatacaggctatgcccaccctaatagaattaatgaaagaccccagtgtagttgttcgagatacagctgcatggactgtaggcagaatttgtgagctgcttcctgaagctgccatcaatgatgtctacttggctcccctgctacagtgtctgattgagggtctcagtgctgaacccagagtggcttcaaatgtgtgctgggctttctccagtctggctgaagctgcttatgaagctgcagacgttgctgatgatcaggaagaaccagctacttactgcttatcttcttcatttgaactcatagttcagaagctcctagagactacagacagacctgatggacaccagaacaacctgaggagttctgcatatgaatctctgatggaaattgtgaaaaacagtgccaaggattgttatcctgctgtccagaaaacgactttggtcatcatggaacgactgcaacaggttcttcagatggagtcacatatccagagcacatccgatagaatccagttcaatgaccttcagtctttactctgtgcaactcttcagaatgttcttcggaaagtgcaacatcaagatgctttgcagatctctgatgtggttatggcctccctgttaaggatgttccaaagcacagctgggtctgggggagtacaagaggatgccctgatggcagttagcacactggtggaagtgttgggtggtgaattcctcaagtacatggaggcctttaaacccttcctgggcattggattaaaaaattatgctgaataccaggtttgtttggcagctgtgggcttagtgggagacttgtgccgtgccctgcaatccaacatcatacctttctgtgacgaggtgatgcagctgcttctggaaaatttggggaatgagaacgtccacaggtctgtgaagccgcagattctgtcagtgtttggtgatattgcccttgctattggaggagagtttaaaaaatacttagaggttgtattgaatactcttcagcaggcctcccaagcccaggtggacaagtcagactatgacatggtggattatctgaatgagctaagggaaagctgcttggaagcctatactggaatcgtccagggattaaagggggatcaggagaacgtacacccggatgtgatgctggtacaacccagagtagaatttattctgtctttcattgaccacattgctggagatgaggatcacacagatggagtagtagcttgtgctgctggactaataggggacttatgtacagcatttgggaaggatgtactgaaattagtagaagctaggccaatgatccatgaattgttaactgaagggcggagatcgaagactaacaaagcaaaaacccttgctacatgggcaacaaaagaactgaggaaactgaagaaccaagcttgatctgttaccattgggatgataacctgaggacccccactggaaatctcccatcttttgaaaaacctggaagtgaggagtgtgcacggatgctgaatgtttgggaatgagaggatgagtgagtgaggcttgaaaacacaccacattgaaaatcctgccacagcagcagccgcagccgccaacagcagcgctgttagtgagctaagtaagcactgacttcgtagaaaaccataacatcggccatcttggaaaagagaaaaacaatggagttacttatttaaaaaaaaagaaagaaagttatctcttcccaggagaggctagaagtagcttttctgtcttttggccagtgccgagtggaatgcctggtttgggggaggaggagggactgggttcagctgtggtgctttgttgtaaaaggcagcctggcctttgctactgaggagaaagatggagcctgggtctcaagcccaccttcgctgtacctttgccacatggtactgtatgcttgccagctagaaggagggtcagggattttttacagtctgagaatgagtgtgtgtgagtgaggcggtatccacattttcaacttcaagtcattgcagtttctttttcccagaaaacaaggggttagatgttgcatttcataaaactaaccgaagttttgtttactgatgcagcacaagagatgtaaaaaaaaaaaaaaaaaaaaaaaaaaaaacacacacacagaggaaagacgctctttaggttttgttttgttttttttttttggttttgttttttgttttttttactctagggaaaacactgacgaatggtcagagctcctatcctgatcttttcatcaaggcgcctttcctaataatatggttcaactgtgaatgtagaagtgggggggaggggggagaaaaagaaaactctggcgttagaggatatagaaaaatataagtacaattgttacaaataacgcagacttcaaaaacaaaaaaatcacaacccaaacaaaccaaaatttaaatgatcagaattggcagcacaaagaaaacgccctctcctgacttgtattgtggcagtctgaacgcccccagaaaattgtgccaaagagtttagaaaaataaatatacaataaaagtaaacacatacacacaaaacagcaaacttcaggtaactattttggattgcaaacaggataaattaaatgttcaaacaatctgataaaataaccatttgg

SEQ ID NO: 15132 - DNA, 3168 bp, Homo sapiens
  source 1..3168: mol_type = unassigned DNA
gttgccgggcacctcccgccttcccgcgccccgaccccgaactcctctccttagttctcccgggcaccctatcctatcaacgcctactatcccagccaatcgcgcaggatccgagtcgtgcctccggtccaccctcctcccagcgctcagccggtctgagctcaaggcctttaccaagcccacccaatcaacggcgggctctctcctaccccatcccaatctccctcccctcggccaatccgcgcgctccattccgctgcccgcccagccaacccgggccttgaaaccagcaggcgaatgggcgcgagacggcccttcgacgctgagcgcctggccagttagggattccgcgtggccaggacaacggccaatcgtcgtggagcgcggcgcctccgcggagagcccactttccttgtggaactgtccagagtgctggcaaatccaggaaacagtcaggttgccagagttgcagctggtctacaaatcaagaactctttgacatctaaagatccagatatcaaggcacaatatcagcagaggtggcttgctattgatgctaatgctcgacgagaagtcaagaactatgttttgcagacattgggtacagaaacttaccggcctagttctgcctcacagtgtgtggctggtattgcttgtgcagagatcccagtaaaccagtggccagaactcattcctcagctggtggccaatgtcacaaaccccaacagcacagagcacatgaaggagtcgacattggaagccatcggttatatttgccaagatatagacccagagcagctacaagataaatccaatgagattctgactgccataatccaggggatgaggaaagaagagcctagtaataatgtgaagctagctgctacgaatgcactcctgaactcattggagttcaccaaagcaaactttgataaagagtctgaaaggcactttattatgcaggtggtctgtgaagccacacagtgtccagatacgagggtacgagtggctgctttacagaatctggtgaagataatgtccttatattatcagtacatggagacatatatgggtcctgctctttttgcaatcacaatcgaagcaatgaaaagtgacattgatgaggtggctttacaagggatagaattctggtccaatgtctgtgatgaggaaatggatttggccattgaagcttcagaggcagcagaacaaggacggccccctgagcacaccagcaagttttatgcgaagggagcactacagtatctggttccaatcctcacacagacactaactaaacaggacgaaaatgatgatgacgatgactggaacccctgcaaagcagcaggggtgtgcctcatgcttctggccacctgctgtgaagatgacattgtcccacatgtcctccccttcattaaagaacacatcaagaacccagattggcggtaccgggatgcagcagtgatggcttttggttgtatcttggaaggaccagagcccagtcagctcaaaccactagttatacaggctatgcccaccctaatagaattaatgaaagaccccagtgtagttgttcgagatacagctgcatggactgtaggcagaatttgtgagctgcttcctgaagctgccatcaatgatgtctacttggctcccctgctacagtgtctgattgagggtctcagtgctgaacccagagtggcttcaaatgtgtgctgggctttctccagtctggctgaagctgcttatgaagctgcagacgttgctgatgatcaggaagaaccagctacttactgcttatcttcttcatttgaactcatagttcagaagctcctagagactacagacagacctgatggacaccagaacaacctgaggagttctgcatatgaatctctgatggaaattgtgaaaaacagtgccaaggattgttatcctgctgtccagaaaacgactttggtcatcatggaacgactgcaacaggttcttcagatggagtcacatatccagagcacatccgatagaatccagttcaatgaccttcagtctttactctgtgcaactcttcagaatgttcttcggaaagtgcaacatcaagatgctttgcagatctctgatgtggttatggcctccctgttaaggatgttccaaagcacagctgggtctgggggagtacaagaggatgccctgatggcagttagcacactggtggaagtgttgggtggtgaattcctcaagtacatggaggcctttaaacccttcctgggcattggattaaaaaattatgctgaataccaggtttgtttggcagctgtgggcttagtgggagacttgtgccgtgccctgcaatccaacatcatacctttctgtgacgaggtgatgcagctgcttctggaaaatttggggaatgagaacgtccacaggtctgtgaagccgcagattctgtcagtgtttggtgatattgcccttgctattggaggagagtttaaaaaatacttagaggttgtattgaatactcttcagcaggcctcccaagcccaggtggacaagtcagactatgacatggtggattatctgaatgagctaagggaaagctgcttggaagcctatactggaatcgtccagggattaaagggggatcaggagaacgtacacccggatgtgatgctggtacaacccagagtagaatttattctgtctttcattgaccacattgctggagatgaggatcacacagatggagtagtagcttgtgctgctggactaataggggacttatgtacagcatttgggaaggatgtactgaaattagtagaagctaggccaatgatccatgaattgttaactgaagggcggagatcgaagactaacaaagcaaaaacccttgctacatgggcaacaaaagaactgaggaaactgaagaaccaagcttgatctgttaccattgggatgataacctgaggacccccactggaaatctcccatcttttgaaaaacctggaagtgaggagtgtgcacggatgctgaatgtttgggaatgagaggatgagtgagtgaggcttgaaaacacaccacattgaaaatcctgccacagcagcagccgcagccgccaacagcagcgctgttagtgagctaagtaagcactgacttcataaaataaccatttgg

SEQ ID NO: 15133 - DNA, 2347 bp, Homo sapiens
  source 1..2347: mol_type = unassigned DNA
tgcttgtgcagagatcccagtaaaccagtggccagaactcattcctcagctggtggccaatgtcacaaaccccaacagcacagagcacatgaaggagtcgacattggaagccatcggttatatttgccaagatatagacccagagcagctacaagataaatccaatgagattctgactgccataatccaggggatgaggaaagaagagcctagtaataatgtgaagctagctgctacgaatgcactcctgaactcattggagttcaccaaagcaaactttgataaagagtctgaaaggcactttattatgcaggtggtctgtgaagccacacagtgtccagatacgagggtacgagtggctgctttacagaatctggtgaagataatgtccttatattatcagtacatggagacatatatgggtcctgctctttttgcagacgaaaatgatgatgacgatgactggaacccctgcaaagcagcaggggtgtgcctcatgcttctggccacctgctgtgaagatgacattgtcccacatgtcctccccttcattaaagaacacatcaagaacccagattggcggtaccgggatgcagcagtgatggcttttggttgtatcttggaaggaccagagcccagtcagctcaaaccactagttatacaggctatgcccaccctaatagaattaatgaaagaccccagtgtagttgttcgagatacagctgcatggactgtaggcagaatttgtgagctgcttcctgaagctgccatcaatgatgtctacttggctcccctgctacagtgtctgattgagggtctcagtgctgaacccagagtggcttcaaatgtgtgctgggctttctccagtctggctgaagctgcttatgaagctgcagacgttgctgatgatcaggaagaaccagctacttactgcttatcttcttcatttgaactcatagttcagaagctcctagagactacagacagacctgatggacaccagaacaacctgaggagttctgcatatgaatctctgatggaaattgtgaaaaacagtgccaaggattgttatcctgctgtccagaaaacgactttggtcatcatggaacgactgcaacaggttcttcagatggagtcacatatccagagcacatccgatagaatccagttcaatgaccttcagtctttactctgtgcaactcttcagaatgttcttcggaaagtgcaacatcaagatgctttgcagatctctgatgtggttatggcctccctgttaaggatgttccaaagcacagctgggtctgggggagtacaagaggatgccctgatggcagttagcacactggtggaagtgttgggtggtgaattcctcaagtacatggaggcctttaaacccttcctgggcattggattaaaaaattatgctgaataccaggtttgtttggcagctgtgggcttagtgggagacttgtgccgtgccctgcaatccaacatcatacctttctgtgacgaggtgatgcagctgcttctggaaaatttggggaatgagaacgtccacaggtctgtgaagccgcagattctgtcagtgtttggtgatattgcccttgctattggaggagagtttaaaaaatacttagaggttgtattgaatactcttcagcaggcctcccaagcccaggtggacaagtcagactatgacatggtggattatctgaatgagctaagggaaagctgcttggaagcctatactggaatcgtccagggattaaagggggatcaggagaacgtacacccggatgtgatgctggtacaacccagagtagaatttattctgtctttcattgaccacattgctggagatgaggatcacacagatggagtagtagcttgtgctgctggactaataggggacttatgtacagcatttgggaaggatgtactgaaattagtagaagctaggccaatgatccatgaattgttaactgaagggcggagatcgaagactaacaaagcaaaaacccttgctacatgggcaacaaaagaactgaggaaactgaagaaccaagcttgatctgttaccattgggatgataacctgaggacccccactggaaatctcccatcttttgaaaaacctggaagtgaggagtgtgcacggatgctgaatgtttgggaatgagaggatgagtgagtgaggcttgaaaacacaccacattgaaaatcctgccacagcagcagccgcagccgccaacagcagcgctgttagtgagctaagtaagcactgacttcgtagaaaaccataacatcggccatcttggaaaagagaaaaacaatggagttacttattt

SEQ ID NO: 15134 - DNA, 2989 bp, Homo sapiens
  source 1..2989: mol_type = unassigned DNA
atttaaggggtccggagaaaatgaagctaagtccgctagagactggtcctttgtataaaaatgtgggatggattggttgaaacagcctagatgccagttaagtttctctttggtgtccatctcctgttgggggatggggtcagagggaaggattggatgatgcttgacatctttgagaaagcccactttccttgtggaactgtccagagtgctggcaaatccaggaaacagtcaggttgccagagttgcagctggtctacaaatcaagaactctttgacatctaaagatccagatatcaaggcacaatatcagcagaggtggcttgctattgatgctaatgctcgacgagaagtcaagaactatgttttgcagacattgggtacagaaacttaccggcctagttctgcctcacagtgtgtggctggtattgcttgtgcagagatcccagtaaaccagtggccagaactcattcctcagctggtggccaatgtcacaaaccccaacagcacagagcacatgaaggagtcgacattggaagccatcggttatatttgccaagatatagacccagagcagctacaagataaatccaatgagattctgactgccataatccaggggatgaggaaagaagagcctagtaataatgtgaagctagctgctacgaatgcactcctgaactcattggagttcaccaaagcaaactttgataaagagtctgaaaggcactttattatgcaggtggtctgtgaagccacacagtgtccagatacgagggtacgagtggctgctttacagaatctggtgaagataatgtccttatattatcagtacatggagacatatatgggtcctgctctttttgcaatcacaatcgaagcaatgaaaagtgacattgatgaggtggctttacaagggatagaattctggtccaatgtctgtgatgaggaaatggatttggccattgaagcttcagaggcagcagaacaaggacggccccctgagcacaccagcaagttttatgcgaagggagcactacagtatctggttccaatcctcacacagacactaactaaacaggacgaaaatgatgatgacgatgactggaacccctgcaaagcagcaggggtgtgcctcatgcttctggccacctgctgtgaagatgacattgtcccacatgtcctccccttcattaaagaacacatcaagaacccagattggcggtaccgggatgcagcagtgatggcttttggttgtatcttggaaggaccagagcccagtcagctcaaaccactagttatacaggctatgcccaccctaatagaattaatgaaagaccccagtgtagttgttcgagatacagctgcatggactgtaggcagaatttgtgagctgcttcctgaagctgccatcaatgatgtctacttggctcccctgctacagtgtctgattgagggtctcagtgctgaacccagagtggcttcaaatgtgtgctgggctttctccagtctggctgaagctgcttatgaagctgcagacgttgctgatgatcaggaagaaccagctacttactgcttatcttcttcatttgaactcatagttcagaagctcctagagactacagacagacctgatggacaccagaacaacctgaggagttctgcatatgaatctctgatggaaattgtgaaaaacagtgccaaggattgttatcctgctgtccagaaaacgactttggtcatcatggaacgactgcaacaggttcttcagatggagtcacatatccagagcacatccgatagaatccagttcaatgaccttcagtctttactctgtgcaactcttcagaatgttcttcggaaagtgcaacatcaagatgctttgcagatctctgatgtggttatggcctccctgttaaggatgttccaaagcacagctgggtctgggggagtacaagaggatgccctgatggcagttagcacactggtggaagtgttgggtggtgaattcctcaagtacatggaggcctttaaacccttcctgggcattggattaaaaaattatgctgaataccaggtttgtttggcagctgtgggcttagtgggagacttgtgccgtgccctgcaatccaacatcatacctttctgtgacgaggtgatgcagctgcttctggaaaatttggggaatgagaacgtccacaggtctgtgaagccgcagattctgtcagtgtttggtgatattgcccttgctattggaggagagtttaaaaaatacttagaggttgtattgaatactcttcagcaggcctcccaagcccaggtggacaagtcagactatgacatggtggattatctgaatgagctaagggaaagctgcttggaagcctatactggaatcgtccagggattaaagggggatcaggagaacgtacacccggatgtgatgctggtacaacccagagtagaatttattctgtctttcattgaccacattgctggagatgaggatcacacagatggagtagtagcttgtgctgctggactaataggggacttatgtacagcatttgggaaggatgtactgaaattagtagaagctaggccaatgatccatgaattgttaactgaagggcggagatcgaagactaacaaagcaaaaacccttgctacatgggcaacaaaagaactgaggaaactgaagaaccaagcttgatctgttaccattgggatgataacctgaggacccccactggaaatctcccatcttttgaaaaacctggaagtgaggagtgtgcacggatgctgaatgtttgggaatgagaggatgagtgagtgaggcttgaaaacacaccacattgaaaatcctgccacagcagcagccgcagccgccaacagcagcgctgttagtgagctaagtaagcactgacttcgtagaaaaccataacatcggccatcttggaaaagagaaaaacaatggagttacttattt

SEQ ID NO: 15135 - DNA, 6830 bp, Homo sapiens
  source 1..6830: mol_type = unassigned DNA
gccggctgagctgagtctcgctgctcggtgcgaggcggcggagagcgaggcctggtgagcaccgccgaggcgcgggccagctcttcgaggttgtgcgcgggagtggcacggcgggcgggcgagcgaggggctaacttcagcggtggcaccgggatcggttgccttgagcctgaaatcatgaccaccccaggaaaagagaactttcgcctgaaaagttacaagaacaaatctctgaatcccgatgagatgcgcaggaggagggaggaagaaggactgcagttacgaaagcagaaaagagaagagcagttattcaagcggagaaatgttgctacagcagaagaagaaacagaagaagaagttatgtcagatggaggctttcatgaggctcagattagtaacatggagatggcaccaggtggtgtcatcacttctgacatgattgaaatgatattttccaaaagcccagagcaacagctttcagcaacacagaaattcaggaagctgctttcaaaagaacctaaccctcctattgatgaagttatcagcacaccaggagtagtggccaggtttgtggagttcctcaaacgaaaagagaattgtacactgcagtttgaatcagcttgggtactgacaaatattgcttcaggaaattctcttcagacccgaattgtgattcaggcaggagctgtgcccatcttcatagagttgctcagctcagagtttgaagatgtccaggaacaggcagtctgggctcttggcaacattgctggagatagtaccatgtgcagggactatgtcttagactgcaatatccttccccctcttttgcagttattttcaaagcaaaaccgcctgaccatgacccggaatgcagtatgggctttgtctaatctctgtagagggaaaagtccacctccagaatttgcaaaggtttctccatgtctgaatgtgctttcctggttgctgtttgtcagtgacactgatgtactggctgatgcctgctgggccctctcatatctatcagatggacccaatgataaaattcaagcggtcatcgatgcgggagtatgtaggagacttgtggaactgctgatgcataatgattataaagtggtttctcctgctttgcgagctgtgggaaacattgtcacaggggatgatattcagacacaggtaattctgaattgctcagctctgcagagtttattgcatttgctgagtagcccaaaggaatctatcaaaaaggaagcatgttggacgatatctaatattacagctggaaatagggcacagatccagactgtgatagatgccaacattttcccagccctcattagtattttacaaactgctgaatttcggacaagaaaagaagcagcttgggccatcacaaatgcaacttctggaggatcagctgaacagatcaagtacctagtagaactgggttgtatcaagccgctctgtgatctcctcacggtcatggactctaagattgtacaggttgccctaaatggcttggaaaatatcctgaggcttggagaacaggaagccaaaaggaatggcactggcattaacccttactgtgctttgattgaagaagcttatggtctggataaaattgagttcttacagagtcatgaaaaccaggagatctaccaaaaggcctttgatcttattgagcattacttcgggaccgaagatgaagacagcagcattgcaccccaggttgaccttaaccagcagcagtacatcttccaacagtgtgaggctcctatggaaggtttccagctttgaagcaatactctgctttcacgtacctgtgtcagaccaggctacccagtcgagtcctcttgtggagcccacagtcctcatggagctaacttctcaaatgttttccataatactgtttgcgctcatttgcttgccttgcgcacctgctctcttacacacatctggaaaacctccggctctctgtggtggaatacccttctaataaaagggtaaccagaacggcccactctcttttacggaaaaatccctaggctttggagatccgcacttacattagagttatgggaatatacacatattaatgtggctccctttttcttgtgggggaataaaagaggactcctcctcattccctttaacatgggggaaaaaactgacattaaaagatgagactaaatctttatcttgaattttacacaactacttacgacaagggagatgtttagacctgttgtgtatacttcagagtacttttcatgagttcttccacagtgaacccttggattacctggtggctttttctagccagatttgcattaatccttactgagattggatggttttctttcctctattggcgccattcttcagatattaaagttaaaccatccactccctcaccttcagccttcagtgaatgtgctttctagttgtcaggaatgctgaagaattaacactttgactcctaaatgtgatactggtttgtagattcccttagagcagaaaggagaggggcacatattaatttgtatcgcttttgcttctctttggtcttttgtgtcttagaatttggaagtggttcatttctgttgctggtatgaggatttcgaatacttagtaatcgaaaaccatatcctgtaatttaataaaaaaaactaaggacgaaaaaaccctccaattttcccaaatgcaatcagtgtaactaggggctgtgtttctgcattaaaataaatgtttcaggctttgtggtcctgatcaaggtcctcattaaaaaattggagttcaccctaggtgcttttcccctctgtgactggcagataacacatacttttgaaagtaactttgggatttttttcttaggtgcagctcgattctaatcttttcatgctgcacacgattcctttaatgtagcatccttatctgaaagaaataaccatcttctcaacatgacctgcttaacccaaataagaacagtgatcttataacctcattgtttcctaatcattttatttcatctcctgctagtactgtgccgcttccccctccccccacacaaaataaaaacagtatctgccttctggctcatttaatgatgactgcaatctgtacctgcaaatggcgcttccagtactgtgttcagtgatccacatttgtgcttggactggaatgaaaaaatacgcttaattgccaagacaactgcaaatgagttcaatacgacttctcggtgctagttggccatcttgactcaatgttgggatacactaccagagaagatttttttgttgatgtgctgttcaaagtgaattctgaaggaaaaggttgctcacctctgtttcagagcatacccttttaaacctttttagacttgtcctcttctagaattcattataaccccaaagtgtaaaaactatttggaagttgcccctgacaagctattatacatctctggtaaatcctgctgaatgtaagggatattcagagcttttcatacctcatcatgatgttatttaagcagccaacttatgtgacctgatttaaacttttaaaaaatccacttcattcaaactagaaagagtcaaagacaaaggacatttatcagccaagagtgtgacgcattcttcgcatctagtctgtagtagtgtctgtgctctgggatggataccgtctgatgtctgtttgttattgatggcgcagccactgcaaaactagtcaactcccatctataactgttactttttctagtgctgctttgtgctgagagaacattttagtttactgcacttgacctgtaaaagactgattctttgtaattttagggataaattaggtggttaatttaaagaagaaatttcaatgttgcctttacatcacattaaaatataacttctttcagaaggataatagaagcactgattcatagtaaaaatcttgtttttagctttgacttttttgtggctgttttttaaaattgtaaattactagtaacatgtcatttctataggatgttttaaattatgtaccttccattggatagttaaaataatttcattttataagccaatttgagtgggaaagatacaaagcacacagttgtctccccacattaggaagagtagtgtgcattcagacattcggaatttttgctagtagttggagatgtttcagtgagtgaattaaaacaaagtctatttaactgacgtgatctattttgtgtctaaaacagaggaatttatcttgtcctagaagttcatgaactataagatctaagtttttttttcttttttaacaataaaatgattttttcttaaagtatcaaagttggaattggctaaaagtgaagtagcataactcagatatgttggaacttggtactgaagcaggctttttggtaacagaaatgacattttaaggggtaactgtatatcctgtttttagttctttgcctctcagattctgttaacttagtttaaattcactgaataccctaccactaaggcgttgctcattacaaaagcatgttaatttcaatacaggaaaactcttttgtagttttatatatggattggggaaagtgactttgttttacttttcctttttattcccctccatcctccaaacttccaatctatattatttgtaatgagaactttggtgggggaaaaaaagcattaagagaattttggatgtaaaggcatctggtatctgatggaccagcaggtagatgtggttggattgagaaattttgggtaaggtagatgatagaagaaagagattttaggagacacagttctctgtggaacactttctttcatgttcctgtaactaattgatcaagacccttttaaacgcttatctttgtcagttccgcttttgaaaaaactattgccctaggattgtttcttccatatgacagatgaaggttattggctctgagtcatttttggcattatcgtcacagataaaaagattggcaattaatctcataaaaaatctgaattattccagattgctgccgatttttgcctaagaaacaatatgtaagtatattttataaaccaaactttgtcaaccaattctattgtacgtctacccacaggcaactttgaatttacttctctagtgctaaataaacatttcagcgatttaatcccccaacttgggggatgcattatgaaaaggttttcctggagtcaaggggtttttctttctcgctagttttgtgaaaatttttatatcaataggcaaatcattataactttttaggggttgatggtttttaagtatattggaaattgtggtgtctaaggatgatgttcagtgaagaaaagggatccacttttagaaaccagcattgtttgctttcaactttcatactgtatgctaactcctacgttccaaaatgtgctcatttgcagacacaggtatgcctatatacatggaagtctcaaatctgaatttttatccatctcaatatgaccatttctctctgttgtgagctgaacagattaagtatatatctgccaggttgggaaatattttggtctatcttttcctgtcatcagaacttaatttaaaaaaattatcaaaggtcagatgtgactactacagtaagttggctatcataaagaatattccataaaatgttttatctgccatacaaaattactgggtttatggccggatgtggtggctcatgcctgtaatcccagcagttcaggattacaggttatatacaggttataacaatggataccaggacatcagaatatctgataaagcaaatatttatatgctaatttaaaatatcaaattgctactggacataaaatacatctggaagcttggggtaagaagaaagaaaagaagtgttccgttctgttttcaactaagggtaaacgaagtcccagagtgttttccctgtaggtcaaattaaggtaacatgtctttatttgatcatctattgtacaccagatacctggctaagggctttccttttttctcatgtagtcttccaaatgttctttgataattgtcactatattatagatgacaaagtgaagacttacgagaaattactttgccccaaggttacaacacttagatggctgtccaagggcggggaagagccctgcaaattctgtgtcttgaagaaagcagtggccacgcagtagttccgtgcccaggatctcccagaactagacttggcaaccacagctgggccagccttttttgttagaccattcttcctgactcctgcttaccatcagcacccttaaaatgacgaaatcaggcttaagttgcttttaggttacacagactggagtgtaggccctctcaggccaaacatctttcctcttctgtggtgctaaaattctgtatgaccagacaagtatggtaataggttttttttttttttttttttgtgcaaatgattttgtgtttagtaaaataatggctaaacacatggatccattcaaacgcacaaatgtggaaagtattgacacggaaggaaaggctttgaagaattactgcctcaggaagcagtgccatggatgcgaatttaacacagtctacttcttcctaaaggaatatcatcccaaggaatgtcaaaaattaaaatcaccttttaatgtactggttgttgagtgtttctgctttacctcaagtcattctgaccactctacatcctgcttcaaagtgttctgacacttagatttggaatggctctaatgattctttgtacttgaatgtggtctgtcaggccatgggtgagtgccttgcacatagtagacattcaataaatactaaatgaaggaata

SEQ ID NO: 15136 - DNA, 1062 bp, Homo sapiens
  source 1..1062: mol_type = unassigned DNA
gcaggcgcactgcgaacgccggctgagctgagtctcgctgctcggtgcgaggcggcggagagcgaggcctgaaatcatgaccaccccaggaaaagagaactttcgcctgaaaagttacaagaacaaatctctgaatcccgatgagatgcgcaggaggagggaggaagaaggactgcagttacgaaagcagaaaagagaagagcagttattcaagcggagaaatgttgctacagcagaagaagaaacagaagaagaagttatgtcagatggaggctttcatgaggctcagattagtaacatggagatggcaccaggtggtgtcatcacttctgacatgattgaaatgatattttccaaaagcccagagcaacagctttcagcaacacagaaattcaggaagctgctttcaaaagaacctaaccctcctattgatgaagttatcagcacaccaggagtagtggccaggtttgtggagttcctcaaacgaaaagagaattgtacactgcagtttgaatcagcttgggtactgacaaatattgcttcaggaaattctcttcagacccgaattgtgattcaggcaggagctgtgcccatcttcatagagttgctcagctcagagtttgaagatgtccaggaacaggcagtctgggctcttggcaacattgctggagatagtaccatgtgcagggactatgtcttagactgcaatatccttccccctcttttgcagttattttcaaagcaaaaccgcctgaccatgacccggaatgcagtatgggctttgtctaatctctgtagagggaaaagtccacctccagaatttgcaaaggtttctccatgtctgaatgtgctttcctggttgctgtttgtcagtgacactgatgtactggctgatgcctgctgggccctctcatatctatcagatggacccaatgataaaattcaagcggtcatcgatgcgggagtatgtaggagacttgtggaactgctgatgcataatgattataaagtggtttctcctgctttgcgagctgtgggaaacattgtcacaggggatgatat

SEQ ID NO: 15137 - DNA, 727 bp, Homo sapiens
  source 1..727: mol_type = unassigned DNA
ggagccctggtgtgatcgccatcgggaacgccggtcgaggctaggcggggcggggcggcgtggcgcggcggcggggctaaatcatgaccaccccaggaaaagagaactttcgcctgaaaagttacaagaacaaatctctgaatcccgatgagatgcgcaggaggagggaggaagaaggactgcagttacgaaagcagaaaagagaagagcagttattcaagcggagaaatgttgctacagcagaagaagaaacagaagaagaagttatgtcagatggaggctttcatgaggctcagattagtaacatggagatggcaccaggtggtgtcatcacttctgacatgattgaaatgatattttccaaaagcccagagcaacagctttcagcaacacagaaattcaggaagctgctttcaaaagaacctaaccctcctattgatgaagttatcagcacaccaggagtagtggccaggtttgtggagttcctcaaacgaaaagagaattgtacactgcagtttgaatcagcttgggtactgacaaatattgcttcaggaaattctcttcagacccgaattgtgattcaggcaggagctgtgcccatcttcatagagttgctcagctcagagtttgaagatgtccaggaacaggcagtctgggctcttggcaacattgctggagatagtaccatgtgcagggactatgtcttagactgcaatatccttccccc

SEQ ID NO: 15138 - DNA, 596 bp, Homo sapiens
  source 1..596: mol_type = unassigned DNA
gctcggtgcgaggcggcggagagcgaggcctggtgagcaccgccgaggcgcgggccagctcttcgagaaatcatgaccaccccaggaaaagagaactttcgcctgaaaagttacaagaacaaatctctgaatcccgatgagatgcgcaggaggagggaggaagaaggactgcagttacgaaagcagaaaagagaagagcagttattcaagcggagaaatgttgctacagcagaagaagaaacagaagaagaagttatgtcagatggaggctttcatgaggctcagattagtaacatggagatggcaccaggtggtgtcatcacttctgacatgattgaaatgatattttccaaaagcccagagcaacagctttcagcaacacagaaattcaggaagctgctttcaaaagaacctaaccctcctattgatgaagttatcagcacaccaggagtagtggccaggtttgtggagttcctcaaacgaaaagagaattgtacactgcagtttgaatcagcttgggtactgacaaatattgcttcaggaaattctcttcagacccgaattgtgattcaggcaggagctgtgcccatcttcat

SEQ ID NO: 15139 - DNA, 4470 bp, Homo sapiens
  source 1..4470: mol_type = unassigned DNA
gccccgcgcctgaggggcagtaaaagtcgccaggtccggctccatttctggcacaaaacttgcagcaccgaggggttgtggagagcccttgcaggggaagagggcagggtcatcccgagaaccaacgggcacgtatagcccggcgaacgcccaagccggtcaccgcccccggtcacgtgtcgccagcctccgcggccgcgcgccgctctcagcaccgttcccgccccacccggcccggcagtcggcccgcgcctcccccggcgctactgccacctcgcgctcggaggcgtcacagaacgtgctcttctctcccctcccccctcccgctctccccctcctccccctcccgctccaagattcgccgccgccgccgccgcagccgcaggagtagccgccgccggagccgcgcgcagccatggccgagaaccccagcttggagaaccaccgcatcaagagcttcaagaacaagggccgcgatgtggaaacaatgcgaagacatagaaatgaagtgacagtggaactgcggaagaacaaaagagatgaacacttattgaaaaagagaaatgttccccaagaagaaagtctagaagattcagatgttgatgctgattttaaagcacaaaatgtaaccctagaagctatattgcagaatgccacaagtgataacccagtggtccaattgagtgctgtccaggcagcaagaaaactgttatccagtgacagaaatccaccgattgatgacttaataaaatctgggattttaccaattctagtcaaatgtctagaaagggatgataatccttcattacagtttgaagctgcttgggcattaactaacatagcatcaggaacttctgcacagactcaagctgttgtgcagtctaatgcagtacctctttttctgagacttcttcgttcaccacatcagaatgtttgtgaacaagcagtatgggctttgggaaacattataggtgatggtcctcaatgtagagattatgtcatatcactgggagttgtcaaacctcttctgtccttcatcagtccctccatccccatcaccttccttcggaacgtcacatgggtcattgtcaatctctgcaggaataaggatcccccgccgcctatggagacagttcaggagattttgccagctttatgtgtcctcatataccatacagatataaacattcttgtagacactgtttgggctctgtcatacttgacagatggaggtaatgaacagatacagatggttattgattcaggagttgtgccctttcttgtgccccttctgagccatcaggaagtcaaagttcaaacagcagccctcagagcagttggcaacatagtgactggcaccgacgagcagacccaggttgttctcaattgtgatgtcctgtcacacttcccaaatctcttatcacacccaaaagagaagataaataaggaagcagtgtggttcctttccaacataacagcaggcaaccagcaacaagttcaagctgtaatagatgctggattaattcctatgataattcatcagcttgctaagggggactttggaacacaaaaagaagctgcttgggcaatcagcaacttaacaataagtggcagaaaagatcaggttgagtaccttgtacagcagaatgtaataccaccgttctgtaatttactgtcagtgaaagattctcaagtggttcaggtggttctagatggtctaaaaaacattctgataatggccggtgatgaagcaagcacaatagctgaaataatagaggaatgtggaggtttggagaaaattgaagttttacagcaacatgaaaatgaagacatatataaattagcatttgaaatcatagatcagtatttctctggtgatgatattgatgaagatccctgcctcattcctgaagcaacacaaggaggtacctacaattttgatccaacagccaaccttcaaacaaaagaatttaatttttaaattcagttgagtgcagcatctttcccacattcaatatgaagcaccaccagatggctaccaaatgataagaacaacagcaacaaaaggctccaaaacacacatgcctctttgttttgatgcttctaaagcaagccatgtctcagtcactttgcagttgccaaaagtcactatcacatggactgtaaatgcatatgcatgatttcctaaactgttttagaactctccttaacaatctcaactaccctatttttccctgttccctggtgccacaggctgacaactgcagtctccagtttagaataaatattccatagtggtgacatgtcagctgcccactgatactcctttggaaaatggtgcgctgtggatcaagacactttggtatgatgcatatacaagttggaagactaaagaggtgcagtgtgatctgagcctccatcattgtcctccacaaacatattttcatattctttatgtggaagaatagattttaaagtacaagccaaatgattttcattggtggaactgacacaaaaaaagtaacttaaaaacaagaaacttggttattgaataaacagataagtttaaaaaaaaaaaaaaactacttcatctaccagtaattgatgtgtttattatctgcctcagaagccagggttggaggaagaactttagatatggatattaatgcttttgccattatacctaatttttgagaacagcaagccctatttgaccactctcttcagcctgtgtgttcctgctgttttgaagtaatcaaatgctgtgcatggtattttacctgagctgcaacctgttatggacttgaacttctgtttaagttgaaagcaagagtccctgagtataaaggaaaaacagcaaaacaaaaagcaaacaaaaaaaaactgcaaaagtctaaaatacccattggtgatgttttttaaaaaaatcttgctttcagctttcaggagttaatattctttgttttaatttgataattggatatggttgatttatattgggtttaaactgtggagctttcatgtttactgtaatttagtcttaaaatattttttacttagtaaccagtgcttttgataatgtggttggcaacaaaccagcaactatttagaagtgtcataagagttcattctttgagtattgggaaagttaattcagatcctactcaaaaagcatcttcacatattaaaagattcagacagggatctgtgtagaggagtaatttgcagttatttaacataaacctgatttgcagtgatctctaagtaattctgcaaaatccggtattactatgtcaagttattgcttttggtaaattgtctgacccagttattaatgaaagaatatggatttaaaaatttttaaactaaataatttgtgctgtcacagaaatggtattgttgctcttgtttactgggtataatttcccaatgcattgatgtgaagggatagaaaatctaaactaatttagttatccattggggggtgtatttactgtgatgaagatgagacagatgccatcagagctttgtgaatcagctggggtgttttcactgataaacaacacatagcaggtgtgcattcattacaaatatatgtatctgccaaggtggagccactttaaagagtgagttttgtcttgtatctaaagtggatacaagcgtatgtttaaactgcaagatttttacttgctagagaatctgttttaatatagtggtttggcctctgattatttataggttttataaattttagaatcaatttctctttaaggtggctcagatttttcaactcttgtgcacataaaattgagttgaagttcattgtgcctttttttctttatccaaattttgagttaaagcttcatatggtaactgcatcctgttcggacactatagtctaaatttttgaaactgtgtggtgttcgctaaaagtaggaataacaacgtaaaagctaattaaggtcacaaacttcggtgaaacccttaaaagtccaaatcttcttgatattgtgaaccgtaccccttccagtttagtttcttctggactttccttacttaactgacagttaccttttaaaatttgcacacattatgattaaaattgggcctctactgtgatgattcctatttcctctcatgttttaaagtgcaaactaacatttaagtgaacattagcatcaagtagtgcagacacttgtatgcatttccttgattcaatttgtgaccttaccagttttgaattggaattgcaccatttcgtagataaaggaaactaagtatattgctgcacttttaagttttcaaaacagtgtttaaaaattgcattgttatttttttttaaactcagtttaaaaagactaaaacgttctttcaaaagaggcatctaaatgtgttcctaattttgtatatgggcttaggttttgtaaccaataaaaaaagctgctatcaaatatgataaaacattgaaaa

SEQ ID NO: 15140 - DNA, 8981 bp, Homo sapiens
  source 1..8981: mol_type = unassigned DNA
gcagcgccggggccctcagatcgaggctgcctccccctctcagccggcagcacattccgtcgccttgccgccgcccggccccacagttgtctttgccggagctgcagtcgcgctggggttagggcgggggggcgggcggggagaggagaaggccgcggcggaggcaggtgagaggaggaaggaagcggcggcgcggcgggcacagcagctcaggcggcggcccggttcctgggagtgtcggtgcggcgcgttggttggggcggatcccgcggggcccgggcgggggaaggagtcaccggcccggccatggcggacaacgagaaactggacaaccaacggctcaagaatttcaagaacaaaggccgcgacttggagactatgagaagacaacgaaatgaagttgtagttgaattaaggaagaataaaagagatgaacatctcttaaagagaaggaatgtaccacatgaagatatctgtgaagactctgatatagatggtgattatagagtgcaaaatacctctctagaagctattgttcaaaatgcttcaagtgataaccaaggaattcaattaagtgcagttcaagctgctaggaagcttttgtccagtgatcgaaatccaccaattgatgacttaataaaatctggaatattgcccattttagtccattgtcttgaaagagatgacaatccttctttacagtttgaagctgcatgggctttgacaaacattgcatctggaacttctgaacaaactcaagcagtagttcagtccaatgctgtgccacttttcctgaggcttctccattcaccccatcagaatgtctgtgagcaagcagtgtgggcattgggaaatatcataggtgatgggccccagtgtagagattatgtcataagtcttggagttgtgaaacctttactttccttcataagtccatctattcctataacattcttaagaaatgttacttgggttatggtcaacttatgtcgccacaaagacccaccaccaccaatggaaaccattcaggagattcttccagccctttgtgttttaattcatcacacagatgtaaatatactggtagacacagtctgggccctctcttaccttactgatgctggcaatgaacaaatacagatggtaatagactctggaatagttcctcatttggttcctctgctcagccaccaggaagttaaagttcagactgctgcacttagagctgtgggcaacattgttactggaactgatgagcaaacacaagtagttttgaactgtgatgctctttcacacttcccagcactcctgacacatcccaaagagaaaattaataaagaagcagtgtggttcctctccaacatcactgcaggaaatcagcagcaggtacaggcagtaattgatgccaatcttgtaccaatgataatacaccttttggataagggggattttggcactcaaaaagaagctgcttgggccataagtaacttaacaattagtggaaggaaagatcaagtggcttaccttatccaacaaaatgttatcccacctttttgcaacttgctgactgtaaaagatgcacaagttgtgcaagtagtactcgatggactaagtaatatattaaaaatggctgaagatgaggcagaaaccataggcaatcttatagaagaatgtggagggctggagaaaattgaacaacttcaaaatcatgaaaatgaagacatctacaaattggcctatgagatcattgatcagttcttctcttcagatgatattgatgaagaccctagccttgttccagaggcaattcaaggcggaacatttggtttcaattcatctgccaatgtaccaacagaagggttccagttttagaaagatgttgtggaagttaggtacaatgcagcactgagatatatatatatatatgtgtgtgtgtatatatatatatatatacatatatataaaaaggtttgatccatcaagcttggctcatgggatctgctgctgcattaaatcgggaaagaaaatgtgaagatttcatttggaatcacagaaaatgcccaaatgaggtcaagatggcgagtgggtgcgagtgagaatgagtggcaaaatgtaatgaaaactttacatgaatgcttatttaggttgttcaaagtaaaaagggctacaggtcacagatcgtcagtgcctgagaaagaacattgacttactctatatcaattgaggggaaagtgcagtaccgtcatcttcaagccttgtaagcataaaagagaataggctgcccatataagtcaaaggaaaatgagcccaggccttgctatgaagcagtgtgtgaatggacaatgttgaatgaatgtctggctcagtgatggagagccaggttcatctttgaaatctagggctcttcactcatgaagcagactcctagtcctggagtgactgtgtacgagagcgtggttgtggtgctgtatgtgaacgcatgcaagcttgattcaccttcagggggctgataacctagtaaatcatcaaaatgagatcataagtgttaatgtacactggacatgaaaacaaagactggtttagcagcagacattggtttactctgcagcctgtgttttctgtttccccctttcccacctccttccccccacccaatccttttttttttcttttttgcttttcttttctttttttttagtttttatttactttacctagtatgcctttttttagttgcttctcaagtcagaaaacttttcaggaaggtttccctgtgcatttgcaccagatgaatgtttgatgctatgaaaagctttccatatcatcaaaactaatttgtgtagatttttgcatgaaaaaaatcataaatttccctcaaaatagactgtgttgcagtacacaagttgccataatagtataaaacagtaaaatgtgcttaaaaggccatccttttcattttcagagataacataaagatctttgcatgaggtaaatctacagcatagttcatttttagattttgttgagtcctgtaaagaagaagaagaaaaaagtttcagttgtggtagaataccgtgctgtgtttaaatgttacttgttttcaaactttgttttctatgaaaatgatatggaaacttctaaaatggaatttggtgcatatgtactgctgaataaagaccgatgaagaggtttgagtagatgtacaaatcaagtaatggtttgaacacctttaataatatgcctaatctgttcaattgttttagaatctttttatcttagatgtaggcagccatgaacaatctattttgagccactttagggagaaaactttgtatttttaaaacttgcataaaagttatgcaagtggtttttataaattggaataatacctcagttttgaggttatgcacactaaattaaatgtgacataaattaatttgtacaaaaagaactctttataaggtggctcattgtaggaaatcctgtgccttcccctttgagcacaagtgttgcatgaacaacagtttgctataagaaacataccagattagccaccattagcatctatatctactttgtgtttaaaaatcaactggtaattctgaaacactgtagaatggataaaaattattttgtgatcataactctttgttgaactagagtatttttgcagcattccttgtcatcagaaacatggttaaagtttaaaactagaagcagcagaaaactagcttgtaaaatttatccaagtagagtgcaggctaggctgtcttggggaaataaacattaaaacttaaagcaatgttttacatggggtgtgtgtgtgtggtgtgtggatttttttttttttataaagttagagtataattcaatggcttacattagcttcctgtctttttacctagaaccagcataataagaaatttctttggttctgtcatttcagtatggacatattaatattttagcccactgagtttgtccagttgacaccatcagtgcttcagttttctctctatccaaagcaaggttttaactttccttcattctccagtaaaacagaccgagacaacttgaactatattttgagtattgctatatcttcaacatatagctccaaatgatggattgtatacaaagcatagtacagaaggtttcagtaattggaaggtgaacacagcaatgctttacataatttgtgttttttagtaaaaaatattggattcaaagtaagccaatgagcttgtatacaaattttatatacaaattattgtatagaacagtgatatggaaaataggtaagggtgatattaatatctctgggtataaggactaccttatcgtttaaatattttatttccatctatagcctaatatagaacattgattttctagtagaaattctgggaagggcttttctgtctctgaaattgattcagtacagttgacagttcatcacggttacctggttaaacactttttttttttttttaattctccagtgatctaggaaattgtttcatttttaacacaggcttatttctgatggggatgggggcatagaataatatgcctaataagctaaacgttcttaacgtttcatgtcttaaactgtctttttgaacattgagaccacctcaagtgctgtaaaaataagaatgttatattaggggtgtgtgagacgccctagtctaaaatctatctttaaatatatttcctttgtaattttcaaagacttcagtaattgtgtgttatggtggaaataatactttccattggtccacattgctctggaccaaacctggagcatttctataattagagctatctatgaatcattaaaaatggatctagaataattttggggagagggagtgtatcatttagtttaggcttacctcagcagcacttcatagggtgaggagttgtttgtttctttaaaggtataactgcattgtaaaatgactgggtttattgtaacagtaatttatgggggcaccctttttggattctccattgcctcagtttcctcaaggaaaaagttacagagattaagctaaattttgaatttagagaataactgctgtgtaattttggtataattaccataaatttagtgtcttaaaacacaacatacattatttcacaatttctgtaggtcaagagtgtagttaggttttctgctcagggtctcacaaggctgcaataaaggtgtcagccagagctgcagtcttatctgaagctagggggtcctcttttatgcacatatggcaaaatccattgcctagcaactgaagaaatcatgggaacttcttcaaggccagcaagagaatctctgatctcagggaaggccttaagcgcttttttaaaggtctcacctgattagatcaggccacctacccaccagggtgatctcccttttgattaacccaaagccaaactgatgaggtaccttcattacccctgcaaaatcccttcacctttgccctgcattgtagtccaatcacaggggtgatacgcatcatattcaaagatcctgttcacagtcaagggagggggttatatggagtatgtataccagggaatcttgggagccatcttaagagttcttcctatgacaaggactcaactatttagaactggaacaatttacaagtgatagccttatatagttatcatagcaagcttatttggggatcaaggttgcctctgagaacctaatgaaaactggaccagcttccccaaaaagtgtatatacatggtagtttttcatacagttttaggggattcataagagtccatgaattacagtctgtcccaacccttccctttagatgatgagttgttgaggtgacttgcccaaggtcacacagctactaagggccaaataaagcccacatctcaactcccatactgcccagggcttctaattactattctaaaggtaatctaaattcatttaaatttgtgaaccaatgcaaaaaaatgtgaatgtagctttttggatattttttttgtttactaaggaatgggtaacattgttatagaagcttgcctaagagttttgaaattagttgacctttttgagtttccaaaattgaatcttccattgtagctattaaagtgaactataaataggccaactttaattgttaactcctcgggtttggtggattatctaccatttatatataaaatttcagttagaatccaccattggcgttttgaaggccaagatagctgagtatcttatcctttttgtaacttcttgattattttacttattggcaaaattcattaactgtcagccaataatttaatattatgggaggaaaaaattttgcccagatatctgaggcaatactcccaaacactaacaaactgatgcctaacaaacttgacattttgaacacttaaagttttccctaaactttttaataagcacattaataaagtatgcttttaaatatatatgtacaataatttttaaaagttgctgcaagatgccttcaaatcaatatgcacgttggtggcattagtgcagtcttctatttttatttttttgagacacagtctcgctctgtggcccaggctggagtgtagtggcgcaatctcggctcactgcaacctctgcctcaagggttcaagcaattctgcctcagcctcctgagtagctgggattacaggagtacgctaccacgcctggctaatttttgtatttttagtagaaatggggtttcaccgtattggccaggctggtattggaatcctgaccgcaaatgatctgcccacctcggcttcccaaagtgctgggattacaggcgtgagccactgcgcccaaccagccttaattcttaataaaggaagttgaaaaataatgaacattggtaaaactattctagtgtgatcagaagcaaatttggactgtagtgtcaaattgataaaaaactaagcacaccaatcatgtataagaaaagtagatttaacatttttttccctaaacacttaacccagaagttaacaataatcttgaaaattccttttaaatccaggccctttaggtgatggcagtttgactcaggatgtccaagtccagtgtattttcaataaaattgacttgacagctactgctctgggtgtaagagcagttgactgtgaggaaaagtaaatggttctacagattctttatgatctacctcccaccagaggactgcagtactcccttgttatttatattttctgccccaatttttgccttctccacaaattttataccttttgtagctgcctactccagattacttcacctttccagactatcagttcttccacttttattcttcataaagaaaattccaataacctgtttcacttaggtttttctattactcttcaagcatgaatcctaatttccctgactatatcttacctctgatctccataactgatggattcctatcctagactatgttactctaatattacccaagattttctccagcctgtttttactcttactttgaaacagctgtttaaaatgactcgtaatctgcttaaatctacatgctttttgtggttctcaatccagttacctaccttccagataattccctcactgtcctgtcctctccattcctctgatgtttaagccctgtgagccacctttcccccatcctttgtgcatagttaccattttactctttcttgttgcccaggcaggaatgcagtggtgccatcttggctcactgcaacctccacctcctaggttcaagcgattctcctgcctcagcctcctgagtagctgggaccacaagcgtgcaccaccacgcccggctaatttttgtatttttagtagagatggggtttcaccacgttggccaggctggtctcgaactcctgacctcagatgatccaccctccttggcctcccaaagtgctgggattgcaggcgtgagccaccgcctggccaccattttactctttttaggtacagtaatctaatatccaaagtcttggactcagctaaagagggtatttaccttaaaaaaaaaaaaaaaaagactccatcttttgattcataattgtggtgggggcggggaatcaagacaaccttagtcactttggtattaccataattcttgtcttttcagggttgtcctgttcagctgcataaaacatcatgtattctaggtatttcctaccttcacttacatttttacttgccgatgtgctgccttcataaatgggtatattccgccacacatctagtaagcccccaatgcagtacacaatgtgtatcactgataaaactcgcacttctgccatgtcagtattatattcagttgagtggtctttagcatagtggcagtcctagtcatcctaaccttttagttaaggtaaaattacatatgtttatagaactcatatagacaagctagtttttaaaatcttccttttaaccagtttaggatgatctaggatagctaagttacctacatggtgactgttcggtctaattcagaaacagaagtactaaaagaatactaaaaagtttttacccattatctctatccctgttttctttttgcaattctcagctgcagggagcaagaaaatacacagcagataggaaatgtttgtttgcatcctggctttctcaaccgcactttacgtccttgaatattctagatatttactccttcaagaagtcaggagtatatccaggcctacctatcatccttgccatccccattaaccctcatttttcagtatgtgttttacatttatggttatttttcagtctatagtatctgttcactcattgctctatcacatctgagtttctccgtctttctttccactagattgtaagctccttaagggcaaggtcggcatataagcaaagttctgtaaacaccgtgaaggtaccatgagttctatgggtactcaataaatgcttgtgataatgatgcaatttctca

SEQ ID NO: 15141 - DNA, 1725 bp, Homo sapiens
  source 1..1725: mol_type = unassigned DNA
tgctgtccaacctgcaggtaacttactacttccagtcaatatgccgaccttagatgctccagaagagaggcggagaaaatttaagtaccgaggcaaagatgtgtctctgaggcgacagcagaggatggcggtcagtctggagctccgaaaggccaagaaagatgaacagaccttaaagagaaggaatatcacgagcttctgccctgacacaccttctgaaaaaacagccaaaggggtggcggtcagcctcactctgggtgaaataatcaaaggtgtgaatagctcagatccagtcctatgtttccaggccacccagacagccaggaaaatgctatcccaggaaaagaacccccctctgaaactggtcattgaagcgggcctcattcccaggatggtggagttcctgaagtcatcactttacccctgcttgcagtttgaggctgcctgggccctgaccaacatcgcttcagggacttcggagcagactcgtgccgtggtagaagggggagccatccagcccttgattgagctcctgtcttcctccaacgtggctgtgtgtgaacaggcagtgtgggctcttggtaatatagccggtgatggcccagagttcagagataacgtcatcacaagcaatgccatcccacatctcctagccttgatttcacccaccctgccgatcacatttctgcggaacatcacgtggaccttgtcgaatctgtgccgaaacaagaacccatacccttgcgacactgcggtgaagcagatactgccggccctccttcacctcctgcagcaccaggacagtgaggttctctcggatgcctgctgggcactgtcctacctcaccgacggctccaacaagcgcatcggccaagtggttaacacgggggtcctgcccaggctggtagtgctcatgaccagctcagaactcaatgtcttgactccttctctccgcaccgtggggaacattgtcacgggcacagatgagcagacgcagatggccattgatgcgggtatgctgaacgtgctcccccagctcctgcaacacaacaagccctccatccagaaggaggcagcctgggccctgagcaacgtagcagcggggccttgtcaccacatccagcagctgcttgcctacgacgtcttgcctcccttggtggctctgctaaaaaacggagaatttaaagtccagaaagaggctgtctggatggtggcgaactttgcaacaggggccaccatggatcagctgatccagctcgtccactctggggtcctggagccactggtgaatctgctcactgccccagatgttaaaattgttctcatcatccttgatgtcatctcttgcatcctccaggcggcagagaaacggtctgagaaggaaaacctgtgtcttctgatagaagaacttggtgggatcgatagaattgaggctttacagctgcatgagaaccgtcaaattggccagtcggctttgaacatcatcgagaagcactttggtgaggaagaagatgagagccaaactttactgagccaagtcatagaccaagattatgaatttatagattatgaatgcttagcaaaaaaatagccaagctccctacctcctaaaccaacaacccagtgctaaaggataacttctttaagaagcagcagtcctctatcttagtgtaacccaaatgtgaagcttttaaaacttgacattaataaaatgttcaacacttt

SEQ ID NO: 15142 - DNA, 5297 bp, Homo sapiens
  source 1..5297: mol_type = unassigned DNA
tcctcctcctcctgctgccctttctccttctcctcgctctccctgtggctcccatttctctctctctttgttagttgtaactagaaaggcagggcagggtagaaaaatcccccggaactttaaatggcctctccgggcttccctgctgcgggtccgggctgggagtcgccccaagggcgggggtgtgcgggggcccttccccaggagctgccgcctcgttcgccagcttttcctttggcgttctatttaaaaaggcggcctgaagaacatgatttattcccgtaaaagaaccccccaaacaaactctggctctcgccttgaacttctcttgactgcaaaaggcctttctctgctcgaaacacacatcttggcgcgttgcacgtctgttctctggggaggcagtaaggggccgtggagctggcctcggcctcggcatcgggagaggctggacttcctgtctctctgtgctgaatggctgcgatggcgcccgctctcactgacgcagcagctgaagcacaccatatccggttcaaactggctcccccatcctctaccttgtcccctggcagtgccgaaaataacggcaacgccaacatccttattgctgccaacggaaccaaaagaaaagccattgctgcagaggatcccagcctagatttccgaaataatcctaccaaggaagacttgggaaagctgcaaccactggtggcatcttatctctgctctgatgtaacatctgttccctcaaaggagtctttgaagttgcaaggggtcttcagcaagcagacagtccttaaatctcatcctctcttatctcagtcctatgaactccgagctgagctgttggggagacagccagttttggagttttccttagaaaatcttagaaccatgaatacgagtggtcagacagctctgccacaagcacctgtaaatgggttggctaagaaattgactaaaagttcaacacattctgatcatgacaattccacttccctcaatgggggaaaacgggctctcacttcatctgctcttcatgggggtgaaatgggaggatctgaatctggggacttgaaggggggtatgaccaattgcactcttccacatagaagccttgatgtagaacacacaactttgtatagcaataatagcactgcaaacaaatcctctgtcaattccatggaacagccggcacttcaaggaagcagtagattatcacctggtacagactccagctctaacttggggggtgtcaaattggagggtaaaaagtctcccctgtcttccattcttttcagtgctttagattctgacacaaggataacagctttactgcggcgacaggctgacattgagagccgtgcccgcagattacaaaagcgcttacaggttgtgcaagccaagcaggttgagaggcatatacaacatcagctgggtggatttttggagaagactttgagcaaactgccaaacttggaatccttgagaccacggagccagttgatgctgactcgaaaggctgaagctgccttgagaaaagctgccagtgagaccaccacttcagagggacttagcaactttctgaaaagcaattcaatttcagaagaattggagagatttacagctagtggcatagccaacttgaggtgcagtgaacaggcatttgattcagatgtcactgacagtagttcaggaggggagtctgatattgaagaggaagaactgaccagagctgatcccgagcagcgtcatgtacccctgagacgcaggtcagaatggaaatgggctgcagaccgggcagctattgtcagccgctggaactggcttcaggctcatgtttctgacttggaatatcgaattcgtcagcaaacagacatttacaaacagatacgtgctaataaggggttgatagttcttggggaggtacctcccccagagcatacaacagacttatttcttccacttagttctgaggtgaagacagatcatgggactgataaattgattgagtctgtttctcagccattggaaaaccatggtgcccgtattattggtcatatttcagagtcactgtctaccaaatcatgtggagcactcagacctgtcaatggagttattaacactcttcagcctgtcttggcagaccacattccaggtgacagctctgatgctgaggaacaattacataagaagcaacgactgaatctcgtctcttcatcatctgatggcacctgtgtggcagcccggacacgtcctgtactgagctgtaagaagcggaggcttgttcgacccaacagcatcgttcctctttccaagaaggttcaccggaacagcacaatccgccctggctgtgatgtgaatccctcctgcgcactgtgtggttcaggcagcatcaacaccatgcctcccgaaattcactatgaagcccctctgttggaacgtctttcccagttggactcttgtgttcatcctgttctagcatttccagatgatgttcccacaagcctgcatttccagagcatgctgaaatctcagtggcagaacaagccttttgacaaaatcaaacctcccaaaaagttatcgcttaagcacagagcacccatgccgggcagtctgccagattcagctcgtaaggacaggcacaaattggtcagctccttcctaacaacagccaagctgtcccatcaccaaacccggcctgacaggacccacaggcagcacttagacgatgtgggggccgtgcccatggtggagcgagtgacagcgccaaaagcagagcgcttgctcaacccaccaccacccgtgcatgacccaaaccacagcaaaatgagattgcgagaccattcatctgagagaagtgaagtgttgaagcatcacacagacatgagcagttcgagctacttggcagccacccaccatcctccacacagtcccttggtgcgacagctctccacctcctcagattcccctgcacccgccagctctagctcacaggttacagccagcacatcgcagcagccagtaaggaggagaaggggagagagctcatttgatattaacaacattgtcatcccaatgtctgttgctgcaacaactcgcgtagagaaactgcaatacaaggaaatccttacgcccagctggcgggaggttgatcttcagtctctgaaggggagtcctgatgaggagaatgaagagattgaggacctatccgacgcagccttcgccgccctgcatgccaaatgtgaggagatggagagggcacggtggctgtggaccacgagtgtgccaccccagcggcggggcagcaggtcctacaggtcatcagacggccggacaaccccccagctgggcagtgccaacccctccaccccccagcctgcctcccctgatgtcagcagtagccactctttgtcagaatactcccatggtcagtcccctaggagccccattagcccggaactgcactcagcacccctcacccctgtggctcgggacactccgcgacacttagccagtgaggatacccgttgttccacaccagagctggggctggatgaacagtctgtccagccctgggagcggcggaccttccccctggcgcacagtccccaggcggagtgtgaggaccagctggatgcacaggagcgagcagcccgctgcactcgacgcacctcaggcagcaagactggccgggagacagaggcagcgcccacctcgcctcccattgtccccctcaagagtcggcatctggtggcagcagccacagctcagcgcccgactcacagatgagcgggagacagccatctaaacagactcactaactattggcattaaagcttcagaaatctctgcgtttgatattcaaacatcatatgccggaaattttcacagtttttagtgaacttaaggaatttagatcctactttggtatttttttttcttgttttaatttttgttttgtttttgtttccatgttttcttgtcacacacctgagcacttcctcccgttggcaaacagaagttcaggatgagaccctgctggcctggtcctggcacatcctctgcactgttgaatcactggacttactgatcttagatgaccaccccctccctcacacctgtgggcagggcagaacagcctggcgggctacagtttagcatggccttcttgagctagggtggaatggggcagggtgctctggactcttaccccctcccctcccatctgtggcttggctctgctgtggccctcctggctgggtccccttggtttttcgtgctggaacatccccaccagagcctctctgccataactgccagctgctctccccgagtgctcagctggcagaacacctttcctttctcacccagaacttaagagactgattttttgtttcatctgcatttggtcttctctgttttgactctttcactgcagtaacctggctgtggctgctcaggttcccctcctcatgccccttggtacccttccctgtctgctctcccatgccatgtacacacccacaacccgtccttccacttggaatatttttaccacctatcctgatctttgaaggtagggttaggactacttaacctctattcccactcccctgcaaactgggggttgtgggaagtgagcagccatctccctgtgtgattttttttttttttccctctgattcactttgccatgtttccttcacatccagatccctgtcggtgttagttccactcttggtctttcacgctccccttgcctgtggaacattgtctggtcctagctgtggttcccattgttcccccttcacccttctctgttaaccttgtgcctgtctcctgtatgatcacatcaccaaaaagggggaggggggagaagactctttttttttggccattttgtaatcgtataaaaatagtagacaactgcttaatggttggggttttttcacaattttcaacattagtgatttttttttctgtttgcaagttaaagggtttgtcattgtttctttaaaaaaaaatacaataatgcaccatatccctatgcataaagtgcttcttctatttataaggttgaaaattctgaataacccttttagcattgaaaaaaaaaacaaaaacaaaaaatggaaaaaaaaaaccttgtattttgtaaatattttcttttcctgctttggagctgtgtaatggcagcgaaacatgtagctgtctttgttctatagaaatgcttttcttcagagaagctgatctttgttaatgtcttgattctgttcgcaaagcacagactagtgctt

SEQ ID NO: 15143 - DNA, 5108 bp, Homo sapiens
  source 1..5108: mol_type = unassigned DNA
tcctcctcctcctgctgccctttctccttctcctcgctctccctgtggctcccatttctctctctctttgttagttgtaactagaaaggcagggcagggtagaaaaatcccccggaactttaaatggcctctccgggcttccctgctgcgggtccgggctgggagtcgccccaagggcgggggtgtgcgggggcccttccccaggagctgccgcctcgttcgccagcttttcctttggcgttctatttaaaaaggcggcctgaagaacatgatttattcccgtaaaagaaccccccaaacaaactctggctctcgccttgaacttctcttgactgcaaaaggcctttctctgctcgaaacacacatcttggcgcgttgcacgtctgttctctggggaggcagtaaggggccgtggagctggcctcggcctcggcatcgggagaggctggacttcctgtctctctgtgctgaatggctgcgatggcgcccgctctcactgacgcagcagctgaagcacaccatatccggttcaaactggctcccccatcctctaccttgtcccctggcagtgccgaaaataacggcaacgccaacatccttattgctgccaacggaaccaaaagaaaagccattgctgcagaggatcccagcctagatttccgaaataatcctaccaaggaagacttgggaaagctgcaaccactggtggcatcttatctctgctctgatgtaacatctgttccctcaaaggagtctttgaagttgcaaggggtcttcagcaagcagacagtccttaaatctcatcctctcttatctcagtcctatgaactccgagctgagctgttggggagacagccagttttggagttttccttagaaaatcttagaaccatgaatacgagtggtcagacagctctgccacaagcacctgtaaatgggttggctaagaaattgactaaaagttcaacacattctgatcatgacaattccacttccctcaatgggggaaaacgggctctcacttcatctgctcttcatgggggtgaaatgggaggatctgaatctggggacttgaaggggggtatgaccaattgcactcttccacatagaagccttgatgtagaacacacaactttgtatagcaataatagcactgcaaacaaatcctctgtcaattccatggaacagccggcacttcaaggaagcagtagattatcacctggtacagactccagctctaacttggggggtgtcaaattggagggtaaaaagtctcccctgtcttccattcttttcagtgctttagattctgacacaaggataacagctttactgcggcgacaggctgacattgagagccgtgcccgcagattacaaaagcgcttacaggttgtgcaagccaagcaggttgagaggcatatacaacatcagctgggtggatttttggagaagactttgagcaaactgccaaacttggaatccttgagaccacggagccagttgatgctgactcgaaaggctgaagctgccttgagaaaagctgccagtgagaccaccacttcagagggacttagcaactttctgaaaagcaattcaatttcagaagaattggagagatttacagctagtggcatagccaacttgaggtgcagtgaacaggcatttgattcagatgtcactgacagtagttcaggaggggagtctgatattgaagaggaagaactgaccagagctgatcccgagcagcgtcatgtacccctgagacgcaggtcagaatggaaatgggctgcagaccgggcagctattgtcagccgctggaactggcttcaggctcatgtttctgacttggaatatcgaattcgtcagcaaacagacatttacaaacagatacgtgctaataaggggttgatagttcttggggaggtacctcccccagagcatacaacagacttatttcttccacttagttctgaggtgaagacagatcatgggactgataaattgattgagtctgtttctcagccattggaaaaccatggtgcccgtattattggtcatatttcagagtcactgtctaccaaatcatgtggagcactcagacctgtcaatggagttattaacactcttcagcctgtcttggcagaccacattccaggtgacagctctgatgctgaggaacaattacataagaagcaacgactgaatctcgtctcttcatcatctgatggcacctgtgtggcagcccggacacgtcctgtactgagctgtaagaagcggaggcttgttcgacccaacagcatcgttcctctttccaagaaggttcaccggaacagcacaatccgccctggctgtgatgtgaatccctcctgcgcactgtgtggttcaggcagcatcaacaccatgcctcccgaaattcactatgaagcccctctgttggaacgtctttcccagttggactcttgtgttcatcctgttctagcatttccagatgatgttcccacaagcctgcatttccagagcatgctgaaatctcagtggcagaacaagccttttgacaaaatcaaacctcccaaaaagttatcgcttaagcacagagcacccatgccgggcagtctgccagattcagctcgtaaggacaggcacaaattggtcagctccttcctaacaacagccatgttgaagcatcacacagacatgagcagttcgagctacttggcagccacccaccatcctccacacagtcccttggtgcgacagctctccacctcctcagattcccctgcacccgccagctctagctcacaggttacagccagcacatcgcagcagccagtaaggaggagaaggggagagagctcatttgatattaacaacattgtcatcccaatgtctgttgctgcaacaactcgcgtagagaaactgcaatacaaggaaatccttacgcccagctggcgggaggttgatcttcagtctctgaaggggagtcctgatgaggagaatgaagagattgaggacctatccgacgcagccttcgccgccctgcatgccaaatgtgaggagatggagagggcacggtggctgtggaccacgagtgtgccaccccagcggcggggcagcaggtcctacaggtcatcagacggccggacaaccccccagctgggcagtgccaacccctccaccccccagcctgcctcccctgatgtcagcagtagccactctttgtcagaatactcccatggtcagtcccctaggagccccattagcccggaactgcactcagcacccctcacccctgtggctcgggacactccgcgacacttagccagtgaggatacccgttgttccacaccagagctggggctggatgaacagtctgtccagccctgggagcggcggaccttccccctggcgcacagtccccaggcggagtgtgaggaccagctggatgcacaggagcgagcagcccgctgcactcgacgcacctcaggcagcaagactggccgggagacagaggcagcgcccacctcgcctcccattgtccccctcaagagtcggcatctggtggcagcagccacagctcagcgcccgactcacagatgagcgggagacagccatctaaacagactcactaactattggcattaaagcttcagaaatctctgcgtttgatattcaaacatcatatgccggaaattttcacagtttttagtgaacttaaggaatttagatcctactttggtatttttttttcttgttttaatttttgttttgtttttgtttccatgttttcttgtcacacacctgagcacttcctcccgttggcaaacagaagttcaggatgagaccctgctggcctggtcctggcacatcctctgcactgttgaatcactggacttactgatcttagatgaccaccccctccctcacacctgtgggcagggcagaacagcctggcgggctacagtttagcatggccttcttgagctagggtggaatggggcagggtgctctggactcttaccccctcccctcccatctgtggcttggctctgctgtggccctcctggctgggtccccttggtttttcgtgctggaacatccccaccagagcctctctgccataactgccagctgctctccccgagtgctcagctggcagaacacctttcctttctcacccagaacttaagagactgattttttgtttcatctgcatttggtcttctctgttttgactctttcactgcagtaacctggctgtggctgctcaggttcccctcctcatgccccttggtacccttccctgtctgctctcccatgccatgtacacacccacaacccgtccttccacttggaatatttttaccacctatcctgatctttgaaggtagggttaggactacttaacctctattcccactcccctgcaaactgggggttgtgggaagtgagcagccatctccctgtgtgattttttttttttttccctctgattcactttgccatgtttccttcacatccagatccctgtcggtgttagttccactcttggtctttcacgctccccttgcctgtggaacattgtctggtcctagctgtggttcccattgttcccccttcacccttctctgttaaccttgtgcctgtctcctgtatgatcacatcaccaaaaagggggaggggggagaagactctttttttttggccattttgtaatcgtataaaaatagtagacaactgcttaatggttggggttttttcacaattttcaacattagtgatttttttttctgtttgcaagttaaagggtttgtcattgtttctttaaaaaaaaatacaataatgcaccatatccctatgcataaagtgcttcttctatttataaggttgaaaattctgaataacccttttagcattgaaaaaaaaaacaaaaacaaaaaatggaaaaaaaaaaccttgtattttgtaaatattttcttttcctgctttggagctgtgtaatggcagcgaaacatgtagctgtctttgttctatagaaatgcttttcttcagagaagctgatctttgttaatgtcttgattctgttcgcaaagcacagactagtgctt

SEQ ID NO: 15144 - DNA, 4911 bp, Homo sapiens
  source 1..4911: mol_type = unassigned DNA
ttctctggggaggcagtaaggggccgtggagctggcctcggcctcggcatcgggagaggctggacttcctgtctctctgtgctgaatggctgcgatggcgcccgctctcactgacgcagcagctgaagcacaccatatccggttcaaactggctcccccatcctctaccttgtcccctggcagtgccgaaaataacggcaacgccaacatccttattgctgccaacggaaccaaaagaaaagccattgctgcagaggatcccagcctagatttccgaaataatcctaccaaggaagacttgggaaagctgcaaccactggtggcatcttatctctgctctgatgtaacatctgttccctcaaaggagtctttgaagttgcaaggggtcttcagcaagcagacagtccttaaatctcatcctctcttatctcagtcctatgaactccgagctgagctgttggggagacagccagttttggagttttccttagaaaatcttagaaccatgaatacgagtggtcagacagctctgccacaagcacctgtaaatgggttggctaagaaattgactaaaagttcaacacattctgatcatgacaattccacttccctcaatgggggaaaacgggctctcacttcatctgctcttcatgggggtgaaatgggaggatctgaatctggggacttgaaggggggtatgaccaattgcactcttccacatagaagccttgatgtagaacacacaactttgtatagcaataatagcactgcaaacaaatcctctgtcaattccatggaacagccggcacttcaaggaagcagtagattatcacctggtacagactccagctctaacttggggggtgtcaaattggagggtaaaaagtctcccctgtcttccattcttttcagtgctttagattctgacacaaggataacagctttactgcggcgacaggctgacattgagagccgtgcccgcagattacaaaagcgcttacaggttgtgcaagccaagcaggttgagaggcatatacaacatcagctgggtggatttttggagaagactttgagcaaactgccaaacttggaatccttgagaccacggagccagttgatgctgactcgaaaggctgaagctgccttgagaaaagctgccagtgagaccaccacttcagagggacttagcaactttctgaaaagcaattcaatttcagaagaattggagagatttacagctagtggcatagccaacttgaggtgcagtgaacaggcatttgattcagatgtcactgacagtagttcaggaggggagtctgatattgaagaggaagaactgaccagagctgatcccgagcagcgtcatgtacccctgagacgcaggtcagaatggaaatgggctgcagaccgggcagctattgtcagccgctggaactggcttcaggctcatgtttctgacttggaatatcgaattcgtcagcaaacagacatttacaaacagatacgtgctaataaggggttgatagttcttggggaggtacctcccccagagcatacaacagacttatttcttccacttagttctgaggtgaagacagatcatgggactgataaattgattgagtctgtttctcagccattggaaaaccatggtgcccgtattattggtcatatttcagagtcactgtctaccaaatcatgtggagcactcagacctgtcaatggagttattaacactcttcagcctgtcttggcagaccacattccaggtgacagctctgatgctgaggaacaattacataagaagcaacgactgaatctcgtctcttcatcatctgatggcacctgtgtggcagcccggacacgtcctgtactgagctgtaagaagcggaggcttgttcgacccaacagcatcgttcctctttccaagaaggttcaccggaacagcacaatccgccctggctgtgatgtgaatccctcctgcgcactgtgtggttcaggcagcatcaacaccatgcctcccgaaattcactatgaagcccctctgttggaacgtctttcccagttggactcttgtgttcatcctgttctagcatttccagatgatgttcccacaagcctgcatttccagagcatgctgaaatctcagtggcagaacaagccttttgacaaaatcaaacctcccaaaaagttatcgcttaagcacagagcacccatgccgggcagtctgccagattcagctcgtaaggacaggcacaaattggtcagctccttcctaacaacagccaagctgtcccatcaccaaacccggcctgacaggacccacaggcagcacttagacgatgtgggggccgtgcccatggtggagcgagtgacagcgccaaaagcagagcgcttgctcaacccaccaccacccgtgcatgacccaaaccacagcaaaatgagattgcgagaccattcatctgagagaagtgaagtgttgaagcatcacacagacatgagcagttcgagctacttggcagccacccaccatcctccacacagtcccttggtgcgacagctctccacctcctcagattcccctgcacccgccagctctagctcacaggttacagccagcacatcgcagcagccagtaaggaggagaaggggagagagctcatttgatattaacaacattgtcatcccaatgtctgttgctgcaacaactcgcgtagagaaactgcaatacaaggaaatccttacgcccagctggcgggaggttgatcttcagtctctgaaggggagtcctgatgaggagaatgaagagattgaggacctatccgacgcagccttcgccgccctgcatgccaaatgtgaggagatggagagggcacggtggctgtggaccacgagtgtgccaccccagcggcggggcagcaggtcctacaggtcatcagacggccggacaaccccccagctgggcagtgccaacccctccaccccccagcctgcctcccctgatgtcagcagtagccactctttgtcagaatactcccatggtcagtcccctaggagccccattagcccggaactgcactcagcacccctcacccctgtggctcgggacactccgcgacacttagccagtgaggatacccgttgttccacaccagagctggggctggatgaacagtctgtccagccctgggagcggcggaccttccccctggcgcacagtccccaggcggagtgtgaggaccagctggatgcacaggagcgagcagcccgctgcactcgacgcacctcaggcagcaagactggccgggagacagaggcagcgcccacctcgcctcccattgtccccctcaagagtcggcatctggtggcagcagccacagctcagcgcccgactcacagatgagcgggagacagccatctaaacagactcactaactattggcattaaagcttcagaaatctctgcgtttgatattcaaacatcatatgccggaaattttcacagtttttagtgaacttaaggaatttagatcctactttggtatttttttttcttgttttaatttttgttttgtttttgtttccatgttttcttgtcacacacctgagcacttcctcccgttggcaaacagaagttcaggatgagaccctgctggcctggtcctggcacatcctctgcactgttgaatcactggacttactgatcttagatgaccaccccctccctcacacctgtgggcagggcagaacagcctggcgggctacagtttagcatggccttcttgagctagggtggaatggggcagggtgctctggactcttaccccctcccctcccatctgtggcttggctctgctgtggccctcctggctgggtccccttggtttttcgtgctggaacatccccaccagagcctctctgccataactgccagctgctctccccgagtgctcagctggcagaacacctttcctttctcacccagaacttaagagactgattttttgtttcatctgcatttggtcttctctgttttgactctttcactgcagtaacctggctgtggctgctcaggttcccctcctcatgccccttggtacccttccctgtctgctctcccatgccatgtacacacccacaacccgtccttccacttggaatatttttaccacctatcctgatctttgaaggtagggttaggactacttaacctctattcccactcccctgcaaactgggggttgtgggaagtgagcagccatctccctgtgtgattttttttttttttccctctgattcactttgccatgtttccttcacatccagatccctgtcggtgttagttccactcttggtctttcacgctccccttgcctgtggaacattgtctggtcctagctgtggttcccattgttcccccttcacccttctctgttaaccttgtgcctgtctcctgtatgatcacatcaccaaaaagggggaggggggagaagactctttttttttggccattttgtaatcgtataaaaatagtagacaactgcttaatggttggggttttttcacaattttcaacattagtgatttttttttctgtttgcaagttaaagggtttgtcattgtttctttaaaaaaaaatacaataatgcaccatatccctatgcataaagtgcttcttctatttataaggttgaaaattctgaataacccttttagcattgaaaaaaaaaacaaaaacaaaaaatggaaaaaaaaaaccttgtattttgtaaatattttcttttcctgctttggagctgtgtaatggcagcgaaacatgtagctgtctttgttctatagaaatgcttttcttcagagaagctgatctttgttaatgtcttgattctgttcgcaaagcacagactagtgctt

SEQ ID NO: 15145 - DNA, 5014 bp, Homo sapiens
  source 1..5014: mol_type = unassigned DNA
cggcgcccaggccggggggctgtttgcaaactgcgcccattttgtggggctgaatccgcccgggctacgctcctccatcacgtgtctgttctctggggaggcagtaaggggccgtggagctggcctcggcctcggcatcgggagaggctggacttcctgtctctctgtgctgaatggctgcgatggcgcccgctctcactgacgcagcagctgaagcacaccatatccggttcaaactggctcccccatcctctaccttgtcccctggcagtgccgaaaataacggcaacgccaacatccttattgctgccaacggaaccaaaagaaaagccattgctgcagaggatcccagcctagatttccgaaataatcctaccaaggaagacttgggaaagctgcaaccactggtggcatcttatctctgctctgatgtaacatctgttccctcaaaggagtctttgaagttgcaaggggtcttcagcaagcagacagtccttaaatctcatcctctcttatctcagtcctatgaactccgagctgagctgttggggagacagccagttttggagttttccttagaaaatcttagaaccatgaatacgagtggtcagacagctctgccacaagcacctgtaaatgggttggctaagaaattgactaaaagttcaacacattctgatcatgacaattccacttccctcaatgggggaaaacgggctctcacttcatctgctcttcatgggggtgaaatgggaggatctgaatctggggacttgaaggggggtatgaccaattgcactcttccacatagaagccttgatgtagaacacacaactttgtatagcaataatagcactgcaaacaaatcctctgtcaattccatggaacagccggcacttcaaggaagcagtagattatcacctggtacagactccagctctaacttggggggtgtcaaattggagggtaaaaagtctcccctgtcttccattcttttcagtgctttagattctgacacaaggataacagctttactgcggcgacaggctgacattgagagccgtgcccgcagattacaaaagcgcttacaggttgtgcaagccaagcaggttgagaggcatatacaacatcagctgggtggatttttggagaagactttgagcaaactgccaaacttggaatccttgagaccacggagccagttgatgctgactcgaaaggctgaagctgccttgagaaaagctgccagtgagaccaccacttcagagggacttagcaactttctgaaaagcaattcaatttcagaagaattggagagatttacagctagtggcatagccaacttgaggtgcagtgaacaggcatttgattcagatgtcactgacagtagttcaggaggggagtctgatattgaagaggaagaactgaccagagctgatcccgagcagcgtcatgtacccctgagacgcaggtcagaatggaaatgggctgcagaccgggcagctattgtcagccgctggaactggcttcaggctcatgtttctgacttggaatatcgaattcgtcagcaaacagacatttacaaacagatacgtgctaataaggggttgatagttcttggggaggtacctcccccagagcatacaacagacttatttcttccacttagttctgaggtgaagacagatcatgggactgataaattgattgagtctgtttctcagccattggaaaaccatggtgcccgtattattggtcatatttcagagtcactgtctaccaaatcatgtggagcactcagacctgtcaatggagttattaacactcttcagcctgtcttggcagaccacattccaggtgacagctctgatgctgaggaacaattacataagaagcaacgactgaatctcgtctcttcatcatctgatggcacctgtgtggcagcccggacacgtcctgtactgagctgtaagaagcggaggcttgttcgacccaacagcatcgttcctctttccaagaaggttcaccggaacagcacaatccgccctggctgtgatgtgaatccctcctgcgcactgtgtggttcaggcagcatcaacaccatgcctcccgaaattcactatgaagcccctctgttggaacgtctttcccagttggactcttgtgttcatcctgttctagcatttccagatgatgttcccacaagcctgcatttccagagcatgctgaaatctcagtggcagaacaagccttttgacaaaatcaaacctcccaaaaagttatcgcttaagcacagagcacccatgccgggcagtctgccagattcagctcgtaaggacaggcacaaattggtcagctccttcctaacaacagccaagctgtcccatcaccaaacccggcctgacaggacccacaggcagcacttagacgatgtgggggccgtgcccatggtggagcgagtgacagcgccaaaagcagagcgcttgctcaacccaccaccacccgtgcatgacccaaaccacagcaaaatgagattgcgagaccattcatctgagagaagtgaagtgttgaagcatcacacagacatgagcagttcgagctacttggcagccacccaccatcctccacacagtcccttggtgcgacagctctccacctcctcagattcccctgcacccgccagctctagctcacaggttacagccagcacatcgcagcagccagtaaggaggagaaggggagagagctcatttgatattaacaacattgtcatcccaatgtctgttgctgcaacaactcgcgtagagaaactgcaatacaaggaaatccttacgcccagctggcgggaggttgatcttcagtctctgaaggggagtcctgatgaggagaatgaagagattgaggacctatccgacgcagccttcgccgccctgcatgccaaatgtgaggagatggagagggcacggtggctgtggaccacgagtgtgccaccccagcggcggggcagcaggtcctacaggtcatcagacggccggacaaccccccagctgggcagtgccaacccctccaccccccagcctgcctcccctgatgtcagcagtagccactctttgtcagaatactcccatggtcagtcccctaggagccccattagcccggaactgcactcagcacccctcacccctgtggctcgggacactccgcgacacttagccagtgaggatacccgttgttccacaccagagctggggctggatgaacagtctgtccagccctgggagcggcggaccttccccctggcgcacagtccccaggcggagtgtgaggaccagctggatgcacaggagcgagcagcccgctgcactcgacgcacctcaggcagcaagactggccgggagacagaggcagcgcccacctcgcctcccattgtccccctcaagagtcggcatctggtggcagcagccacagctcagcgcccgactcacagatgagcgggagacagccatctaaacagactcactaactattggcattaaagcttcagaaatctctgcgtttgatattcaaacatcatatgccggaaattttcacagtttttagtgaacttaaggaatttagatcctactttggtatttttttttcttgttttaatttttgttttgtttttgtttccatgttttcttgtcacacacctgagcacttcctcccgttggcaaacagaagttcaggatgagaccctgctggcctggtcctggcacatcctctgcactgttgaatcactggacttactgatcttagatgaccaccccctccctcacacctgtgggcagggcagaacagcctggcgggctacagtttagcatggccttcttgagctagggtggaatggggcagggtgctctggactcttaccccctcccctcccatctgtggcttggctctgctgtggccctcctggctgggtccccttggtttttcgtgctggaacatccccaccagagcctctctgccataactgccagctgctctccccgagtgctcagctggcagaacacctttcctttctcacccagaacttaagagactgattttttgtttcatctgcatttggtcttctctgttttgactctttcactgcagtaacctggctgtggctgctcaggttcccctcctcatgccccttggtacccttccctgtctgctctcccatgccatgtacacacccacaacccgtccttccacttggaatatttttaccacctatcctgatctttgaaggtagggttaggactacttaacctctattcccactcccctgcaaactgggggttgtgggaagtgagcagccatctccctgtgtgattttttttttttttccctctgattcactttgccatgtttccttcacatccagatccctgtcggtgttagttccactcttggtctttcacgctccccttgcctgtggaacattgtctggtcctagctgtggttcccattgttcccccttcacccttctctgttaaccttgtgcctgtctcctgtatgatcacatcaccaaaaagggggaggggggagaagactctttttttttggccattttgtaatcgtataaaaatagtagacaactgcttaatggttggggttttttcacaattttcaacattagtgatttttttttctgtttgcaagttaaagggtttgtcattgtttctttaaaaaaaaatacaataatgcaccatatccctatgcataaagtgcttcttctatttataaggttgaaaattctgaataacccttttagcattgaaaaaaaaaacaaaaacaaaaaatggaaaaaaaaaaccttgtattttgtaaatattttcttttcctgctttggagctgtgtaatggcagcgaaacatgtagctgtctttgttctatagaaatgcttttcttcagagaagctgatctttgttaatgtcttgattctgttcgcaaagcacagactagtgcttaaaaaaaaaaaagaa

SEQ ID NO: 15146 - DNA, 5105 bp, Homo sapiens
  source 1..5105: mol_type = unassigned DNA
tcagataccttctcgaaacaaaagattttcctacctgcttatacttggtaaccgagggaattactaagacttcttgctcatttctgagtattgtctttatatcctgacactatgaatgctacttggatgcctcttaagtctgttctctggggaggcagtaaggggccgtggagctggcctcggcctcggcatcgggagaggctggacttcctgtctctctgtgctgaatggctgcgatggcgcccgctctcactgacgcagcagctgaagcacaccatatccggttcaaactggctcccccatcctctaccttgtcccctggcagtgccgaaaataacggcaacgccaacatccttattgctgccaacggaaccaaaagaaaagccattgctgcagaggatcccagcctagatttccgaaataatcctaccaaggaagacttgggaaagctgcaaccactggtggcatcttatctctgctctgatgtaacatctgttccctcaaaggagtctttgaagttgcaaggggtcttcagcaagcagacagtccttaaatctcatcctctcttatctcagtcctatgaactccgagctgagctgttggggagacagccagttttggagttttccttagaaaatcttagaaccatgaatacgagtggtcagacagctctgccacaagcacctgtaaatgggttggctaagaaattgactaaaagttcaacacattctgatcatgacaattccacttccctcaatgggggaaaacgggctctcacttcatctgctcttcatgggggtgaaatgggaggatctgaatctggggacttgaaggggggtatgaccaattgcactcttccacatagaagccttgatgtagaacacacaactttgtatagcaataatagcactgcaaacaaatcctctgtcaattccatggaacagccggcacttcaaggaagcagtagattatcacctggtacagactccagctctaacttggggggtgtcaaattggagggtaaaaagtctcccctgtcttccattcttttcagtgctttagattctgacacaaggataacagctttactgcggcgacaggctgacattgagagccgtgcccgcagattacaaaagcgcttacaggttgtgcaagccaagcaggttgagaggcatatacaacatcagctgggtggatttttggagaagactttgagcaaactgccaaacttggaatccttgagaccacggagccagttgatgctgactcgaaaggctgaagctgccttgagaaaagctgccagtgagaccaccacttcagagggacttagcaactttctgaaaagcaattcaatttcagaagaattggagagatttacagctagtggcatagccaacttgaggtgcagtgaacaggcatttgattcagatgtcactgacagtagttcaggaggggagtctgatattgaagaggaagaactgaccagagctgatcccgagcagcgtcatgtacccctgagacgcaggtcagaatggaaatgggctgcagaccgggcagctattgtcagccgctggaactggcttcaggctcatgtttctgacttggaatatcgaattcgtcagcaaacagacatttacaaacagatacgtgctaataaggggttgatagttcttggggaggtacctcccccagagcatacaacagacttatttcttccacttagttctgaggtgaagacagatcatgggactgataaattgattgagtctgtttctcagccattggaaaaccatggtgcccgtattattggtcatatttcagagtcactgtctaccaaatcatgtggagcactcagacctgtcaatggagttattaacactcttcagcctgtcttggcagaccacattccaggtgacagctctgatgctgaggaacaattacataagaagcaacgactgaatctcgtctcttcatcatctgatggcacctgtgtggcagcccggacacgtcctgtactgagctgtaagaagcggaggcttgttcgacccaacagcatcgttcctctttccaagaaggttcaccggaacagcacaatccgccctggctgtgatgtgaatccctcctgcgcactgtgtggttcaggcagcatcaacaccatgcctcccgaaattcactatgaagcccctctgttggaacgtctttcccagttggactcttgtgttcatcctgttctagcatttccagatgatgttcccacaagcctgcatttccagagcatgctgaaatctcagtggcagaacaagccttttgacaaaatcaaacctcccaaaaagttatcgcttaagcacagagcacccatgccgggcagtctgccagattcagctcgtaaggacaggcacaaattggtcagctccttcctaacaacagccaagctgtcccatcaccaaacccggcctgacaggacccacaggcagcacttagacgatgtgggggccgtgcccatggtggagcgagtgacagcgccaaaagcagagcgcttgctcaacccaccaccacccgtgcatgacccaaaccacagcaaaatgagattgcgagaccattcatctgagagaagtgaagtgttgaagcatcacacagacatgagcagttcgagctacttggcagccacccaccatcctccacacagtcccttggtgcgacagctctccacctcctcagattcccctgcacccgccagctctagctcacaggttacagccagcacatcgcagcagccagtaaggaggagaaggggagagagctcatttgatattaacaacattgtcatcccaatgtctgttgctgcaacaactcgcgtagagaaactgcaatacaaggaaatccttacgcccagctggcgggaggttgatcttcagtctctgaaggggagtcctgatgaggagaatgaagagattgaggacctatccgacgcagccttcgccgccctgcatgccaaatgtgaggagatggagagggcacggtggctgtggaccacgagtgtgccaccccagcggcggggcagcaggtcctacaggtcatcagacggccggacaaccccccagctgggcagtgccaacccctccaccccccagcctgcctcccctgatgtcagcagtagccactctttgtcagaatactcccatggtcagtcccctaggagccccattagcccggaactgcactcagcacccctcacccctgtggctcgggacactccgcgacacttagccagtgaggatacccgttgttccacaccagagctggggctggatgaacagtctgtccagccctgggagcggcggaccttccccctggcgcacagtccccaggcggagtgtgaggaccagctggatgcacaggagcgagcagcccgctgcactcgacgcacctcaggcagcaagactggccgggagacagaggcagcgcccacctcgcctcccattgtccccctcaagagtcggcatctggtggcagcagccacagctcagcgcccgactcacagatgagcgggagacagccatctaaacagactcactaactattggcattaaagcttcagaaatctctgcgtttgatattcaaacatcatatgccggaaattttcacagtttttagtgaacttaaggaatttagatcctactttggtatttttttttcttgttttaatttttgttttgtttttgtttccatgttttcttgtcacacacctgagcacttcctcccgttggcaaacagaagttcaggatgagaccctgctggcctggtcctggcacatcctctgcactgttgaatcactggacttactgatcttagatgaccaccccctccctcacacctgtgggcagggcagaacagcctggcgggctacagtttagcatggccttcttgagctagggtggaatggggcagggtgctctggactcttaccccctcccctcccatctgtggcttggctctgctgtggccctcctggctgggtccccttggtttttcgtgctggaacatccccaccagagcctctctgccataactgccagctgctctccccgagtgctcagctggcagaacacctttcctttctcacccagaacttaagagactgattttttgtttcatctgcatttggtcttctctgttttgactctttcactgcagtaacctggctgtggctgctcaggttcccctcctcatgccccttggtacccttccctgtctgctctcccatgccatgtacacacccacaacccgtccttccacttggaatatttttaccacctatcctgatctttgaaggtagggttaggactacttaacctctattcccactcccctgcaaactgggggttgtgggaagtgagcagccatctccctgtgtgattttttttttttttccctctgattcactttgccatgtttccttcacatccagatccctgtcggtgttagttccactcttggtctttcacgctccccttgcctgtggaacattgtctggtcctagctgtggttcccattgttcccccttcacccttctctgttaaccttgtgcctgtctcctgtatgatcacatcaccaaaaagggggaggggggagaagactctttttttttggccattttgtaatcgtataaaaatagtagacaactgcttaatggttggggttttttcacaattttcaacattagtgatttttttttctgtttgcaagttaaagggtttgtcattgtttctttaaaaaaaaatacaataatgcaccatatccctatgcataaagtgcttcttctatttataaggttgaaaattctgaataacccttttagcattgaaaaaaaaaacaaaaacaaaaaatggaaaaaaaaaaccttgtattttgtaaatattttcttttcctgctttggagctgtgtaatggcagcgaaacatgtagctgtctttgttctatagaaatgcttttcttcagagaagctgatctttgttaatgtcttgattctgttcgcaaagcacagactagtgcttaaaaaaaaaaaagaaggaaaaattgaaaaaaataaaaaaaaaagttacagaa

SEQ ID NO: 15147 - DNA, 1564 bp, Homo sapiens
  source 1..1564: mol_type = unassigned DNA
gggcgacgccccgcgtgcgccagagtcgccgaggtcgtccccggcaccggaagtgaccctggcgggtttgtcttcaaattctcggcgagcaggagccgcgccggcaggtggtgttgacgattgaactgggcagtactggggccgtgagcggagagcaaagtgggctggactgggtcaggccctccttcctcgctgccgggatctccactccgccaatcccctgtgcctggcgttgggcggtttcccgaggagcttgggccgccgcagcttacagttgaacatgagtcttcttatgattagtgagaatgtaaaattggctcgtgaatatgcattgctgggaaactatgactctgcgatggtctattatcagggagttcttgaccaaatgaacaagtatctgtactcagtcaaagatacatacctccagcagaaatggcaacaggtttggcaggaaataaatgtggaagctaaacatgttaaagatatcatgaaaacactagagagctttaaactggacagcactcccttgaaagcggcacagcatgaccttccagcttctgagggagaagtctggtccatgcctgtacctgttgaacgaagaccctcaccaggacctagaaaacgccaatcttctcagtacagtgaccctaaatcacatggtaatcgtccaagtacaactgtcagagttcaccgttcatctgcacagaatgttcacaatgacagagggaaagctgttcgttgtcgtgaaaagaaagaacagaataaaggaagagaggaaaagggagtactgatggtcggcccacctggcacggggaagacgctccttgctaaagcagtagctacagaatgcaagacaacattcttcaatgtctcttcatcaactttgacttccaaatacagaggagaatctgagaagcttgttcgtcttctgtttgaaatggctcgattttattctccagccaccatatttattgatgagatagactccatctgtagtcgccgagggacttctgaagaacatgaagcaagcagaagggtgaaagcggagctgctggttcagatggatggtgttggaggtacttctgaaaatgatgacccttccaaaatggttatggttctggcagctactaattttccctgggatatagatgaggctttaagacgacgccttgagaaacgaatctatattcctttgccgtcagggatgcgtccttgatggcaatgagaaggcgcattgaaggtttgactccagaggaaatccgaaatctttccaaagaagaaatgcacatgcctacaactatggaggatttcgagatggctttaaaaaaggtttctaagtcagtgtctgctgcagacattgaaagatacgagaaatggatatttgagtttggatcatgctaaattctcacatgtaaactgtgagaaatgtgccttaagtgtttgaatattaaatgcagtaattcattgtactgagtgctatattttttttaactttcataatggtaagatttttttaaaaaaacccttatgattctgaataaaggcaatatttttaagctgaaaa

SEQ ID NO: 15148 - DNA, 1684 bp, Homo sapiens
  source 1..1684: mol_type = unassigned DNA
taaagtgtttctttttttcttcttctttttagcttacagttgaacatgagtcttcttatgattagtgagaatgtaaaattggctcgtgaatatgcattgctgggaaactatgactctgcgatggtctattatcagggagttcttgaccaaatgaacaagtatctgtactcagtcaaagatacatacctccagcagaaatggcaacaggtttggcaggaaataaatgtggaagctaaacatgttaaagatatcatgaaaacactagagagctttaaactggacagcactcccttgaaagcggcacagcatgaccttccagcttctgagggagaagtctggtccatgcctgtacctgttgaacgaagaccctcaccaggacctagaaaacgccaatcttctcagtacagtgaccctaaatcacatggtaatcgtccaagtacaactgtcagagttcaccgttcatctgcacagaatgttcacaatgacagagggaaagctgttcgttgtcgtgaaaagaaagaacagaataaaggaagagaggaaaagaacaaatcacctgctgcagtaacagaaccagagacaaataaatttgatagtaccggatatgataaagacttagtagaagctttggaaagagatataatttcccagaatcccaatgttcgatgggatgatatcgctgatttagtagaagctaaaaagttgcttaaggaagccgtagtgttaccaatgtggatgcccgaattctttaagggcattaggagaccatggaaaggagtactgatggtcggcccacctggcacggggaagacgctccttgctaaagcagtagctacagaatgcaagacaacattcttcaatgtctcttcatcaactttgacttccaaatacagaggagaatctgagaagcttgttcgtcttctgtttgaaatggctcgattttattctccagccaccatatttattgatgagatagactccatctgtagtcgccgagggacttctgaagaacatgaagcaagcagaagggtgaaagcggagctgctggttcagatggatggtgttggaggtacttctgaaaatgatgacccttccaaaatggttatggttctggcagctactaattttccctgggatatagatgaggctttaagacgacgccttgagaaacgaatctatattcctttgccgtcagcaaaaggcagggaggagctattacgaataagtctacgtgagttggaattggctgatgatgttgaccttgcaagtatagcagaaaacatggaaggttattcaggtgcggacattaccaacgtgtgcagggatgcgtccttgatggcaatgagaaggcgcattgaaggtttgactccagaggaaatccgaaatctttccaaagaagaaatgcacatgcctacaactatggaggatttcgagatggctttaaaaaaggtttctaagtcagtgtctgctgcagacattgaaagatacgagaaatggatatttgagtttggatcatgctaaattctcacatgtaaactgtgagaaatgtgccttaagtgtttgaatattaaatgcagtaattcattgtactgagtgctatattttttttaactttcataatggtaagatttttttaaaaaaacccttatgattctgaataaaggcaatatttttaagctgaaaa

SEQ ID NO: 15149 - DNA, 1894 bp, Homo sapiens
  source 1..1894: mol_type = unassigned DNA
agagtcgccgaggtcgtccccggcaccggaagtgaccctggcgggtttgtcttcaaattctcggcgagcaggagccgcgccggcaggtggtgttgacgattgaactgggcagtactggggccgtgagcggagagcaaagtgggctggactgggtcaggccctccttcctcgctgccgggatctccactccgccaatcccctgtgcctggcgttgggcggtttcccgaggagcttgggccgccgcagcttacagttgaacatgagtcttcttatgattagtgagaatgtaaaattggctcgtgaatatgcattgctgggaaactatgactctgcgatggtctattatcagggagttcttgaccaaatgaacaagtatctgtactcagtcaaagatacatacctccagcagaaatggcaacaggtttggcaggaaataaatgtggaagctaaacatgttaaagatatcatgaaaacactagagagctttaaactggacagcactcccttgaaagcggcacagcatgaccttccagcttctgagggagaagtctggtccatgcctgtacctgttgaacgaagaccctcaccaggacctagaaaacgccaatcttctcagtacagtgaccctaaatcacatggtaatcgtccaagtacaactgtcagagttcaccgttcatctgcacagaatgttcacaatgacagagggaaagctgttcgttgtcgtgaaaagaaagaacagaataaaggaagagaggaaaagaacaaatcacctgctgcagtaacagaaccagagacaaataaatttgatagtaccggatatgataaagacttagtagaagctttggaaagagatataatttcccagaatcccaatgttcgatgggatgatatcgctgatttagtagaagctaaaaagttgcttaaggaagccgtagtgttaccaatgtggatgcccgaattctttaagggcattaggagaccatggaaaggagtactgatggtcggcccacctggcacggggaagacgctccttgctaaagcagtagctacagaatgcaagacaacattcttcaatgtctcttcatcaactttgacttccaaatacagaggagaatctgagaagcttgttcgtcttctgtttgaaatggctcgattttattctccagccaccatatttattgatgagatagactccatctgtagtcgccgagggacttctgaagaacatgaagcaagcagaagggtgaaagcggagctgctggttcagatggatggtgttggaggtacttctgaaaatgatgacccttccaaaatggttatggttctggcagctactaattttccctgggatatagatgaggctttaagacgacgccttgagaaacgaatctatattcctttgccgtcagcaaaaggcagggaggagctattacgaataagtctacgtgagttggaattggctgatgatgttgaccttgcaagtatagcagaaaacatggaaggttattcaggtgcggacattaccaacgtgtgcagggatgcgtccttgatggcaatgagaaggcgcattgaaggtttgactccagaggaaatccgaaatctttccaaagaagaaatgcacatgcctacaactatggaggatttcgagatggctttaaaaaaggtttctaagtcagtgtctgctgcagacattgaaagatacgagaaatggatatttgagtttggatcatgctaaattctcacatgtaaactgtgagaaatgtgccttaagtgtttgaatattaaatgcagtaattcattgtactgagtgctatattttttttaactttcataatggtaagatttttttaaaaaaacccttatgattctgaataaaggcaatatttttaagctg

SEQ ID NO: 15150 - DNA, 716 bp, Homo sapiens
  source 1..716: mol_type = unassigned DNA
ctgacctcggtgtgtgtgtgagtgtggtgaaaatcaagtgggagggaaagtgagcaagcacctgaacaagcttacagttgaacatgagtcttcttatgattagtgagaatgtaaaattggctcgtgaatatgcattgctgggaaactatgactctgcgatggtctattatcagggagttcttgaccaaatgaacaagtatctgtactcagtcaaagatacatacctccagcagaaatggcaacaggtttggcaggaaataaatgtggaagctaaacatgttaaagatatcatgaaaacactagagagctttaaactggacagcactcccttgaaagcggcacagcatgaccttccagcttctgagggagaagtctggtccatgcctgtacctgttgaacgaagaccctcaccaggacctagaaaacgccaatcttctcagtacagtgaccctaaatcacatggtaatcgtccaagtacaactgtcagagttcaccgttcatctgcacagaatgttcacaatgacagagggaaagctgttcgttgtcgtgaaaagaaagaacagaataaaggaagagaggaaaagaacaaatcacctgctgcagtaacagaaccagagacaaataaatttgatagtaccggatatgataaagacttagtagaagctttggaaagagatataatttcccagaatcccaatgttcgatgggatgatatc

SEQ ID NO: 15151 - DNA, 1138 bp, Homo sapiens
  source 1..1138: mol_type = unassigned DNA
agcgacctcgctcccggggcgacgccccgcgtgcgccagagtcgccgaggtcgtccccggcaccggaagtgaccctggcgggtttgtcttcaaattctcggcgagcaggagccgcgccggcaggtggtgttgacgattgaactgggcagtactggggccgtgagcggagagcaaagtgggctggactgggtcaggccctccttcctcgctgccgggatctccactccgccaatcccctgtgcctggcgttgggcggtttcccgaggagcttgggccgccgcagcttacagttgaacatgagtcttcttatgattagtgagaatgtaaaattggctcgtgaatatgcattgctgggaaactatgactctgcgatggtctattatcagggagttcttgaccaaatgaacaagtatctgtactcagtcaaagatacatacctccagcagaaatggcaacaggtttggcaggaaataaatgtggaagctaaacatgttaaagatatcatgaaaacactagagagctttaaactggacagcactcccttgaaagcggcacagcatgaccttccagcttctgagggagaagtctggtccatgcctgtacctgttgaacgaagaccctcaccaggacctagaaaacgccaatcttctcagtacagtgaccctaaatcacatggtaatcgtccaagtacaactgtcagagttcaccgttcatctgcacagaatgttcacaatgacagagggaaagctgttcgttgtcgtgaaaagaaagaacagaataaaggaagagaggaaaagaacaaatcacctgctgcagtaacagaaccagagacaaataaatttgatagtaccggatatgataaagacttagtagaagctttggaaagagatataatttcccagaatcccaatgttcgatgggatgatatcgctgatttagtagaagctaaaaagttgcttaaggaagccgtagtgttaccaatgtggatgcccgaattctttaagggcattaggagaccatggaaaggagtactgatggtcggcccacctggcacggggaagacgctccttgctaaagcagtagctacagaatgcaagacaacattcttcaatgtctcttcatcaactttgacttccaa

SEQ ID NO: 15152 - DNA, 1465 bp, Homo sapiens
  source 1..1465: mol_type = unassigned DNA
cgcgctcgccggagagctgggtgctaccgctgtttccgctgctgagccctgcccgccggccggcccgctcgctagctcgcttcccctcgcccagggggaaaggtcagcagcgtcctggagccgccgtgtcactccccgaaagccatgaactgcagcgagagccagcggctgcgaacccttctgagccgcctgttgctcgagctgcaccaccggggtaatgccagcggcttgggcgctggccctcgtcccagcatgggcatgggggtcgtgcctgaccctttcgtgggccgcgaggtgaccagcgccaagggcgacgacgcctatctctacatcctgctcatcatgatcttctacgcctgcttggccggaggcctcatcctggcctacacccgctcccgtaagctcgtcgaggccaaggacgagccgtcccaggcttgcgccgagcacgaatgggccccgggaggcgccctgaccgccgacgccgaggctgccgcgggctcccaggccgagggccgccgccagcttgcctccgaggggctgcctgccctcgcccagggcgctgagcgggtctaaaaccacagccccagattgctggttcgcgccctcctcatctcgctcatccctgggcgcgcctcccaccttccacccccaactcccttccagggttcgcctcatctgaggcccagataatggtgagaggccaggagaccttgtctggaaggccctggaaggagaagcaccaccttacccattcgggccagtttctccctcttcacccctgcgcctccacccctaccccgcacatccaactgcactaaactgcctctgctctcttgtcttcagacagccctgacagcacgctccagccctctgggaactgaatccaacacgtccaacacttggcactgaactgaagcaatgcattctatcagaactctgggccgtctaactggcagctgctccaggggctgccagggactgctcactctgcagagccaacgggcttgccaggccgactgcagcagctccagcttccagttgccttagggacagagacaaaggaaatgaagagacctcagacatcttttccctccctctctctttcagcagggagctagcaggacactaggaccagtctgtgggatagaatgaacttaatgggggacggaagggggaggagtgctcaacggggagggaaatgatctatgactccaaccgtatgattttcttgcctccccagttttcatcccagtggtaacgcctgatttttggtagctatgccatcttctgctgaggattaccattactgggtgtatcaccccagtacttccaaatgcctctcctctattgattcagttgttattgcagtgtctgcttcatccgtggaacttgaggctcagatgccccctgctctgtaaccctggggaatgtcagaggcaggtaataaaggttgtttaaacaataa

SEQ ID NO: 15153 - DNA, 2060 bp, Homo sapiens
  source 1..2060: mol_type = unassigned DNA
cttggctggaacctgagacggattcgctcccaaatgatgctccagtggcaggagcaactcaagttcatcattgtcctgagagagaggagcagcgcggttctcggccgggacagcagaacgccaggggaccctcacctgggcgcgccggggcacgggctttgattgtcctggggtcgcggagacccgcgcgcctgccctgcacgccgggcggcaacctttgcagtcgcgttggctgctgcgatcggccggcgggtccctgccgaaggctcggctgcttctgtccacctcttacacttcttcatttatcggtggatcatttcgagagtccgtcttgtaaatgtttggcactttgctactttattgcttctttctggcgacagttccagcactcgccgagaccggcggagaaaggcagctgagcccggagaagagcgaaatatggggacccgggctaaaagcagacgtcgtccttcccgcccgctatttctatattcaggcagtggatacatcagggaataaattcacatcttctccaggcgaaaaggtcttccaggtgaaagtctcagcaccagaggagcaattcactagagttggagtccaggttttagaccgaaaagatgggtccttcatagtaagatacagaatgtatgcaagctacaaaaatctgaaggtggaaattaaattccaagggcaacatgtggccaaatccccatatattttaaaagggccggtttaccatgagaactgtgactgtcctctgcaagatagtgcagcctggctacgggagatgaactgccctgaaaccattgctcagattcagagagatctggcacatttccctgctgtggatccagaaaagattgcagtagaaatcccaaaaagatttggacagaggcagagcctatgtcactacaccttaaaggataacaaggtttatatcaagactcatggtgaacatgtaggttttagaattttcatggatgccatactactttctttgactagaaaggtgaagatgccagatgtggagctctttgttaatttgggagactggcctttggaaaaaaagaaatccaattcaaacatccatccgatcttttcctggtgtggctccacagattccaaggatatcgtgatgcctacgtacgatttgactgattctgttctggaaaccatgggccgggtaagtctggatatgatgtccgtgcaagctaacacgggtcctccctgggaaagcaaaaattccactgccgtctggagagggcgagacagccgcaaagagagactcgagctggttaaactcagtagaaaacacccagaactcatagacgctgctttcaccaactttttcttctttaaacacgatgaaaacctgtatggtcccattgtgaaacatatttcattttttgatttcttcaagcataagtatcaaataaatatcgatggcactgtagcagcttatcgcctgccatatttgctagttggtgacagtgttgtgctgaagcaggattccatctactatgaacatttttacaatgagctgcagccctggaaacactacattccagttaagagcaacctgagcgatctgctagaaaaacttaaatgggcgaaagatcacgatgaagaggccaaaaagatagcaaaagcaggacaagaatttgcaagaaataatctcatgggcgatgacatattctgttattatttcaaacttttccaggaatatgccaatttacaagtgagtgagccccaaatccgagagggcatgaaaagggtagaaccacagactgaggacgacctcttcccttgtacttgccataggaaaaagaccaaagatgaactctgatatgcaaaataacttctattagaataatggtgctctgaagactcttcttaactaaaaagaagaatttttttaagtattaattccatggacaatataaaatctgtgtgattgtttgcagtatgaagacacatttctacttatgcagtattctcatgactgtactttaaagtacatttttagaattttataataaaaccacctttattttaaagga

SEQ ID NO: 15154 - DNA, 1957 bp, Homo sapiens
  source 1..1957: mol_type = unassigned DNA
agccccagccagatcccgcgtcaacggaggcggaacggcggaccccgtaccctggcagcatcggagcaccggcgggtgaaggcaaggtccctggactggtcatatacctcttgtggccctggcagaatcaagatgaggccctgtcatgcctccccagtgaggcctacagtctgagcagacagcatggcctgccactggcagtgaacaccatgtctgcaggaggtggccgggcctttgcttggcaagtgttcccccccatgcccacttgccgggtctatggcacagtggcacaccaagatgggcacctgctggtgttggggggttgtggccgggctggactgcccctggacactgctgagacactggacatggcctcgcacacatggctggcactggcacccctgcccactgcccgggctggtgcagctgcggtagttctgggcaagcaggtgctagtggtgggtggtgtggatgaggtccagagcccggtagctgctgtagaggccttcctgatggatgagggccgctgggagcgtcgggccaccctccctcaagcagccatgggggttgcaactgtggagagagatggtatggtgtatgctctggggggaatgggccctgacacggccccccaggcccaggtacgtgtgtatgagccccgtcgggactgctggctttcgctaccctccatgcccacaccctgctatggggcctccaccttcctgcacgggaacaagatctatgtcctggggggccgccagggcaagctcccggtgactgcttttgaagcctttgatctggaggcccgtacatggacccggcatccaagcctacccagccgtcgggcctttgctggctgcgccatggctgaaggcagcgtctttagcctgggtggcctgcagcagcctgggccccacaacttctactctcgcccacactttgtcaacactgtggagatgtttgacctggagcatgggtcctggaccaaattgccccgcagcctgcgcatgagggataagagggcagactttgtggttgggtcccttgggggccacattgtggccattgggggccttggaaaccagccatgtcctttgggctctgtggagagctttagccttgcacggcggcgctgggaggcattgcctgccatgcccactgcccgctgctcctgctctagtctgcaggctgggccccggctgtttgttattgggggtgtggcccagggccccagtcaagccgtggaggcactgtgtctgcgtgatggggtctgaaggcttggtgggagctgtccactggagcagctcattgccagaggcagctatttctatggctccttttgctgctgaggacactcactgtggctctgtgggatgagagaggcatgggggtgagcacttgaaacactgccttggggccttgggttaggggagcctttgtctttagtgcaggacacacatatgcttacacctacctttatcaccattcgttcatgaatcatgcctagctccatccttgccctgggacctactaggccttccatccaactgggaaatggggagaagcaaagctggcctcatgctcttcagggtcagttcctatctggagttgaccaggcctaccccagttgccattcctgaaaaatctcagctgccaggctgcctttagggtccctgcagacccaggagagttgagagggtgggggacacagagagaatagagaggatgtgggaactgccagagggccggagcgcaggagttcaagtggaggaatgctggctttgagccctctacactgctggttgtatgaccttggacaagtcacttcacctctctgtgcctcagcatcctcatctataaatggggatctctgaaaccttcctaccctacctacctcacagggctgttgtgaggacccagggagtttggatgtggaagtaaaagtgctgctaaaacc

SEQ ID NO: 15155 - DNA, 1930 bp, Homo sapiens
  source 1..1930: mol_type = unassigned DNA
cggaggcggaacggcggaccccgtaccctggcagcatcggagcaccggcgggtgaaggcaaggtccctggactggtcatatacctcttgtggccctggcagaatcaagatgaggccctgtcatgcctccccagtgaggcctacagtctgagcagacagcatggcctgccactggcagtgaacaccatgtctgcaggaggtggccgggcctttgcttggcaagtgttcccccccatgcccacttgccgggtctatggcacagtggcacaccaagatgggcacctgctggtgttggggggttgtggccgggctggactgcccctggacactgctgagacactggacatggcctcgcacacatggctggcactggcacccctgcccactgcccgggctggtgcagctgcggtagttctgggcaagcaggtgctagtggtgggtggtgtggatgaggtccagagcccggtagctgctgtagaggccttcctgatggatgagggccgctgggagcgtcgggccaccctccctcaagcagccatgggggttgcaactgtggagagagatggtatggtgtatgctctggggggaatgggccctgacacggccccccaggcccaggtacgtgtgtatgagccccgtcgggactgctggctttcgctaccctccatgcccacaccctgctatggggcctccaccttcctgcacgggaacaagatctatgtcctggggggccgccagggcaagctcccggtgactgcttttgaagcctttgatctggaggcccgtacatggacccggcatccaagcctacccagccgtcgggcctttgctggctgcgccatggctgaaggcagcgtctttagcctgggtggcctgcagcagcctgggccccacaacttctactctcgcccacactttgtcaacactgtggagatgtttgacctggagcatgggtcctggaccaaattgccccgcagcctgcgcatgagggataagagggcagactttgtggttgggtcccttgggggccacattgtggccattgggggccttggaaaccagccatgtcctttgggctctgtggagagctttagccttgcacggcggcgctgggaggcattgcctgccatgcccactgcccgctgctcctgctctagtctgcaggctgggccccggctgtttgttattgggggtgtggcccagggccccagtcaagccgtggaggcactgtgtctgcgtgatggggaaggcttggtgggagctgtccactggagcagctcattgccagaggcagctatttctatggctccttttgctgctgaggacactcactgtggctctgtgggatgagagaggcatgggggtgagcacttgaaacactgccttggggccttgggttaggggagcctttgtctttagtgcaggacacacatatgcttacacctacctttatcaccattcgttcatgaatcatgcctagctccatccttgccctgggacctactaggccttccatccaactgggaaatggggagaagcaaagctggcctcatgctcttcagggtcagttcctatctggagttgaccaggcctaccccagttgccattcctgaaaaatctcagctgccaggctgcctttagggtccctgcagacccaggagagttgagagggtgggggacacagagagaatagagaggatgtgggaactgccagagggccggagcgcaggagttcaagtggaggaatgctggctttgagccctctacactgctggttgtatgaccttggacaagtcacttcacctctctgtgcctcagcatcctcatctataaatggggatctctgaaaccttcctaccctacctacctcacagggctgttgtgaggacccagggagtttggatgtggaagtaaaagtgctgctaaaacct

SEQ ID NO: 15156 - DNA, 2464 bp, Homo sapiens
  source 1..2464: mol_type = unassigned DNA
ctttttacagctagacctgtgtgctgcaaggagctaaggccttcagtgtccccttccttacccaggtttctcacagaatggattcccagcgggaacttgcagaggaactgcggctttaccaatccacccttcttcaggatggtctaaaagatctcctggatgagaaaaaattcatcgattgcaccctaaaagcaggtgacaaaagtcttccttgccacagattgattttgtcagcttgtagtccttacttccgtgagtactttttatctgaaattgatgaggcgaaaaaaaaggaggtagtgctagacaatgtggatcctgctatacttgatttaatcatcaaatacctgtactctgccagtattgatctcaatgacggaaatgtgcaagatatttttgcattggccagccgctttcagatcccctcagtgtttactgtctgcgtttcttatcttcagaaaagacttgctcctggtaactgtctagccatcctaagattaggacttcttcttgactgcccgagactcgccatttctgcccgtgaatttgtgtctgatcgctttgtacagatttgtaaggaagaggactttatgcaactgtctccacaggaactgatctcagtcatttcaaatgacagcctaaatgtagaaaaagaagaagcagtatttgaggcagtgatgaaatgggtgcgaacagacaaggaaaacagggttaaaaaccttagtgaagtgtttgattgtatccgttttcgccttatgacagaaaaatattttaaggatcatgttgagaaagatgatataattaaaagcaacccagacctccagaaaaaaatcaaagttctaaaagatgctttcgcaggcaaactcccagaacctagcaaaaatgccgcgaagactggggctggtgaggtgaatggtgatgttggtgatgaagatttacttcctggttacctgaatgacattcccaggcatggaatgtttgtaaaagacctcatcctcttggttaatgacacagcagcagtggcttatgaccccacggaaaatgaatgctaccttactgcactggctgagcagattcccagaaatcattccagcattgttacccagcaaaatcagatatatgtggtaggaggactatatgtggatgaagaaaataaggatcaacctctacagtcatacttcttccagctcgatagcatagcatctgaatgggttggacttccacctctgccttcagccaggtgtctcttcggtctgggagaggtggatgataaaatctatgtagttgcaggcaaagaccttcaaacagaggcttcgctggattcagtattatgctatgatcctgtggctgcaaaatggaacgaagtaaaaaaactccctatcaaagtctatggccataatgtgatttcacataaagggatgatatattgtctaggaggaaagacagatgacaaaaaatgtacaaacagggtgtttatcttcaaccccaaaaaaggagattggaaagatctggctccaatgaaaattcctcgttccatgtttggagtagcagtccataaaggcaaaattgtgattgcaggaggtgtcactgaagatggtctttcagcttcagttgaagcttttgaccttacaacaaataaatgggatgtaatgaccgaatttccccaagaaagaagctccatcagtttggtcagcctggctggatctctgtatgcaattggtggttttgctatgattcaactggagtctaaagaatttgcacccactgaagtcaatgacatatggaagtatgaagatgataaaaaagaatgggctgggatgttgaaggaaatacgttatgcttcaggagctagttgcctagcaacacgtttaaatctcttcaaactgtctaaactgtgaacaaggtgacaaaacataatagattgggaggtggtttgtttggtgaatggggctttaatttattctgttttttaaaagcttgtacagacactcatgtagaaattattcaagaagttattgtctaagagatgagcagtaggtaagaaaacctcagtcattgactcttcaatgtaatgatcagagtttaaaaccattttctaataataaattaaatcttcagttgaacaaattattttgtgaatctgtttcactcaatggattgtaaagaaggctcctaaatttgagttgtttgctaatcatttcatttgcatcattagggtatccttaaactgattttctattacaattggaagtggagaatatgtgcatctacactaaaaaaatgtttaagatatcaaaaacctctcctcgtgcttcaaaatgacaggaatcctgtgcattatactaagaattacatgccataagatgacttcagaaatcctacttcagaagtgtaataaatggatggggaaatcgtttgatggggaaaagtctcttgtaagtaaaagtagtcaaattcaaatggc

SEQ ID NO: 15157 - DNA, 3123 bp, Homo sapiens
  source 1..3123: mol_type = unassigned DNA
atggcacggggtccacagaccctggtgcaggtgtgggtgggcggccagctcttccaagccgaccgcgccctgctggtggagcactgtggcttcttccgaggcctcttccgctccggcatgcgggagacccgcgcagcagaggtgcgcctgggcgttctgagcgcgggaggtttccgcgccacgctgcaggtgctgcgcggcgaccggccggcgctggcggcggaggacgagctgctgcaggccgtggagtgcgccgccttcctccaggcgccggcgctggctcgctttctggagcacaacctcacgtcggacaactgcgcattgctgtgcgacgcggccgccgccttcggcctgcgcgacgtgttccacagtgccgcgctcttcatctgcgacggcgagcgcgagctggcggccgaactggcgctgcctgaggcccgcgcctacgtggcggccctgcggcccagcagctacgcggccgtgagcacgcacacgcccgcgcccggcttcctggaggacgcctcgcgcacgctgtgttacctggacgaggaagaggacgcgtggcgcacgctggctgcgctgcccctggaggccagcacgttgctggccggggtggccacgctgggcaacaagctttacatcgtggggggcgtgcgcggcgccagcaaggaggtggtagagctgggcttctgctacgaccccgacggcggcacgtggcacgagttccccagcccgcaccagccgcgctatgacacagcgctggccggcttcgacggccgcctctacgccatcggcggcgaattccagaggacgcccatcagctccgtggagcgctacgacccagccgcgggctgctggagtttcgtggccgacctgccgcagccggccgccggcgtgccctgcgcccaggcttgtggccgtctcttcgtgtgcctgtggcggccggccgacaccaccgccgtggtggagtacgcagtgcggaccgacgcgtggctgccagtggccgagctgcggcgtccgcagagctatggccactgcatggtggcccaccgcgacagcctctatgtggtgcgcaacggaccttccgacgacttcctgcactgcgccatcgactgtctcaacctggccacgggccagtggacggcgctgcccggccagttcgtcaacagcaagggagcgctcttcacggccgtggtgcgcggtgacaccgtctatacggtcaaccgcatgttcacgctgctctacgccatcgagggcggcacctggcggctgctcagggagaaagccggcttcccgcggcccggctccttgcagacctttctcctaaggctgcctcctggcgctcctgggcctgtgacttcgacaacggcagaactgtgacctctgggctggctttaggagggaggagacgccgcgactcctccctgagctatggctgagtgtgtgaggccggccttagaagtagctggcaacttccctctttctactgagacacccaggtttggtgccttctggtggtgtggacatgttcaagaagctcagggagcagtgatgatgccctcaaattacttgggctctgctgagagctggtgggtcacaatgtcagtgaacagggtagggggagttgggatttgaataatccgggcttatatgtaatgggctagtgattgagcatcgctgggagcgacttaaatgatgttaatcaaactgcaagtagtaggcaagaattaggcacctactgtatgcccaatacagtgttatgcgtaatgagagccgtagttgccacacagggatccaggaagcttaaaggataacccagaaaacaatcttaacagttacaggacaacaaaaaggtttacacacaacttgatccacagagttgaaggcaacatgcaaaaaaatttaaaaccgcatacaatataataaaataaagtgctgaagaaatcagggcaaagggaaaataggaagagaaaaaatatataactccagaaaagaagagagtgtgcaaactctatggaggagatgagcaggataccattagctgctgaaaggggaggcttagaccatggaggctgagagctcagaagagaagcagggttggggaaggctggagcagatggggagggtctctgcaagtccagccataccagcagagcagcagtagttggggcatctagagaggggatgagactgggccagcttgcagcagataatgactgagctgagcctggagtgagacctgtgggggcgagaggattcttcacgttcctttttggaacccttaggggagcacccaggtgtaagcccttgcccaccctgtttttgccatcaccacggggcagtggactgttaacccacatgacttcaggtcagttgaggtatgagccaaatcctgcctcatcttcctcagttgtagcccctcctccacattctacaggtttgttctcttcctgtcctattctgccctttgcaattccctgggctggaatgcctagtctcctcctctctccctgtcagtgctctaccatcctctgtgcagcattggctcacccagctcttcgttttcctgacctgggctgcctgcattgctcattggacccctggctgtaacatcattgtgtgtgcacaaccacgtgtgtggattgtaagggcagagatcctgttaagtgagctgggggacttccctgtcccagattaaaatgatgatgccttgaaagaacccaggctacagaggccactagttaggaacctagtgctgacctctgttgttggatgaggactctcgttccttcatcaaaatccccagctctggcttctgggcagatgcctgtcccagccctttccagcctctccatggccttgggaagacttctctgggtggttctcattggtctccatcccccaggacctgaggcccatggggaatcttggcctcgtcagaagtggagaatgcagtgtcagcatgacacctccggggcatggaggctcgcgccagggctgcacctagctgcctcttctcctggcctatgtcccaaccctggagaatgctgccctcagaagcctgggaccttccagccctggagtagcctagtctgataagtctcaacaataaaccctgacttttgc

SEQ ID NO: 15158 - DNA, 4115 bp, Homo sapiens
  source 1..4115: mol_type = unassigned DNA
gaaaattgtactgtgaggaccttgacagcttcacaggcgggctttttcttttgcctccctatatgcgctagaatatctatttttctcttttacaaactgactatataaaaccacctcttctggcattgcagaaagcaattgactttctcagagccacccggcaggctatcggggcatcctcgaaaaggccagggacaggggcgcaggtgcaccaagagatctggcgaggggtacgcttcctcgagacttggggctctttctctctgcgctctccagacactgaactctgagctgcaaggacaagaacgccaccaccttccctactaaggctctgccacaagcgcatcccagtgaggtgtatccagctgcagccgcctccggagcttcggagcgctcagacctccctccctcgcgcatctccagcctaagggttgtcccacctcgccataacacggggctctcgcgcgggcatcgaggattctcagcttttggcgtcccagtcctgcctctgctcctgcctggtggtgtccccacgcccaggtcctgcggacccgaccacggctgaaacgcgcggctttgccgtctgcgctccagccttcgcctggcagagcgcgcagcccacctagcgtcttctggctctaggggtgcagagggcgcatcccgcctcttcctccgcccccgggccccgctgtcctcccccacctgctgaccagcctactcctgcgtgagctgccagccttttgccttctgtgcgtaaagcatgtcaggctctgggcgaaaagacttcgatgtgaagcacattctgcgactccgctggaaactcttcagccacccgtctccttccaccggcggcccggcggggggaggctgcctgcaacaggacggcagtggcagctttgagcactggggacccagccagagtcgcctgctcaaaagccaagagagaagcggtgtgagcactttctggaagaagccttcctcctcttcctcttcatcgtcctccccgtcctcttcctcctcttccttcaatccgctgaatggcaccctgcttccagttgccacgaggctgcagcaaggggctcctgggcagggcactcagcagccagccaggactctcttctacgtggagtcactagaggaggaggtggtgccaggcatggactttcctggaccacacgaaaaagggctggttctgcaagagctcaaagtggagccagacaactctagccaggcaacaggtgaaggatgtggacacaggctgtcatcaaccggccattcaatgacacctcaaagtgatttggactccagtagctctgaagaattctatcaagctgttcatcatgctgagcaaaccttcagaaagatggaaagttatttgaagcagcagcaactttgtgatgttatcctgattgttgggaaccgaaagatacctgcacataggcttgttctgagttcagtctccgactattttgcggccatgtttacaagtgatgtttgtgaagccaagcaagaggagatcaaaatggaaggcatagaccccaatgctctctgggaccttgtccaatttgcatatacaggctgcttggaattaaaagaggacaccattgagaaccttcttgctgcagcgtgccttcttcagcttccacaggtggtggaagtgtgctgccacttcctcatgaagcttttgcatccatctaactgtttaggaattcgagccttcgcagatgctcaaggatgcattgagttaatgaaggtggcccacagctacacaatggaaaacataatggaagttatcagaaatcaagagtttttactccttccagctgaggagctccataaactactggccagtgatgatgtcaatgttcctgatgaagaaaccatcttccatgcattgatgatgtgggtcaagtatgacatgcagagtagatgcaatgacctgagcatgcttcttgcctttataagactgccactgcttccaccacagatattggctgacctagaaaatcatgcattatttaagaatgatctggaatgtcaaaagctgattctagaagcaatgaaataccatctattgccagaaagaagaactttaatgcaaagtccgagaactaaacccagaaaatctacagtcggaactttgtatgctgtaggaggaatggataacaacaaaggagctacaactatagagaaatatgatctgagaacaaatctgtggatccaggcagggatgatgaatggcagaaggctgcagtttggtgtggctgttattgatgacaaactctttgtaattggaggtcgagatggcttaaagacattgaacactgttgaatgttacaatcccaaaaccaagacatggactgtcttaccaccaatgtcaacacacagacatggtctaggtgtaacagtacttgaaggccctatttatgctgtgggaggccatgatggctggagctatctgaatacagtggaaaggtgggatccacagagtcaacaatggacatttgtagccagtatgtcaattgctcggagcacagttggtgtagcagcattgaatggcaagttgtattcagttggaggtcgtgatggaagttcctgtttgagttcaatggaatattatgatcctcatacaaataagtggaacatgtgtgctcccatgtgtaagaggagagggggtgtcggagtggccacatgtgacggttttctttatgcagtaggaggtcatgatgctcctgcttcaaatcactgttcccggctactggattatgtagaaagatatgatcccaaaacagacacttggaccatggtggctcctttgagtatgcccagagatgctgttggggtctgtctccttggtgacagattatatgctgttggtggctatgatggacagacatacctcaacactatggaatcctatgacccacaaactaatgagtggacacagatggcttccttgaatattgggagagcaggtgcctgtgtggtagtcatcaagcaaccttgacttattgatattttacttggaaagattttacttgctggagtggttatttttatattgaatggcaagaatgagaacttccagagatgaaaactcttcaagaacaaggatctctgtagcgttacctactgatgttgaaagagttagtagatcaaacagaatagtaggaaacaagaaaacattaaacttatacaggaaaaatgtctggccatatgttagttagttcgggaatggttattggtaatttgttttgtattatagcatacaataactagagttaccaaaggcttgttttttcttgagcagttgaaaggagagaccaatatttgtgacatggatagtttcatgaccacaactcattcaatcattttatagtctatggcaatatccaagagattgccaagagtagaagacagaatatttcatctgacagtatctgattggtttactgtttttctaatcatatgtggtcataacgggaagcagaattatgctttattcaaacaaacctgcttctgcctcattttcctaagctatgagaacaattagagaaacagattcatgcttgtatcttgcattcagaaaacaaactgtcctactaatcaaagctgcatatctcatcagagataatggttgaattttattgcaaccatattggcaatctgaaactggcaaacacaaaggattgttttcactaggcttaccattttgctttgcttttttaacacactgagccaaagatgcagtgtaattattgggcttttgccttatgttgagttcagtgtaagcatggaagctagtgattctgaatgatatatatatccattgcatgttgaactcctttagaattttgttcttaaacaaacttagaatttcaaaagaaaaacatatgatccattaagttggagtgtttatgattattgctagaaagaaggcagacttcatattctcatcgcccatttttcaaacttgttacattgatctgtacattattttaagccacatgtttgtaattgtttaaaacaaagtggaaacattacacaatgtccttaataaataggcccatgtaaattttaattacaattaataaatgatcaaaaaatttgcattt

SEQ ID NO: 15159 - DNA, 2137 bp, Homo sapiens
  source 1..2137: mol_type = unassigned DNA
aaaagacttcgatgtgaagcacattctgcgactccgctggaaactcttcagccacccgtctccttccaccggcggcccggcggggggaggctgcctgcaacaggacggcagtggcagctttgagcactggggacccagccagagtcgcctgctcaaaagccaagagagaagcggtgtgagcactttctggaagaagccttcctcctcttcctcttcatcgtcctccccgtcctcttcctcctcttccttcaatccgctgaatggcaccctgcttccagttgccacgaggctgcagcaaggggctcctgggcagggcactcagcagccagccaggactctcttctacgtggagtcactagaggaggaggtggtgccaggcatggactttcctggaccacacgaaaaagggctggttctgcaagagctcaaagtggagccagacaactctagccaggcaacaggtgaaggatgtggacacaggcttgttctgagttcagtctccgactattttgcggccatgtttacaagtgatgtttgtgaagccaagcaagaggagatcaaaatggaaggcatagaccccaatgctctctgggaccttgtccaatttgcatatacaggctgcttggaattaaaagaggacaccattgagaaccttcttgctgcagcgtgccttcttcagcttccacaggtggtggaagtgtgctgccacttcctcatgaagcttttgcatccatctaactgtttaggaattcgagccttcgcagatgctcaaggatgcattgagttaatgaaggtggcccacagctacacaatggaaaacataatggaagttatcagaaatcaagagtttttactccttccagctgaggagctccataaactactggccagtgatgatgtcaatgttcctgatgaagaaaccatcttccatgcattgatgatgtgggtcaagtatgacatgcagagtagatgcaatgacctgagcatgcttcttgcctttataagactgccactgcttccaccacagatattggctgacctagaaaatcatgcattatttaagaatgatctggaatgtcaaaagctgattctagaagcaatgaaataccatctattgccagaaagaagaactttaatgcaaagtccgagaactaaacccagaaaatctacagtcggaactttgtatgctgtaggaggaatggataacaacaaaggagctacaactatagagaaatatgatctgagaacaaatctgtggatccaggcagggatgatgaatggcagaaggctgcagtttggtgtggctgttattgatgacaaactctttgtaattggaggtcgagatggcttaaagacattgaacactgttgaatgttacaatcccaaaaccaagacatggactgtcttaccaccaatgtcaacacacagacatggtctaggtgtaacagtacttgaaggccctatttatgctgtgggaggccatgatggctggagctatctgaatacagtggaaaggtgggatccacagagtcaacaatggacatttgtagccagtatgtcaattgctcggagcacagttggtgtagcagcattgaatggcaagttgtattcagttggaggtcgtgatggaagttcctgtttgagttcaatggaatattatgatcctcatacaaataagtggaacatgtgtgctcccatgtgtaagaggagagggggtgtcggagtggccacatgtgacggttttctttatgcagtaggaggtcatgatgctcctgcttcaaatcactgttcccggctactggattatgtagaaagatatgatcccaaaacagacacttggaccatggtggctcctttgagtatgcccagagatgctgttggggtctgtctccttggtgacagattatatgctgttggtggctatgatggacagacatacctcaacactatggaatcctatgacccacaaactaatgagtggacacagatggcttccttgaatattgggagagcaggtgcctgtgtggtagtcatcaagcaaccttgacttattgatattttacttggaaagattttacttgctggagtggttatttttatattgaatggcaagaatgagaacttccagagatgaaaa

SEQ ID NO: 15160 - DNA, 1555 bp, Homo sapiens
  source 1..1555: mol_type = unassigned DNA
actcactgagccccaggcccaaggataatgatgtgttgtttcttggtagcataatttgtcacacgtacattttttcttcttcttctcttgcagaaagctctgctccctctctctctccctctctctttctctcttttctccctctcctacattttcttgctgttgctaattcatggtgatcaaatgatgtacgacaaaataaattgtaaagagtgactgcctggagttgggaaccagaaggtgttttccccctcccaaggagacagcaaacctttaaaaaggaaggacaattgatttttggggggagcttaagtgagccttgactttgcagctggttgagaacaggttggaggagggtttaaagccaggtgcaccgagtcagctcgccatgtccagatccggggacaggacctccaccttcgaccccagccacagcgacaacctgctgcacggcctcaacctgctgtggaggaagcagctgttttgcgacgtgaccctgacggcccagggccagcagttccattgccacaaggccgtgctggcctcctgctcgcagtacttccgatcgctcttctccagccacccccctctcgggggaggggtcggcggccaggacggcctgggggcccccaaggaccagcagcagccgccgcagcagcagccgtcacagcagcagcagccgccgccgcaggaggagcccgggactccttcttcctcccccgacgacaagctgctgaccagcccccgggccatcaacaacctggtgctgcagggctgctcgtccatcgggctgcgcctggtgctcgagtacctctacacggccaacgtgaccctgtccctggacacggtggaggaggtgctgtcggtcagcaagatcctgcacatcccccaggtcaccaagctctgcgtgcagttcctcaacgaccagatctcggtgcagaactacaagcaggtgtgcaagatcgccgcgctgcacggcctggaggagaccaagaagctggccaacaagtacctggtggaggatgtgctgctgctcaacttcgaggagatgcgcgccctgctggactcgctgccgccccccgtggagtcggagctggcgctcttccagatgtccgtgctgtggctggagcacgaccgcgagacccgcatgcagtatgcgcctgacctcatgaagcgcctccgcttcgccctcatcccggccccggagctggtggagcgggtccagtcagtggatttcatgcgaaccgacccggtctgccagaagctgctgctggacgccatgaactaccacctgatgcccttcaggcagcactgcaggcagagcctggccagcagaattcgctctaacaagaaaatgctgttattggttggagggctgcctcctggaccggaccggctccccagcaatttggttcagtattacgacgatgaaaagaagacatggaaaatactcacaatcacaggaccacaccccatttcagggaagcaggaaagtgcaagctcaccagagttcagaaggaggaaaaccagagaattttcaaacaacacaatgtga

SEQ ID NO: 15161 - DNA, 4261 bp, Homo sapiens
  source 1..4261: mol_type = unassigned DNA
actcactgagccccaggcccaaggataatgatgtgttgtttcttggtagcataatttgtcacacgtacattttttcttcttcttctcttgcagaaagctctgctccctctctctctccctctctctttctctcttttctccctctcctacattttcttgctgttgctaattcatggtgatcaaatgatgtacgacaaaataaattgtaaagagtgactgcctggagttgggaaccagaaggtgttttccccctcccaaggagacagcaaacctttaaaaaggaaggacaattgatttttggggggagcttaagtgagccttgactttgcagctggttgagaacaggttggaggagggtttaaagccaggtgcaccgagtcagctcgccatgtccagatccggggacaggacctccaccttcgaccccagccacagcgacaacctgctgcacggcctcaacctgctgtggaggaagcagctgttttgcgacgtgaccctgacggcccagggccagcagttccattgccacaaggccgtgctggcctcctgctcgcagtacttccgatcgctcttctccagccacccccctctcgggggaggggtcggcggccaggacggcctgggggcccccaaggaccagcagcagccgccgcagcagcagccgtcacagcagcagcagccgccgccgcaggaggagcccgggactccttcttcctcccccgacgacaagctgctgaccagcccccgggccatcaacaacctggtgctgcagggctgctcgtccatcgggctgcgcctggtgctcgagtacctctacacggccaacgtgaccctgtccctggacacggtggaggaggtgctgtcggtcagcaagatcctgcacatcccccaggtcaccaagctctgcgtgcagttcctcaacgaccagatctcggtgcagaactacaagcaggtgtgcaagatcgccgcgctgcacggcctggaggagaccaagaagctggccaacaagtacctggtggaggatgtgctgctgctcaacttcgaggagatgcgcgccctgctggactcgctgccgccccccgtggagtcggagctggcgctcttccagatgtccgtgctgtggctggagcacgaccgcgagacccgcatgcagtatgcgcctgacctcatgaagcgcctccgcttcgccctcatcccggccccggagctggtggagcgggtccagtcagtggatttcatgcgaaccgacccggtctgccagaagctgctgctggacgccatgaactaccacctgatgcccttcaggcagcactgcaggcagagcctggccagcagaattcgctctaacaagaaaatgctgttattggttggagggctgcctcctggaccggaccggctccccagcaatttggttcagtattacgacgatgaaaagaagacatggaaaatactcacaattatgccatacaacagtgcccaccactgcgttgtggaggtggaaaacttcttgttcgtgttgggtggagaggaccagtggaatccgaatggaaaacacagtacaaattttgtcagccgatatgatcctcgatttaatagctggattcaacttccacccatgcaggaaagaagagccagtttctatgcatgtcggttggacaagcatttatacgtaattggtggaaggaatgaaactggctacttgtccagcgtggagtgctataacctagaaacgaatgaatggcgctatgtgtcctctttgccacagcctctggcggctcatgcgggagcagtgcacaatgggaaaatatacatttcagggggtgtacacaatggagaatatgtcccatggctatattgctatgacccagtaatggatgtctgggctcgaaaacaagatatgaacacaaaacgtgcaattcacactttggctgtaatgaatgatcgcttgtatgcaattggaggaaatcatttgaaaggtttctcccaccttgatgtaatgcttgtggaatgctatgacccaaaaggtgaccagtggaatatactccaaactcccattttggagggtcgaagtggccctggctgtgcagtgcttgatgacagcatttaccttgtgggaggctacagctggagtatgggggcctacaagtcatctacaatatgctattgtccagagaaaggaacctggacagaactcgaaggagatgtagcagaaccgttggcaggccctgcctgtgtgacagttattctgccctcttgtgtaccatacaacaaataacaccaggaaactctggaatgaacagtatcacattctaggaagcaatggcaggtgacatcactattataataggaacaatgcattctaatggtacaactgccaaaacccacccttggtttctgatgatttataagtaactacaaaagaaagagacctgttcttgaacagatactatgtctataactcagatcgcaccaaacttcctgtggtgacagactcttccatttcagactggttttaacttatcccagctttacaaaaactcttcatgtgaatcttaacttgcaaaaggagaaagataaaatacagaagactggccccagagagacctcagatcagtattgtgcattgtagtctacctgcatgtgatctatgttgacatttcggggatattgtgttcaagaatgattccaaatttgagccaccaaaatacactgcattacagaaattgccacttgattctgtactcttaacctttggctacttcacagactccattggcaacactgttattgaaaatcatgtaagattaaagagaggcattttcgtttctatacaacttcatttcatacaccttctgcccttacagcacctcatgggatcagaaaagagaaagatgttggctcttgtaataaatgctttctaccctataggttctaggctagacagagtcgtcatttctgtgtcctcaattttatctgaaagattaaaacaaaatatattatgtcactattcagttcatggaggtttgtgctttttcatattttgtgatatataagtagtgaacacacatgttatttacttcaaaagacaggattgacaaattcagtcaatactattttagagattctgttagatgatatgtctgacccaaatttaatccataataaaaaaaaatgggagattgttttcaggaattcagggatgaaaagaaagaataatttccattaagtagaattccagttgtctttctgtttctaaaacacagaacttacaagagccacaggagccaattatagcacctgacagaatacttctcctcttcctcaccttcgggtgcctctagacacttgacttacgatcgttattcccccaattcatcatattttgtttgttatcaccagagatgcctgaactcagttaagcgagcaattgctagttgtcttgaggagcatgaggaattcaggagcagaaggtcaggatagcatgagatagtctcaatgtggccaaccaaaaggacaaaactgacaggaatgcacattcgattttcaagccctccagagcttgaacaacaactttaggagtaaataaaagcctaaaatatattttaaccatccagagatggtgttgaatccttcaacaaatgtgtcattcaaaacagtaattagggaaatcccacagatgaaaaatgccttagtgataagctttcatggcagagcacgtcaagataaatgggtatactggaatccgatgccgtttctacagtaaagtgcaatcttcgttgtttttgtatttatttgtatgttcagatccaaaggatccgttgtaaaaatatatatatataaatatatgtatatccagtgcaatcaactgtcatttctttttccttaaaacatatgagtatatagaaagaaaagttacagtactctgtgggaaaatctcagctgacatcatgaatagaatgaggtctgcttcagaaccttttgttgtcaactgtcactgtttcttccaaaagtcacaatttgtacaagaacctttgctttccttagacttgttctgcattttattttttatttctcaccaaaataaaagcatttatgagaattataagtaaagctttctgtatttcagagagacataagttactagaaagtgaaaagtgaataaataagtcacagagaatgtaaattttgtacagtattagaatgtgtaaatgaagcttgcttggaaggggaaaactttaaataaaaactttatgtactaatt

SEQ ID NO: 15162 - DNA, 2442 bp, Homo sapiens
  source 1..2442: mol_type = unassigned DNA
tttttttccttgccaccccttggcctgtttgcctccactcccattaacatccctccaccatggatcccgtgtgccggatttgagacttgcaggcagtgtctttaggaaggaactttaccgggcctcactgccagagctgggctagaacagaggccagtggaaactattaggaagactcagcttttcatgaagttagatttttagcctgagctttaagtcaaagaaagatgacctggacttaaagtgccttatggtatggttggaagcacggccccagattctctttgtatgcacaaagcagggtcatcagaagcctctcgattcaaaagatgataataccgaaaaacactgcccagtgacagtgaatccttggcatatgaagaaagctttcaaagtcatgaacgaattaagaagtcaaaatttgctgtgcgatgtcacaattgtggcagaagacatggaaatttctgctcatagagtggtgctggccgcctgtagtccttattttcatgccatgtttacaggtgagatgagtgagagccgagcaaagagagttagaataaaagaggtagatggctggaccctgaggatgctaattgattatgtttacactgcagaaattcaggttacagaagaaaatgtacaggtacttctcccagcagctggtctcttacagttacaggatgtgaagaagacttgttgtgaatttttggaatcccagcttcaccctgtcaactgcttaggaatccgggcttttgctgatatgcatgcatgtaccgaccttctgaacaaggccaacacctatgcagagcaacattttgcagatgttgtacttagtgaagaatttctcaatcttggcatcgaacaagtgtgcagcttaatctcaagtgacaaacttaccatttcttcagaagagaaggtatttgaagcagtaatagcatgggtgaaccatgacaaggatgtgaggcaagagtttatggcccgactgatggaacatgtacggttacctttgcttcctcgggaatatttagttcagagggttgaagaggaagcattggtcaagaatagcagtgcttgcaaagattacctcattgaagcaatgaagtaccatttgctgccaacagagcagcgtatattaatgaagagtgtccggacccggctgaggacacccatgaaccttcccaaattgatggtggtggttgggggccaagcaccaaaggctatccggagtgtggaatgctatgactttaaagaagaaaggtggcaccaagtagcagagttgccttccaggaggtgcagggcaggcatggtctacatggctggacttgtttttgctgttggtggctttaatggctcattaagagttcgcactgtagattcctacgaccctgtgaaggaccagtggaccagcgttgctaacatgagagaccggagaagcactttgggagctgctgtgttaaatggattattatacgctgtgggaggctttgatgggagtacaggtttgtcatctgtggaagcatacaacataaagtctaatgagtggtttcatgtagctcccatgaatacaaggaggagcagtgttggtgtgggtgttgttggaggtttgctctatgctgtaggaggttatgatggagcatcacgtcagtgtcttagcacagtagaatgctataatgctacaacaaatgagtggacctatatagcagaaatgagcaccaggcggagtggagcaggtgttggtgtgttaaacaatttattgtatgctgtaggaggtcatgatggccctttagtacgaaaaagtgttgaagtatatgatcccaccactaacgcatggagacaggttgcagatatgaacatgtgcagaagaaatgcaggagtttgtgcagttaatggtctgttatatgttgttggaggggatgatggttcctgtaacttggcgtcagtagaatattataacccaacaaccgataaatggacagttgtgtcatcgtgtatgagcacagggagaagttatgcaggggtcacagttattgataaaccattatgagcctgaaggacattttcagcatatttatacatgagaaacagccttcaacaagtatttgtgaagtgactgagaatctagcacttctccacttgtagctgcactttaagtctcagcagaagatacgatcgtctgcctttataggcctcagatactgaagattatttttggtagaagcaccgtgtaggctttttctgcaatgagcagcagctgactgaattttcataagaaacttggactgcaggacttaatctgtagtctttagacaacagttgctttcataaagactagttcttatcaaccttgaatgactacagattattttgtgaaggaggatgaagtaatgtgtgttcttgtaaaattaaattttatctttatttcttctaaaaatctgtatacca

SEQ ID NO: 15163 - DNA, 3134 bp, Homo sapiens
  source 1..3134: mol_type = unassigned DNA
gcgcccgccggtcccgtcgccgccgccccgcactcgggcgagcgcgggagccgcgcagtagacggagcgcgcccggccgagcgggccatggccgcgggggccgccgccgcaggtggtggcgcgcggtgaggagagcgcggcgccccctccggggcggatggaacgcggctcggcgggcgggcagtgccggcgtccgcggctggaatggtgctggctgtgttggtcggtgcctgcgttctgaagcccgagaggagccacaatggagacgccgccgctgcctcccgcatgcacaaagcagggtcatcagaagcctctcgattcaaaagatgataataccgaaaaacactgcccagtgacagtgaatccttggcatatgaagaaagctttcaaagtcatgaacgaattaagaagtcaaaatttgctgtgcgatgtcacaattgtggcagaagacatggaaatttctgctcatagagtggtgctggccgcctgtagtccttattttcatgccatgtttacaggtgagatgagtgagagccgagcaaagagagttagaataaaagaggtagatggctggaccctgaggatgctaattgattatgtttacactgcagaaattcaggttacagaagaaaatgtacaggtacttctcccagcagctggtctcttacagttacaggatgtgaagaagacttgttgtgaatttttggaatcccagcttcaccctgtcaactgcttaggaatccgggcttttgctgatatgcatgcatgtaccgaccttctgaacaaggccaacacctatgcagagcaacattttgcagatgttgtacttagtgaagaatttctcaatcttggcatcgaacaagtgtgcagcttaatctcaagtgacaaacttaccatttcttcagaagagaaggtatttgaagcagtaatagcatgggtgaaccatgacaaggatgtgaggcaagagtttatggcccgactgatggaacatgtacggttacctttgcttcctcgggaatatttagttcagagggttgaagaggaagcattggtcaagaatagcagtgcttgcaaagattacctcattgaagcaatgaagtaccatttgctgccaacagagcagcgtatattaatgaagagtgtccggacccggctgaggacacccatgaaccttcccaaattgatggtggtggttgggggccaagcaccaaaggctatccggagtgtggaatgctatgactttaaagaagaaaggtggcaccaagtagcagagttgccttccaggaggtgcagggcaggcatggtctacatggctggacttgtttttgctgttggtggctttaatggctcattaagagttcgcactgtagattcctacgaccctgtgaaggaccagtggaccagcgttgctaacatgagagaccggagaagcactttgggagctgctgtgttaaatggattattatacgctgtgggaggctttgatgggagtacaggtttgtcatctgtggaagcatacaacataaagtctaatgagtggtttcatgtagctcccatgaatacaaggaggagcagtgttggtgtgggtgttgttggaggtttgctctatgctgtaggaggttatgatggagcatcacgtcagtgtcttagcacagtagaatgctataatgctacaacaaatgagtggacctatatagcagaaatgagcaccaggcggagtggagcaggtgttggtgtgttaaacaatttattgtatgctgtaggaggtcatgatggccctttagtacgaaaaagtgttgaagtatatgatcccaccactaacgcatggagacaggttgcagatatgaacatgtgcagaagaaatgcaggagtttgtgcagttaatggtctgttatatgttgttggaggggatgatggttcctgtaacttggcgtcagtagaatattataacccaacaaccgataaatggacagttgtgtcatcgtgtatgagcacagggagaagttatgcaggggtcacagttattgataaaccattatgagcctgaaggacattttcagcatatttatacatgagaaacagccttcaacaagtatttgtgaagtgactgagaatctagcacttctccacttgtagctgcactttaagtctcagcagaagatacgatcgtctgcctttataggcctcagatactgaagattatttttggtagaagcaccgtgtaggctttttctgcaatgagcagcagctgactgaattttcataagaaacttggactgcaggacttaatctgtagtctttagacaacagttgctttcataaagactagttcttatcaaccttgaatgactacagattattttgtgaaggaggatgaagtaatgtgtgttcttgtaaaattaaattttatctttatttcttctaaaaatctgtataccaggaactgaaaatctttgaacagatattaaaatctacgtaagtatacaaactagttgagggatacactgtttgcttttataaaataactttgattacatgaatataataaattatgtgcatataaatgtgtgtctatatgctttcctttaaatatgtttgaaaagatgtttgaaacttgattatactatttataattggcacagtactttgaattatgccagtactacattgtaaaacagagttgtattttttgatatttaacaatgcttaacactttaaatgccacttctgaggaatggacctggtgtaacacacttgaatatgtgtgatgccaaactttttaaaatacaatataaattatgcttatttattattttctttagtttaatcttggtcatgttttggtgtgtatttttaatttttttcttaaattaacactttggcatgaacattactgcaggtttttgatgaatataatgaatgtatggaattcaattgaatttgcatggtcttcggaattttttctgtgtgtataaatttagctgctattaacagaagagagaactttctgtgagtagccatgtgtgttgatcagatacagtttttctgagatcttcaattaatctcactttaaaaatgaccaaaacatgtctttcttgaattaactttgaataaaagtttgtatattatttgtt

SEQ ID NO: 15164 - DNA, 2907 bp, Homo sapiens
  source 1..2907: mol_type = unassigned DNA
actgccagagctgggctagaacagaggccagtggaaactattaggaagactcagcttttcatgaagttagatttttagcctgagctttaagtcaaagaaagatgacctggacttaaagtgccttatggtatggttggaagcacggccccagattctctttgtatgcacaaagcagggtcatcagaagcctctcgattcaaaagatgataataccgaaaaacactgcccagtgacagtgaatccttggcatatgaagaaagctttcaaagtcatgaacgaattaagaaggtgagatgagtgagagccgagcaaagagagttagaataaaagaggtagatggctggaccctgaggatgctaattgattatgtttacactgcagaaattcaggttacagaagaaaatgtacaggtacttctcccagcagctggtctcttacagttacaggatgtgaagaagacttgttgtgaatttttggaatcccagcttcaccctgtcaactgcttaggaatccgggcttttgctgatatgcatgcatgtaccgaccttctgaacaaggccaacacctatgcagagcaacattttgcagatgttgtacttagtgaagaatttctcaatcttggcatcgaacaagtgtgcagcttaatctcaagtgacaaacttaccatttcttcagaagagaaggtatttgaagcagtaatagcatgggtgaaccatgacaaggatgtgaggcaagagtttatggcccgactgatggaacatgtacggttacctttgcttcctcgggaatatttagttcagagggttgaagaggaagcattggtcaagaatagcagtgcttgcaaagattacctcattgaagcaatgaagtaccatttgctgccaacagagcagcgtatattaatgaagagtgtccggacccggctgaggacacccatgaaccttcccaaattgatggtggtggttgggggccaagcaccaaaggctatccggagtgtggaatgctatgactttaaagaagaaaggtggcaccaagtagcagagttgccttccaggaggtgcagggcaggcatggtctacatggctggacttgtttttgctgttggtggctttaatggctcattaagagttcgcactgtagattcctacgaccctgtgaaggaccagtggaccagcgttgctaacatgagagaccggagaagcactttgggagctgctgtgttaaatggattattatacgctgtgggaggctttgatgggagtacaggtttgtcatctgtggaagcatacaacataaagtctaatgagtggtttcatgtagctcccatgaatacaaggaggagcagtgttggtgtgggtgttgttggaggtttgctctatgctgtaggaggttatgatggagcatcacgtcagtgtcttagcacagtagaatgctataatgctacaacaaatgagtggacctatatagcagaaatgagcaccaggcggagtggagcaggtgttggtgtgttaaacaatttattgtatgctgtaggaggtcatgatggccctttagtacgaaaaagtgttgaagtatatgatcccaccactaacgcatggagacaggttgcagatatgaacatgtgcagaagaaatgcaggagtttgtgcagttaatggtctgttatatgttgttggaggggatgatggttcctgtaacttggcgtcagtagaatattataacccaacaaccgataaatggacagttgtgtcatcgtgtatgagcacagggagaagttatgcaggggtcacagttattgataaaccattatgagcctgaaggacattttcagcatatttatacatgagaaacagccttcaacaagtatttgtgaagtgactgagaatctagcacttctccacttgtagctgcactttaagtctcagcagaagatacgatcgtctgcctttataggcctcagatactgaagattatttttggtagaagcaccgtgtaggctttttctgcaatgagcagcagctgactgaattttcataagaaacttggactgcaggacttaatctgtagtctttagacaacagttgctttcataaagactagttcttatcaaccttgaatgactacagattattttgtgaaggaggatgaagtaatgtgtgttcttgtaaaattaaattttatctttatttcttctaaaaatctgtataccaggaactgaaaatctttgaacagatattaaaatctacgtaagtatacaaactagttgagggatacactgtttgcttttataaaataactttgattacatgaatataataaattatgtgcatataaatgtgtgtctatatgctttcctttaaatatgtttgaaaagatgtttgaaacttgattatactatttataattggcacagtactttgaattatgccagtactacattgtaaaacagagttgtattttttgatatttaacaatgcttaacactttaaatgccacttctgaggaatggacctggtgtaacacacttgaatatgtgtgatgccaaactttttaaaatacaatataaattatgcttatttattattttctttagtttaatcttggtcatgttttggtgtgtatttttaatttttttcttaaattaacactttggcatgaacattactgcaggtttttgatgaatataatgaatgtatggaattcaattgaatttgcatggtcttcggaattttttctgtgtgtataaatttagctgctattaacagaagagagaactttctgtgagtagccatgtgtgttgatcagatacagtttttctgagatcttcaattaatctcactttaaaaatgaccaaaacatgtctttcttgaattaactttgaataaaagtttgtatattatttgtttca

SEQ ID NO: 15165 - DNA, 6806 bp, Homo sapiens
  source 1..6806: mol_type = unassigned DNA
gattctttgcagcctagacagaggaggcaggagccccaggggcgggctaatcgcctgggctggggatgcctgggcagatgcagaggaagctggaaaggtggcagtgcacctgggtcgctggagctgccgccgttcctaggagaccaaggagcagcaagcctgcgggggagggggagcaagtgggttgctgcttttagcagctgaaagggctgcagggagctctgggtaagacattttctgttgctgctgcttttgcggtagaagctgctgcgagtaagtcagaggaaggaggattgagaagggaggaggcttcacttgcagccatgctgaatcactgttgctgatcagatttcccactggtctgctgggagaatcaagaacagaactaggatccccgagtgcatacacagttcagcagctaccaccctggctgggcctcacacaatggagggtgaaagtgtcaagctgagctcccagactctgatacaggctggggatgatgagaagaaccagaggacgatcactgtcaaccctgcccacatggggaaagcattcaaggttatgaatgaactgcggagtaaacagctgttgtgtgacgtgatgattgtggcagaagatgtcgagatagaagcccaccgtgtggtcctggcagcctgcagcccctacttctgtgcgatgttcacaggtgacatgtctgagagtaaagccaaaaagatagaaatcaaggacgtggatgggcagacgctgagtaagctgattgactacatctatactgctgaaatcgaggtgactgaagagaatgtccaggtgctgctcccggcagccagcttgctgcagctcatggatgttcggcagaactgctgtgacttcctgcagtctcagttgcatcccaccaattgcctgggcatccgtgcatttgcagatgtacacacctgcactgaccttctgcagcaggccaatgcctacgcagagcagcactttccagaggtgatgctaggagaagaatttcttagcctgagtctggaccaggtgtgcagcttgatatccagcgacaagctgaccgtttcttcagaagagaaggtgtttgaagctgtgatctcatggatcaattatgagaaagaaacccgtttagagcacatggcaaagctgatggaacatgtccgacttcctctcttacctagggactacctagtccaaacggttgaagaagaagctttgataaagaataacaacacctgtaaagacttcctcattgaggccatgaaataccatctcctccctctggatcagagactattgattaagaacccaaggaccaagcccaggactccagtcagccttcccaaggtcatgattgtggttggcggccaggcacccaaggcaatccgcagtgtggagtgctatgatttcgaggaggaccggtgggatcagattgctgagcttccttccagaagatgcagagcaggtgtggtgttcatggctggccacgtgtatgccgtgggagggtttaatggctcactgcgggtgcggacagtggatgtgtatgacggcgtgaaggaccagtggacgtccattgccagcatgcaggagcgccggagcacactgggcgcagcggtgctcaatgacttgctctacgcagtgggaggctttgatggcagtactggcctagcatcggtggaagcctacagctacaagaccaacgagtggttctttgtggccccgatgaacacgcggcggagcagtgtgggtgtgggcgttgtggaggggaagctatatgctgttgggggttatgatggagcttcccgccagtgtctgagcactgtggagcagtacaacccagcgaccaatgaatggatatacgtggcggacatgagcacccgccgcagtggcgcaggggttggagtgcttagcggacagctgtacgccacaggtgggcatgatgggcctttggtgaggaagagcgttgaggtttacgatcctggaacaaatacctggaagcaagtggcagacatgaacatgtgccggcgcaacgcaggggtctgtgcagtaaatgggctcctgtatgtggttggaggggatgatggatcctgcaacttggcttcggtggagtactacaatcctgtcactgacaaatggacgctgcttccaacgaacatgagcacggggcggagctatgcaggtgttgccgtgattcacaagtccttgtgacccaaactcctactgccaggaggtggaggaaggagcaggtgctgcctgtgactctgaacagcaggaccttggtgactggattcaacttgcttgggagggtctgtgctgctgtgagaaccgctctcctctgacttggcagactggtgttgttcatcgcagtgtggacaccattacccacccccgttcccctgaggtgctctggcctatgccctgagcaaggggggtcttgacatccccaggcagcacctttgggctttgttttggtgtttctacagggacaatacagaccctggagtgtgtgtgtgtgtgtgtgtgtgtgtagaccatggtgtttctctatgtttctctaagttggggggtgagcgtgtgtgacagtctactggatttctttactactgatcctttcgctgtgttaaaaatcaagtcacagagacctctcttctggatttgtcccatggggaccctgagactactaaagctgctttcttctgaaggtccagttggacagtctgggaatgtccagaaataaccagtgagaggggcagttctctggccacacccacttatgtactttaactactgtgactttgtctgcagaagagctggaaaattctcgaagctgcaccgtgtcctctgtgtgctagaataagggacaaatgggttccctgtgcttctcagctcactgtttttccttgagttctcctacaggaagcagatgagaactgcccagtcttcaggtttaggccattggtctttgatgtcatagattccaggcctgggaggtgttatgtctcttcagctgggaaaactagctcttcagagaagcctcgggtaacactgaaaaacaaaacaaaacaaaacaaaaacaggaaaaaaacaaaaaaccaaagtggtaaggattcagttcctgcctataatggtctcagagagggtcctacttttaggttttcccaggacaggacagtccccatttatacttattatcccagtttaattattcacagcaccccattttactcagaagtgttctggtctggaggataaataagaggtcaccctcctccagacccaaagatagatttgtgcctgtgttggatggggtcgtgtgtgattcagatggacattggatggcttcaaaggaatataccactagagctggcccttggcactttgtgacagtggtcaagtctgtctaatgtccttgtcttctttttcttgtgctttccccctattccagggtgtgcaccctctccccaacccccaagaaccccactactgctttccctgtgaggtaggagatatcagtgggccttggatttgaggcttcctaagatgtgcttgcattttaaaaagggagcttggtgagagctttgctaattcacaggtaaaaattattaacaatagaacttcaagcatcttgaggagcgggcatttgagggggcatggagtaatttgtatttaaaaaaccttaaagttgtgctgttcctaaactagcaaattgctcatgctgaaatttctggcataagcaggggaagtcttgtgtctggagaatagtctcataccttgcagtctgggacaccctccctactttgagaatccacctacaggaagccaaggaactttataaatcctgatgttggacttctgatacgactgggctacttccaagcaggtgctgcaggagattggcatcccccagcccctgcagttagaaaccccgaagtcttcccagccagtgagccactttgtgtatttactgtatatttattgtgccctaaatgtgcaactctcctaaagacaaaacttctctttctgatgttaagcacatgttacttcaacaagatgcttggagaacaacaaggtacccagaatttttagaagccttcagaagaggctaaaatatccagctttgggggacctggaagaaatgtctccaaaggaagcaaggcatgttttagttgagtgctctggtctcactatgaagtggggatgactgtggcttcataactctacctggctgtgggttggaagctgatggaatgagaaatgtcctttctccttctctgaggaaattttgagacttgtttcggtgtgtctgtgtgatggggatgaggctggggttgggatctgatgtatgccattcacagaagctctcaatttcagatgataggtgaattccctgcccctcccccaccactgagaagctagactttcatgcgggagaggctacttttatgtgtcgtcttccggggaagggtccctccactgaaagctagccagtcatgttttctgtttttggatttttgcaattggtttcacctcatgtctccctccctacaaagcactgcctctactgggcgtgctgccaaggccatgtgcactccatcctcatgtatcctttttcacggggaccagaacactggtacgtcatcaccaaagccaatctgctctagctgcccacagatgccaccaaaacctgctatctcttcatcaccaggtacgattctctttccacagtggacacagcaggctattttctagtttgtgctggtcacgtggtagatgaagcctcttactgccccacttagggtggccacggctgcttgtgaatgcagctttgccagtggcatatctgtcatctgattgcggtggtgaaatggaattgaggcccaaggttagaagcagccgagacgccacttggatactgatttgaacaatgtagaagtcagattctgaattccaaagttatttctcataagtacccaatggcatctctccatctacaaagttgcagtattatgcaaataaaactgacctcattttctgctatgcaataagaatacttaattctagttcccgacaagccagttgcaatatcccctaagatgctttttgagctgtcttactttgatatctgttgtgtaatgtttgtatatttctgagccagatcctttcaaagattgcctttttataaaattgaagctatagcttttaggctaaaattttaacgtagatatttttataagatatttttttcaagagtttgaatcgctttttattgtccatgataatgaaatgttgtgttctttgcatcattcactctcaaacgtagttcatgcctgtagctctcttccttttgtttctcacccttcagaaacatatttttcagtagctccaggtagatgagccttttttttttttttaaaaataccatattcaagggagtctgctgaattttaaaacgcagtcactggtgtttcttgaattgctagggactgatgttatgttcgactcagcacttgcccgtctgtattgattgtgtctttttttttttttttggagtctgctttctgtgggggtgaggccgggctgtctcgtggtggctcccactgacgggcactgagcctggtaccctgtggcatggagaagcctcagggaaaggcctgcccccccagcacatactcccatagtgtcctaggtccagccgaccattccttattctcttctatctccttgttgatctgaagcttccaatagcttgaggcctttgctgctggatgatgccctttttgggagcatcttgtctctaacctttaaaagaggggtcaatcctcatgatccctgtgtgttaagcatatgctttgcaggtgctcacactacacttacaacttgcttcttgagctatgtctctactccaggctctgttttgtgtatttatctgccatttgcatcatggtttttaaaatttattattattattattattgttgggacaggtgccatttaaattgcctccatgctccccatttgcacctagctggatcaagttgggaggctgagcaaactcatattccagttagttggagtttttaaaggctctgtttgcctggagaagcaaggaggttagaatgtaatttttttaagcgtttgcactatttagagtcctaagcccctcatgttcagctgtgctgtgtttctactgaccaagcaggagagccagcagcacttccagcatttgggaatggaagagatttcttctgtagtggataattacagcctcatagcccctgtgcagccttcgtcatgggactcagtgactcatggatatagcatcagccatggcaggaatgcacaggactgtggcatttgcagcatcaaatcaccctagtgccatgtttggttatgagattgtaaattattcgctcccccatcctcccctcccctcattttcagtggcaatagaggacccttgttgtacttcttgtttaatttgcatattatgtgtaaaatgctttcgttgaaagaaaactgaagacactgaatgtgtatgtctgtgtgggtgctctgtccctgtggttgtcatagccagtcagacttgatcactgacaccccgtacaacatattgcataggtaagatcctcgatctggtgttctctgcgtggctgttagggactgtatatcttgtaaaagaacacttgtcacatgcttgatcagttacagcaatagctgaagaaacatttcctcaaatgtattattttaacaggaatcatgttctaatttcccatcctttaattttaataaaagctgaactgtgtgaa

SEQ ID NO: 15166 - DNA, 1665 bp, Homo sapiens
  source 1..1665: mol_type = unassigned DNA
attctttgcagcctagacagaggaggcaggagccccaggggcgggctaatcgcctgggctggggatgcctgggcagatgcagaggaagctggaaaggtggcagtgcacctgggtcgctggagctgccgccgttcctaggagaccaaggagcagcaagcctgcgggggagggggagcaagtgggttgctgcttttagcagctgaaagggctgcagggagctctgggtaagacattttctgttgctgctgcttttgcggtagaagctgctgcgagtaagtcagaggaaggaggattgagaagggaggaggcttcacttgcagccatgctgaatcactgttgctgatcagatttcccactggtctgctgggagaatcaagaacagaactaggatccccgagtgcatacacagttcagcagctaccaccctggctgggcctcacacaatggagggtgaaagtgtcaagctgagctcccagactctgatacaggctggggatgatgagaagaaccagaggacgatcactgtcaaccctgcccacatggggaaagcattcaaggttatgaatgaactgcggagtaaacagctgttgtgtgacgtgatgattgtggcagaagatgtcgagatagaagcccaccgtgtggtcctggcagcctgcagcccctacttctgtgcgatgttcacaggtgacatgtctgagagtaaagccaaaaagatagaaatcaaggacgtggatgggcagacgctgagtaagctgattgactacatctatactgctgaaatcgaggtgactgaagagaatgtccaggtgctgctcccggcagccagcttgctgcagctcatggatgttcggcagaactgctgtgacttcctgcagtctcagttgcatcccaccaattgcctgggcatccgtgcatttgcagatgtacacacctgcactgaccttctgcagcaggccaatgcctacgcagagcagcactttccagaggtgatgctaggagaagaatttcttagcctgagtctggaccaggtgtgcagcttgatatccagcgacaagctgaccgtttcttcagaagagaaggtgtttgaagctgtgatctcatggatcaattatgagaaagaaacccgtttagagcacatggcaaagctgatggaacatgtccgacttcctctcttacctagggactacctagtccaaacggttgaagaagaagctttgataaagaataacaacacctgtaaagacttcctcattgaggccatgaaataccatctcctccctctggatcagagactattgattaagaacccaaggaccaagcccaggactccagtcagccttcccaagtagagacggggttttaccgtgttagccaggatggtctcaatctcctgacctcgtgatccgcctgcctcagcctcccaaagtgctgggattacagacgtgagccaccgcgcccggccactaattaattttttaattgacaaaagttatatgcatttatcatgtacaacatgaggttttgaaatatagatacattgtggaatggctaaatttagctaattaacatatgtattacatcatatacttatttttttgtggtaagaacacttaaaatccattctcttaactattttcaagaatataatacattgttattaactat

SEQ ID NO: 15167 - DNA, 6566 bp, Homo sapiens
  source 1..6566: mol_type = unassigned DNA
agatttatatatttttaaggcccattggctttgcctaaaccttggtaaacagatactaaaaatctccagtaacattgcaaaattttgttctaattatcaggttcagcttcaaaacgtgtaaaatgcattgtgtactgagagtaagaggctgactctcgttagatccatttctatcagtgtgtttaaagccaaaaggaaagtaaaatacacatggctttcttctgacttgagttgtgtgattatggtcttttactcaagcttaaatgtttttatttttttgtcttccgagttcatgttgcccaaatgtcctgaggtggttccaaataccaatcccacacttcttgaccattgtcctgtggacaataacttggaataaatgtgaaactgaagtctgagtgcccatcagagagtgtcccaatccaaccagtctataagaagatctggggtgacatgtctgagagtaaagccaaaaagatagaaatcaaggacgtggatgggcagacgctgagtaagctgattgactacatctatactgctgaaatcgaggtgactgaagagaatgtccaggtgctgctcccggcagccagcttgctgcagctcatggatgttcggcagaactgctgtgacttcctgcagtctcagttgcatcccaccaattgcctgggcatccgtgcatttgcagatgtacacacctgcactgaccttctgcagcaggccaatgcctacgcagagcagcactttccagaggtgatgctaggagaagaatttcttagcctgagtctggaccaggtgtgcagcttgatatccagcgacaagctgaccgtttcttcagaagagaaggtgtttgaagctgtgatctcatggatcaattatgagaaagaaacccgtttagagcacatggcaaagctgatggaacatgtccgacttcctctcttacctagggactacctagtccaaacggttgaagaagaagctttgataaagaataacaacacctgtaaagacttcctcattgaggccatgaaataccatctcctccctctggatcagagactattgattaagaacccaaggaccaagcccaggactccagtcagccttcccaaggtcatgattgtggttggcggccaggcacccaaggcaatccgcagtgtggagtgctatgatttcgaggaggaccggtgggatcagattgctgagcttccttccagaagatgcagagcaggtgtggtgttcatggctggccacgtgtatgccgtgggagggtttaatggctcactgcgggtgcggacagtggatgtgtatgacggcgtgaaggaccagtggacgtccattgccagcatgcaggagcgccggagcacactgggcgcagcggtgctcaatgacttgctctacgcagtgggaggctttgatggcagtactggcctagcatcggtggaagcctacagctacaagaccaacgagtggttctttgtggccccgatgaacacgcggcggagcagtgtgggtgtgggcgttgtggaggggaagctatatgctgttgggggttatgatggagcttcccgccagtgtctgagcactgtggagcagtacaacccagcgaccaatgaatggatatacgtggcggacatgagcacccgccgcagtggcgcaggggttggagtgcttagcggacagctgtacgccacaggtgggcatgatgggcctttggtgaggaagagcgttgaggtttacgatcctggaacaaatacctggaagcaagtggcagacatgaacatgtgccggcgcaacgcaggggtctgtgcagtaaatgggctcctgtatgtggttggaggggatgatggatcctgcaacttggcttcggtggagtactacaatcctgtcactgacaaatggacgctgcttccaacgaacatgagcacggggcggagctatgcaggtgttgccgtgattcacaagtccttgtgacccaaactcctactgccaggaggtggaggaaggagcaggtgctgcctgtgactctgaacagcaggaccttggtgactggattcaacttgcttgggagggtctgtgctgctgtgagaaccgctctcctctgacttggcagactggtgttgttcatcgcagtgtggacaccattacccacccccgttcccctgaggtgctctggcctatgccctgagcaaggggggtcttgacatccccaggcagcacctttgggctttgttttggtgtttctacagggacaatacagaccctggagtgtgtgtgtgtgtgtgtgtgtgtgtagaccatggtgtttctctatgtttctctaagttggggggtgagcgtgtgtgacagtctactggatttctttactactgatcctttcgctgtgttaaaaatcaagtcacagagacctctcttctggatttgtcccatggggaccctgagactactaaagctgctttcttctgaaggtccagttggacagtctgggaatgtccagaaataaccagtgagaggggcagttctctggccacacccacttatgtactttaactactgtgactttgtctgcagaagagctggaaaattctcgaagctgcaccgtgtcctctgtgtgctagaataagggacaaatgggttccctgtgcttctcagctcactgtttttccttgagttctcctacaggaagcagatgagaactgcccagtcttcaggtttaggccattggtctttgatgtcatagattccaggcctgggaggtgttatgtctcttcagctgggaaaactagctcttcagagaagcctcgggtaacactgaaaaacaaaacaaaacaaaacaaaaacaggaaaaaaacaaaaaaccaaagtggtaaggattcagttcctgcctataatggtctcagagagggtcctacttttaggttttcccaggacaggacagtccccatttatacttattatcccagtttaattattcacagcaccccattttactcagaagtgttctggtctggaggataaataagaggtcaccctcctccagacccaaagatagatttgtgcctgtgttggatggggtcgtgtgtgattcagatggacattggatggcttcaaaggaatataccactagagctggcccttggcactttgtgacagtggtcaagtctgtctaatgtccttgtcttctttttcttgtgctttccccctattccagggtgtgcaccctctccccaacccccaagaaccccactactgctttccctgtgaggtaggagatatcagtgggccttggatttgaggcttcctaagatgtgcttgcattttaaaaagggagcttggtgagagctttgctaattcacaggtaaaaattattaacaatagaacttcaagcatcttgaggagcgggcatttgagggggcatggagtaatttgtatttaaaaaaccttaaagttgtgctgttcctaaactagcaaattgctcatgctgaaatttctggcataagcaggggaagtcttgtgtctggagaatagtctcataccttgcagtctgggacaccctccctactttgagaatccacctacaggaagccaaggaactttataaatcctgatgttggacttctgatacgactgggctacttccaagcaggtgctgcaggagattggcatcccccagcccctgcagttagaaaccccgaagtcttcccagccagtgagccactttgtgtatttactgtatatttattgtgccctaaatgtgcaactctcctaaagacaaaacttctctttctgatgttaagcacatgttacttcaacaagatgcttggagaacaacaaggtacccagaatttttagaagccttcagaagaggctaaaatatccagctttgggggacctggaagaaatgtctccaaaggaagcaaggcatgttttagttgagtgctctggtctcactatgaagtggggatgactgtggcttcataactctacctggctgtgggttggaagctgatggaatgagaaatgtcctttctccttctctgaggaaattttgagacttgtttcggtgtgtctgtgtgatggggatgaggctggggttgggatctgatgtatgccattcacagaagctctcaatttcagatgataggtgaattccctgcccctcccccaccactgagaagctagactttcatgcgggagaggctacttttatgtgtcgtcttccggggaagggtccctccactgaaagctagccagtcatgttttctgtttttggatttttgcaattggtttcacctcatgtctccctccctacaaagcactgcctctactgggcgtgctgccaaggccatgtgcactccatcctcatgtatcctttttcacggggaccagaacactggtacgtcatcaccaaagccaatctgctctagctgcccacagatgccaccaaaacctgctatctcttcatcaccaggtacgattctctttccacagtggacacagcaggctattttctagtttgtgctggtcacgtggtagatgaagcctcttactgccccacttagggtggccacggctgcttgtgaatgcagctttgccagtggcatatctgtcatctgattgcggtggtgaaatggaattgaggcccaaggttagaagcagccgagacgccacttggatactgatttgaacaatgtagaagtcagattctgaattccaaagttatttctcataagtacccaatggcatctctccatctacaaagttgcagtattatgcaaataaaactgacctcattttctgctatgcaataagaatacttaattctagttcccgacaagccagttgcaatatcccctaagatgctttttgagctgtcttactttgatatctgttgtgtaatgtttgtatatttctgagccagatcctttcaaagattgcctttttataaaattgaagctatagcttttaggctaaaattttaacgtagatatttttataagatatttttttcaagagtttgaatcgctttttattgtccatgataatgaaatgttgtgttctttgcatcattcactctcaaacgtagttcatgcctgtagctctcttccttttgtttctcacccttcagaaacatatttttcagtagctccaggtagatgagccttttttttttttttaaaaataccatattcaagggagtctgctgaattttaaaacgcagtcactggtgtttcttgaattgctagggactgatgttatgttcgactcagcacttgcccgtctgtattgattgtgtctttttttttttttttggagtctgctttctgtgggggtgaggccgggctgtctcgtggtggctcccactgacgggcactgagcctggtaccctgtggcatggagaagcctcagggaaaggcctgcccccccagcacatactcccatagtgtcctaggtccagccgaccattccttattctcttctatctccttgttgatctgaagcttccaatagcttgaggcctttgctgctggatgatgccctttttgggagcatcttgtctctaacctttaaaagaggggtcaatcctcatgatccctgtgtgttaagcatatgctttgcaggtgctcacactacacttacaacttgcttcttgagctatgtctctactccaggctctgttttgtgtatttatctgccatttgcatcatggtttttaaaatttattattattattattattgttgggacaggtgccatttaaattgcctccatgctccccatttgcacctagctggatcaagttgggaggctgagcaaactcatattccagttagttggagtttttaaaggctctgtttgcctggagaagcaaggaggttagaatgtaatttttttaagcgtttgcactatttagagtcctaagcccctcatgttcagctgtgctgtgtttctactgaccaagcaggagagccagcagcacttccagcatttgggaatggaagagatttcttctgtagtggataattacagcctcatagcccctgtgcagccttcgtcatgggactcagtgactcatggatatagcatcagccatggcaggaatgcacaggactgtggcatttgcagcatcaaatcaccctagtgccatgtttggttatgagattgtaaattattcgctcccccatcctcccctcccctcattttcagtggcaatagaggacccttgttgtacttcttgtttaatttgcatattatgtgtaaaatgctttcgttgaaagaaaactgaagacactgaatgtgtatgtctgtgtgggtgctctgtccctgtggttgtcatagccagtcagacttgatcactgacaccccgtacaacatattgcataggtaagatcctcgatctggtgttctctgcgtggctgttagggactgtatatcttgtaaaagaacacttgtcacatgcttgatcagttacagcaatagctgaagaaacatttcctcaaatgtattattttaacaggaatcatgttctaatttcccatcctttaattttaataaaagctgaactgtgtgaa

SEQ ID NO: 15168 - DNA, 1559 bp, Homo sapiens
  source 1..1559: mol_type = unassigned DNA
aaggcccattggctttgcctaaaccttggtaaacagatactaaaaatctccagtaacattgcaaaattttgttctaattatcaggttcagcttcaaaacgtgtaaaatgcattgtgtactgagagtaagaggctgactctcgttagatccatttctatcagtgtgtttaaagccaaaaggaaagtaaaatacacatggctttcttctgacttgagttgtgtgattatggtcttttactcaagcttaaatgtttttatttttttgtcttccgagttcatgttgcccaaatgtcctgaggtggttccaaataccaatcccacacttcttgaccattgtcctgtggacaataacttggaataaatgtgaaactgaagtctgagtgcccatcagagagtgtcccaatccaaccagtctataagaagatctggggtgacatgtctgagagtaaagccaaaaagatagaaatcaaggacgtggatgggcagacgctgagtaagctgattgactacatctatactgctgaaatcgaggtgactgaagagaatgtccaggtgctgctcccggcagccagcttgctgcagctcatggatgttcggcagaactgctgtgacttcctgcagtctcagttgcatcccaccaattgcctgggcatccgtgcatttgcagatgtacacacctgcactgaccttctgcagcaggccaatgcctacgcagcactttccagaggtgatgctaggagaagaatttcttagcctgagtctggaccaggtgtgcagcttgatatccagcgacaagctgaccgtttcttcagaagagaaggtgtttgaagctgtgatctcatggatcaattatgagaaagaaacccgtttagagcacatggcaaagctgatggaacatgtccgacttcctctcttacctagggactacctagtccaaacggttgaagaagaagctttgataaagaataacaacacctgtaaagacttcctcattgaggccatgaaataccatctcctccctctggatcagagactattgattaagaacccaaggaccaagcccaggactccagtcagccttcccaaggggttggagtgcttagcggacagctgtacgccacaggtgggcatgatgggcctttggtgaggaagagcgttgaggtttacgatcctggaacaaatacctggaagcaagtggcagacatgaacatgtgccggcgcaacgcaggggtctgtgcagtaaatgggctcctgtatgtggttggaggggatgatggatcctgcaacttggcttcggtggagtactacaatcctgtcactgacaaatggacgctgcttccaacgaacatgagcacggggcggagctatgcaggtgttgccgtgattcacaagtccttgtgacccaaactcctactgccaggaggtggaggaaggagcaggtgctgcctgtgactctgaacagcaggaccttggtgactggattcaacttgcttgggagggtctgtgctgctgtgagaaccgctctcctctgacttggcagactggtgttgttcatcgcag

SEQ ID NO: 15169 - DNA, 6981 bp, Homo sapiens
  source 1..6981: mol_type = unassigned DNA
ctcttgtgctctcctctagttttactgaactgccagtactttgaacacactttgtgctttttctcctccaggtctttgtgcatactgtttcctctgcctggaatactcttctttctctttacctgactcgtttctgctcttacttcaagtctcagattctaggaagctttccatcaacctgctatcactgggacgagttggccatcccctgtgcttctgtagctcctatgaaatcataatagttgaaatgtgatgtttaaatgtttacttggcattctcctctactgaactctaagctttgtgagggtagtgatggtggctttgcctattgttttgtttcccttaaatctaaacgcagtgcctggcacatagtagcctccagtaaatgcttgtttaatgaacaaacaaacctgtgaagtgagtgatagagtgcttagtccccttcagttttcaggatggagagatggagaataaggacctcacacaaaatcacacagtacttggtggaagaagctgagctatgacctgccttccttcagaggaatgcactttgctttggaagatatgaagaaattcccagtacattgtctttcctattgggtctgtgtgagaacaggctgatagatgcctctgtgtcaagctgagctcccagactctgatacaggctggggatgatgagaagaaccagaggacgatcactgtcaaccctgcccacatggggaaagcattcaaggttatgaatgaactgcggagtaaacagctgttgtgtgacgtgatgattgtggcagaagatgtcgagatagaagcccaccgtgtggtcctggcagcctgcagcccctacttctgtgcgatgttcacaggtgacatgtctgagagtaaagccaaaaagatagaaatcaaggacgtggatgggcagacgctgagtaagctgattgactacatctatactgctgaaatcgaggtgactgaagagaatgtccaggtgctgctcccggcagccagcttgctgcagctcatggatgttcggcagaactgctgtgacttcctgcagtctcagttgcatcccaccaattgcctgggcatccgtgcatttgcagatgtacacacctgcactgaccttctgcagcaggccaatgcctacgcagagcagcactttccagaggtgatgctaggagaagaatttcttagcctgagtctggaccaggtgtgcagcttgatatccagcgacaagctgaccgtttcttcagaagagaaggtgtttgaagctgtgatctcatggatcaattatgagaaagaaacccgtttagagcacatggcaaagctgatggaacatgtccgacttcctctcttacctagggactacctagtccaaacggttgaagaagaagctttgataaagaataacaacacctgtaaagacttcctcattgaggccatgaaataccatctcctccctctggatcagagactattgattaagaacccaaggaccaagcccaggactccagtcagccttcccaaggtcatgattgtggttggcggccaggcacccaaggcaatccgcagtgtggagtgctatgatttcgaggaggaccggtgggatcagattgctgagcttccttccagaagatgcagagcaggtgtggtgttcatggctggccacgtgtatgccgtgggagggtttaatggctcactgcgggtgcggacagtggatgtgtatgacggcgtgaaggaccagtggacgtccattgccagcatgcaggagcgccggagcacactgggcgcagcggtgctcaatgacttgctctacgcagtgggaggctttgatggcagtactggcctagcatcggtggaagcctacagctacaagaccaacgagtggttctttgtggccccgatgaacacgcggcggagcagtgtgggtgtgggcgttgtggaggggaagctatatgctgttgggggttatgatggagcttcccgccagtgtctgagcactgtggagcagtacaacccagcgaccaatgaatggatatacgtggcggacatgagcacccgccgcagtggcgcaggggttggagtgcttagcggacagctgtacgccacaggtgggcatgatgggcctttggtgaggaagagcgttgaggtttacgatcctggaacaaatacctggaagcaagtggcagacatgaacatgtgccggcgcaacgcaggggtctgtgcagtaaatgggctcctgtatgtggttggaggggatgatggatcctgcaacttggcttcggtggagtactacaatcctgtcactgacaaatggacgctgcttccaacgaacatgagcacggggcggagctatgcaggtgttgccgtgattcacaagtccttgtgacccaaactcctactgccaggaggtggaggaaggagcaggtgctgcctgtgactctgaacagcaggaccttggtgactggattcaacttgcttgggagggtctgtgctgctgtgagaaccgctctcctctgacttggcagactggtgttgttcatcgcagtgtggacaccattacccacccccgttcccctgaggtgctctggcctatgccctgagcaaggggggtcttgacatccccaggcagcacctttgggctttgttttggtgtttctacagggacaatacagaccctggagtgtgtgtgtgtgtgtgtgtgtgtgtagaccatggtgtttctctatgtttctctaagttggggggtgagcgtgtgtgacagtctactggatttctttactactgatcctttcgctgtgttaaaaatcaagtcacagagacctctcttctggatttgtcccatggggaccctgagactactaaagctgctttcttctgaaggtccagttggacagtctgggaatgtccagaaataaccagtgagaggggcagttctctggccacacccacttatgtactttaactactgtgactttgtctgcagaagagctggaaaattctcgaagctgcaccgtgtcctctgtgtgctagaataagggacaaatgggttccctgtgcttctcagctcactgtttttccttgagttctcctacaggaagcagatgagaactgcccagtcttcaggtttaggccattggtctttgatgtcatagattccaggcctgggaggtgttatgtctcttcagctgggaaaactagctcttcagagaagcctcgggtaacactgaaaaacaaaacaaaacaaaacaaaaacaggaaaaaaacaaaaaaccaaagtggtaaggattcagttcctgcctataatggtctcagagagggtcctacttttaggttttcccaggacaggacagtccccatttatacttattatcccagtttaattattcacagcaccccattttactcagaagtgttctggtctggaggataaataagaggtcaccctcctccagacccaaagatagatttgtgcctgtgttggatggggtcgtgtgtgattcagatggacattggatggcttcaaaggaatataccactagagctggcccttggcactttgtgacagtggtcaagtctgtctaatgtccttgtcttctttttcttgtgctttccccctattccagggtgtgcaccctctccccaacccccaagaaccccactactgctttccctgtgaggtaggagatatcagtgggccttggatttgaggcttcctaagatgtgcttgcattttaaaaagggagcttggtgagagctttgctaattcacaggtaaaaattattaacaatagaacttcaagcatcttgaggagcgggcatttgagggggcatggagtaatttgtatttaaaaaaccttaaagttgtgctgttcctaaactagcaaattgctcatgctgaaatttctggcataagcaggggaagtcttgtgtctggagaatagtctcataccttgcagtctgggacaccctccctactttgagaatccacctacaggaagccaaggaactttataaatcctgatgttggacttctgatacgactgggctacttccaagcaggtgctgcaggagattggcatcccccagcccctgcagttagaaaccccgaagtcttcccagccagtgagccactttgtgtatttactgtatatttattgtgccctaaatgtgcaactctcctaaagacaaaacttctctttctgatgttaagcacatgttacttcaacaagatgcttggagaacaacaaggtacccagaatttttagaagccttcagaagaggctaaaatatccagctttgggggacctggaagaaatgtctccaaaggaagcaaggcatgttttagttgagtgctctggtctcactatgaagtggggatgactgtggcttcataactctacctggctgtgggttggaagctgatggaatgagaaatgtcctttctccttctctgaggaaattttgagacttgtttcggtgtgtctgtgtgatggggatgaggctggggttgggatctgatgtatgccattcacagaagctctcaatttcagatgataggtgaattccctgcccctcccccaccactgagaagctagactttcatgcgggagaggctacttttatgtgtcgtcttccggggaagggtccctccactgaaagctagccagtcatgttttctgtttttggatttttgcaattggtttcacctcatgtctccctccctacaaagcactgcctctactgggcgtgctgccaaggccatgtgcactccatcctcatgtatcctttttcacggggaccagaacactggtacgtcatcaccaaagccaatctgctctagctgcccacagatgccaccaaaacctgctatctcttcatcaccaggtacgattctctttccacagtggacacagcaggctattttctagtttgtgctggtcacgtggtagatgaagcctcttactgccccacttagggtggccacggctgcttgtgaatgcagctttgccagtggcatatctgtcatctgattgcggtggtgaaatggaattgaggcccaaggttagaagcagccgagacgccacttggatactgatttgaacaatgtagaagtcagattctgaattccaaagttatttctcataagtacccaatggcatctctccatctacaaagttgcagtattatgcaaataaaactgacctcattttctgctatgcaataagaatacttaattctagttcccgacaagccagttgcaatatcccctaagatgctttttgagctgtcttactttgatatctgttgtgtaatgtttgtatatttctgagccagatcctttcaaagattgcctttttataaaattgaagctatagcttttaggctaaaattttaacgtagatatttttataagatatttttttcaagagtttgaatcgctttttattgtccatgataatgaaatgttgtgttctttgcatcattcactctcaaacgtagttcatgcctgtagctctcttccttttgtttctcacccttcagaaacatatttttcagtagctccaggtagatgagccttttttttttttttaaaaataccatattcaagggagtctgctgaattttaaaacgcagtcactggtgtttcttgaattgctagggactgatgttatgttcgactcagcacttgcccgtctgtattgattgtgtctttttttttttttttggagtctgctttctgtgggggtgaggccgggctgtctcgtggtggctcccactgacgggcactgagcctggtaccctgtggcatggagaagcctcagggaaaggcctgcccccccagcacatactcccatagtgtcctaggtccagccgaccattccttattctcttctatctccttgttgatctgaagcttccaatagcttgaggcctttgctgctggatgatgccctttttgggagcatcttgtctctaacctttaaaagaggggtcaatcctcatgatccctgtgtgttaagcatatgctttgcaggtgctcacactacacttacaacttgcttcttgagctatgtctctactccaggctctgttttgtgtatttatctgccatttgcatcatggtttttaaaatttattattattattattattgttgggacaggtgccatttaaattgcctccatgctccccatttgcacctagctggatcaagttgggaggctgagcaaactcatattccagttagttggagtttttaaaggctctgtttgcctggagaagcaaggaggttagaatgtaatttttttaagcgtttgcactatttagagtcctaagcccctcatgttcagctgtgctgtgtttctactgaccaagcaggagagccagcagcacttccagcatttgggaatggaagagatttcttctgtagtggataattacagcctcatagcccctgtgcagccttcgtcatgggactcagtgactcatggatatagcatcagccatggcaggaatgcacaggactgtggcatttgcagcatcaaatcaccctagtgccatgtttggttatgagattgtaaattattcgctcccccatcctcccctcccctcattttcagtggcaatagaggacccttgttgtacttcttgtttaatttgcatattatgtgtaaaatgctttcgttgaaagaaaactgaagacactgaatgtgtatgtctgtgtgggtgctctgtccctgtggttgtcatagccagtcagacttgatcactgacaccccgtacaacatattgcataggtaagatcctcgatctggtgttctctgcgtggctgttagggactgtatatcttgtaaaagaacacttgtcacatgcttgatcagttacagcaatagctgaagaaacatttcctcaaatgtattattttaacaggaatcatgttctaatttcccatcctttaattttaataaaagctgaactgtgtgaa

SEQ ID NO: 15170 - DNA, 5743 bp, Homo sapiens
  source 1..5743: mol_type = unassigned DNA
accggattttccttctccctctctctatctccacagatcccttcccaagaggagtctcctgctaaaacttcatcatctcaagttgacctgccacttcacccaaggaggcaagctcttgcctgtaacagtgtatttgccaacatggcacccaaaaagaagattgtcaaaaagaacaaaggagatatcaatgagatgactataatcgtagaagatagccccctaaacaaactgaatgctttgaatgggctcctagagggaggcaatggccttagctgcatttcttctgaactaacagatgcttcttatggccccaacctcttggaaggtttaagtaaaatgcggcaggagaacttcctatgtgacttagtcattggtaccaaaaccaaatcctttgatgttcataagtcagtcatggcttcatgcagtgagtatttttacaacatcctaaaaaaagacccgtcaattcagagggtggatctcaatgatatctcaccactaggcctggccactgtcattgcatatgcctacactggaaagctcactctctccttgtatacaataggaagcattatttctgctgctgtttatcttcagatccatactcttgtaaagatgtgcagtgattttctgatacgggagatgagtgttgagaattgcatgtatgttgttaatattgctgaaacatactccctaaaaaatgcaaaagcagcagcccagaaatttattcgggataacttccttgaatttgcagaatcggatcagtttatgaaacttacatttgaacaaattaatgaacttcttatagatgatgacttacagttgccttctgagatagtagcattccagattgcaatgaaatggttagaatttgaccaaaagagagtaaaatacgctgcagatcttttgagcaatattcgctttggtaccatctctgcacaagacctggtcaattatgttcaatccgtaccaagaatgatgcaagatgctgattgtcacagacttctcgtagatgctatgaactaccacttgcttccatatcatcaaaacacattgcaatctaggcgaacaagaatccgaggtggctgccgagtcctcgtcactgttgggggacgcccaggccttactgagaagtcccttagcagagacatcttgtatagagaccctgaaaatggatggagcaagcttacggaaatgccagccaaaagttttaatcagtgtgtggctgtgatggatggatttctttatgtagccggtggtgaagaccagaatgatgcaagaaatcaagccaagcatgcagtcagcaatttctgcagatacgatccccgcttcaacacctggatacacctggccagcatgaaccagaagcgcacgcacttcagcctgagcgtgttcaacgggctcgtgtacgccgcgggcggccgcaacgcagaaggaagcctggcctcgctggagtgctacgtgccctccaccaatcagtggcagccgaagacgcccctggaggtggcgcgctgctgccacgctagcgcggtcgccgacggccgcgtgctggtgaccggaggctacatagccaacgcctactcgcgctctgtgtgcgcctacgacccggccagcgactcgtggcaggagctgccgaacctcagcacaccccggggctggcactgcgcggtcacgctgagcgacagagtgtacgtgatgggcggcagccagctggggccgcgcggggagcgcgtggacgtgctcaccgtggagtgctacagccccgcgaccggccagtggagctacgcggcgccgctgcaggtgggagtgagcactgcgggcgtctcggcgctgcatggccgcgcctacctggtggggggctggaacgagggcgagaagaagtacaagaagtgcatccagtgcttcagccccgagctcaacgagtggacggaggacgacgagctacccgaggccactgtcggcgtgtcctgctgcaccctctcgatgcccaacaacgtgactcgggaatcccgggccagttcggtatcttctgtgccagtcagtatctgagcccaggtagatgcagggacgcaggaagaacacgttatttattcgtagagccacgtggttaacctctgagttcgcgaaaaggaaaatatttaacatttactacactgattgtattgtaaaatatgtcgaggcacatgtcctgatggctttaaattcctggtatggcataatctacctcttttttttttttttttttttagcaaaatacagggcaatggccaacaaaagaaacaatttatttcagcggccactgggtggcagacggaattcgttataggcactctcccaaggcggcatgtttcctaaatgtatagcggttacacccacatttgagattttttcctctacacgttagtacacttgaggtttatgtaagtgatttcatgttcaaaagtttattttcctctctctcttttttctttaggaagttgaagatattcatatagattttatttatttaaaaatggaaattgtcgatctccataaagacttaagatttaattctgtatttcaacgcaattttccccccatatgtgattgagtaaaggattttgaaagatatcccatgacaacgtaataaagcttaaaacaagatctgaccgaaaaggaatagggattccacccagggaccctaaatttgataacctttgtgttagcggacattcctcttcctccatgcctcaggccccagtttattttctaccataaaatcatgctctcaatgaagtaattgatatgaatcatttaatttatagcataaatttaagtcatttggttgtttcaactagaaggatttgcattttatcccttgtcctctattaaagaagaatttcacataccctgggagccttaccctcaccctaaaaactacaccaacctggttaaaggcaaccttggccctaatgtacaccccgcgaagatcaccaaataaaactatgtccctaaggaccattagccttaagcttagagagcttgaagtttacacaaccaataacaataattttatttgccccaatcttttatatgataagaatgatagaaacatttggaatttgtagatttggtagtaactggatgaatgggttctcctgttgataaatgccattgtttcccatttaatatggatcctcctgatttcttaagtaaaaatcaagcactcatctcacgtatataaaaatatatactcattctgtcctatttttattaatctcatctgctccaaatgagctttggatttataatcaaagtgtacccacttgatagcacttttcctatatgtttgccaagttttggggaaagggaatgactgtagtaaatgatacatattttccttttttataatttatcactttattctttgacagtttatttgttttggagaggaagtggcctatcaattatgggttatgtgcaattggattttgaaaaataaaacaagctatttaggaattgaacatgagatatatggaaatataatttggtttttgttaatctcatcctctccaccttgtgtagataggttattgctagttatgatatttatttctaaaatatgttatttgaactgtgaaaagtggttcatatagtacactttgtggaacaattttatatcattaccccgatgaaaagttcaatctctggatatttaatgataacactcaggtaagggctacaaacgctgtaaattaagaacaagatattattaatgtaaaagcgctgggctgtttccttatcccacacaaagaatcttttaccttggtatatgtggatatggtatattaccttggtgtatgtatatgtgtgtatacgcacacactcatacaactgagaagcctatagtatatggttaatttttggagaaaagggtgttttattgtgggttacagatcataagtgagtgaatagatgtaattccttgatgcacaccaatagatgtgttcccattgacatcttagaagtattgtatgaagaggaggacctagggcttgaaatgaaatgagaatcaatcaattgcaacattacatgatggaataatgagaagagatactgaaactagaggatttttcatctatcaaagcttgataaattaggttgtgcaaaaacttggcagtggctttctagagatgaaactggagacatgttagtgctggataaatcatttaaaattaccatttaatttattttctacattgtttatctgaagactcagaaaatccacatatttgagcttaccagactcttgggtgcattgctgttctatcttctgcttcaacagttaggaaaataaagaccaatatgaatttggaatgtcagaatttctgacataacacattggcgaggagtatggaatgtaagggtcggtgaaagtttcatatcctggaacatcttgcattgccaattgaaagacataaaagtatgcagaatcaaaataatatgtgtccactttcatgtgtaagtgaaacatattctttacaccaactattgaagcagttgctcctagaaacctagtttctccagatttcccaagtggaaaatatttagtatgttttaagcttacattcaattactccagagtcttaggacccaaccatatacttccttttattttttattaaagaaaatgacttgttatttttgtaacggctgagtcctgtgatcaaataaaagcatcagttcaatatatcagggaaattgcatgttacccagcaactgaaataataaaattcaagctctctttttctaaatgggccagagacctgatgagaaagtctccaggaagccaaactttaacatactttgtccatttttagttaggttcttggtgccaagttgtcatccctgatgcattagttgctttcagtgcattgaatgaattttatttttacttcctatgttgtaagaatggttttgaatagaaggtcagtgatggtacagattcgtataattttaaaacatgattagatggtagtgaagtgttatgagtgaggaggtataattgatgtcatgaggaagtgagtactgaatggttctatgatttaaggtaaagcagcagttgtagtaagtgtattttacaaatacacatgtaaatagaggtttacctggaaatatgtacgttctaaaaggtcaattttttaattttatttttttgctggttatcctggccaagtgtcttcagaactcatccaagttacgagacgaaataaactaaaatcacctcattaatttttttcccttagttacaaccaaatgaatttatgtaatctctgaatgaactacatccctattccagccgctgatgaatatgttctccagcacaaggcagcattaaaaggaaatacttttcagtatttcttttcatgccaaaaaacctacagaataattttccaaacagtcctttattcgtaattataagaattaaacaatctaaaatattaaagatttaccctccagcacattcactgggtaaagaccatttaatttgccctctcagggaatttgaaataaattatttgtcctggatattctttaaaaactttttatttattcagcaaattttggcaaaaaaatttctttctttgcttaaaacattctggtactatataaggaacaacaaactaaaatgtatgtagtgttattttgtaatctcatcactatcaataaagctgcattcaataagaccttagtcaatgactaaata

SEQ ID NO: 15171 - DNA, 1905 bp, Homo sapiens
  source 1..1905: mol_type = unassigned DNA
atggcacccaaaaagaagattgtcaaaaagaacaaaggagatatcaatgagatgactataatcgtagaagatagccccctaaacaaactgaatgctttgaatgggctcctagagggaggcaatggccttagctgcatttcttctgaactaacagatgcttcttatggccccaacctcttggaaggtttaagtaaaatgcggcaggagaacttcctatgtgacttagtcattggtaccaaaaccaaatcctttgatgttcataagtcagtcatggcttcatgcagtgagtatttttacaacatcctaaaaaaagacccgtcaattcagagggtggatctcaatgatatctcaccactaggcctggccactgtcattgcatatgcctacactggaaagctcactctctccttgtatacaataggaagcattatttctgctgctgtttatcttcagatccatactcttgtaaagatgtgcagtgattttctgatacgggagatgagtgttgagaattgcatgtatgttgttaatattgctgaaacatactccctaaaaaatgcaaaagcagcagcccagaaatttattcgggataacttccttgaatttgcagaatcggatcagtttatgaaacttacatttgaacaaattaatgaacttcttatagatgatgacttacagttgccttctgagatagtagcattccagattgcaatgaaatggttagaatttgaccaaaagagagtaaaatacgctgcagatcttttgagcaatattcgctttggtaccatctctgcacaagacctggtcaattatgttcaatccgtaccaagaatgatgcaagatgctgattgtcacagacttctcgtagatgctatgaactaccacttgcttccatatcatcaaaacacattgcaatctaggcgaacaagaatccgaggtggctgccgagtcctcgtcactgttgggggacgcccaggccttactgagaagtcccttagcagagacatcttgtatagagaccctgaaaatggatggagcaagcttacggaaatgccagccaaaagttttaatcagtgtgtggctgtgatggatggatttctttatgtagccggtggtgaagaccagaatgatgcaagaaatcaagccaagcatgcagtcagcaatttctgcagatacgatccccgcttcaacacctggatacacctggccagcatgaaccagaagcgcacgcacttcagcctgagcgtgttcaacgggctcgtgtacgccgcgggcggccgcaacgcagaaggaagcctggcctcgctggagtgctacgtgccctccaccaatcagtggcagccgaagacgcccctggaggtggcgcgctgctgccacgctagcgcggtcgccgacggccgcgtgctggtgaccggaggctacatagccaacgcctactcgcgctctgtgtgcgcctacgacccggccagcgactcgtggcaggagctgccgaacctcagcacaccccggggctggcactgcgcggtcacgctgagcgacagagtgtacgtgatgggcggcagccagctggggccgcgcggggagcgcgtggacgtgctcaccgtggagtgctacagccccgcgaccggccagtggagctacgcggcgccgctgcaggtgggagtgagcactgcgggcgtctcggcgctgcatggccgcgcctacctggtggggggctggaacgagggcgagaagaagtacaagaagtgcatccagtgcttcagccccgagctcaacgagtggacggaggacgacgagctacccgaggccactgtcggcgtgtcctgctgcaccctctcgatgcccaacaacgtgactcgggaatcccgggccagttcggtatcttctgtgccagtcagtatctga

SEQ ID NO: 15172 - DNA, 2596 bp, Homo sapiens
  source 1..2596: mol_type = unassigned DNA
actgcaacggggatagtgttttctgtctctgtcatttgtggtttaagaaaaagggggtggtgttctgcatttgaaaggactttaatgaatgctgtcagtgtttgtgagacctaatggtcagtatgggaaaggagagccgggaaagtggtctagctgcttcaggataggtggatgagagtttgctctgattgaacggaatgttccaccgtgtttcatctttattcattatcctttgttctttaaaatctgatatattggcataaaagtaattgtagatatatatatgaatgtgatttattttcctttacatatttttgttgtgtacagcagggcatatacttctcttgtcttggttggatgcacaaatctgtgtgcagtgctttttgcccgttgcctagacgatcacttggtttctctgaggatgtctggttctcgtaaagagtttgatgtgaaacagattttgaaaatcagatggaggtggtttggtcatcaagcatcatctcctaattctacagttgacagccagcagggagaattttggaaccgaggacagactggagcaaacggtgggagaaagtttttagatccatgtagcctacaattgcctttggcttcaattggttaccgaaggtccagccaactggattttcagaattcaccttcttggccaatggcatccacctctgaagtccctgcatttgagtttacagcagaagattgtggcggtgcacattggctggatagaccagaagtggatgatggcactagtgaagaagaaaatgaatctgattccagttcatgcaggacttccaatagtagtcagacattatcatcctgtcatactatggagccatgtacatcagatgaatttttccaagcccttaatcatgccgagcaaacatttaaaaaaatggaaaactatttgagacataaacagttgtgtgatgtaattttagtcgctggtgatcgcagaattccagctcacagattggtgctctcctctgtctcagactattttgctgccatgtttactaatgatgtcagagaggcaagacaagaagaaataaaaatggaaggtgtagaaccaaattcgttgtggtccttgatccagtatgcttatacaggccgccttgaattaaaagaagataatattgagtgcctgttatctacagcttgccttcttcagctttcacaggttgtagaagcatgctgtaagtttttaatgaaacagcttcatccatccaactgtcttggaattcgttcttttgctgatgcccaaggttgtacagatttgcataaagtggctcacaattatactatggagcatttcatggaagtaatcagaaaccaggaatttgtattattaccagccagcgaaattgcaaagctcttggctagtgatgacatgaacattcctaatgaggagacaatattgaatgcacttcttacttgggtccgtcatgatttggaacagagacggaaagatctaagtaaacttttggcttatattaggctacctcttcttgcaccacagttcctggcagacatggaaaataatgtactttttcgggatgatatagaatgtcagaaactcattatggaagcaatgaagtaccatttattaccagagagacgacccatgttacaaagtcctcggacaaaacctaggaagtcaactgttggtacattatttgcagttgggggaatggattcaacaaaaggagcaacaagcattgaaaagtatgatctccgtacaaatatgtggactccagtagcaaatatgaatgggaggaggctacagttcggtgttgcagtgctagatgacaaactgtatgtggttggaggaagagatggactgaagactttgaatactgtagagtgctacaaccccaaaacaaaaacttggagtgtgatgccacctatgtccacacatagacatggccttggtgtggctgtactggaaggtcccatgtatgccgtaggaggacatgatggctggagctatctgaacacagtggaaagatgggaccctcaggctcgccagtggaattttgttgccactatgtctacccctaggagtacagtaggtgtggcagtactaagtggaaaactttatgcagttggtggtcgtgatggaagttcttgtctcaaatcagtagaatgttttgatcctcatactaataagtggacactgtgtgcacagatgtcaaaaaggagaggtggcgtaggagtgacgacctggaatggactgctgtatgctataggggggcacgatgctcccgcatccaacttgacttccagactctcagactgtgtggaaagatatgatcccaaaacagacatgtggactgcagtagcatccatgagcatcagcagagatgcagtgggggtctgtttacttggtgataagttatatgctgttggggggtatgatggacaggcataccttaatactgtggaggcttatgatccccagacaaatgagtggacccaggtattttcacatacttttgaggacagcaaagatcacctggtggccatcaagcagaccatctggaggcaaaactccttatctgaggaattcagaagtcattag

SEQ ID NO: 15173 - DNA, 3288 bp, Homo sapiens
  source 1..3288: mol_type = unassigned DNA
tgtttcatctttattcattatcctttgttctttaaaatctgatatattggcataaaagtaattgtagatatatatatgaatgtgatttattttcctttacatatttttgttgtgtacagcagggcatatacttctcttgtcttggttggatgcacaaatctgtgtgcagtgctttttgcccgttgcctagacgatcacttggtttctctgaggatgtctggttctcgtaaagagtttgatgtgaaacagattttgaaaatcagatggaggtggtttggtcatcaagcatcatctcctaattctacagttgacagccagcagggagaattttggaaccgaggacagactggagcaaacggtgggagaaagtttttagatccatgtagcctacaattgcctttggcttcaattggttaccgaaggtccagccaactggattttcagaattcaccttcttggccaatggcatccacctctgaagtccctgcatttgagtttacagcagaagattgtggcggtgcacattggctggatagaccagaagtggatgatggcactagtgaagaagaaaatgaatctgattccagttcatgcaggacttccaatagtagtcagacattatcatcctgtcatactatggagccatgtacatcagatgaatttttccaagcccttaatcatgccgagcaaacatttaaaaaaatggaaaactatttgagacataaacagttgtgtgatgtaattttagtcgctggtgatcgcagaattccagctcacagattggtgctctcctctgtctcagactattttgctgccatgtttactaatgatgtcagagaggcaagacaagaagaaataaaaatggaaggtgtagaaccaaattcgttgtggtccttgatccagtatgcttatacaggccgccttgaattaaaagaagataatattgagtgcctgttatctacagcttgccttcttcagctttcacaggttgtagaagcatgctgtaagtttttaatgaaacagcttcatccatccaactgtcttggaattcgttcttttgctgatgcccaaggttgtacagatttgcataaagtggctcacaattatactatggagcatttcatggaagtaatcagaaaccaggaatttgtattattaccagccagcgaaattgcaaagctcttggctagtgatgacatgaacattcctaatgaggagacaatattgaatgcacttcttacttgggtccgtcatgatttggaacagagacggaaagatctaagtaaacttttggcttatattaggctacctcttcttgcaccacagttcctggcagacatggaaaataatgtactttttcgggatgatatagaatgtcagaaactcattatggaagcaatgaagtaccatttattaccagagagacgacccatgttacaaagtcctcggacaaaacctaggaagtcaactgttggtacattatttgcagttgggggaatggattcaacaaaaggagcaacaagcattgaaaagtatgatctccgtacaaatatgtggactccagtagcaaatatgaatgggaggaggctacagttcggtgttgcagtgctagatgacaaactgtatgtggttggaggaagagatggactgaagactttgaatactgtagagtgctacaaccccaaaacaaaaacttggagtgtgatgccacctatgtccacacatagacatggccttggtgtggctgtactggaaggtcccatgtatgccgtaggaggacatgatggctggagctatctgaacacagtggaaagatgggaccctcaggctcgccagtggaattttgttgccactatgtctacccctaggagtacagtaggtgtggcagtactaagtggaaaactttatgcagttggtggtcgtgatggaagttcttgtctcaaatcagtagaatgttttgatcctcatactaataagtggacactgtgtgcacagatgtcaaaaaggagaggtggcgtaggagtgacgacctggaatggactgctgtatgctataggggggcacgatgctcccgcatccaacttgacttccagactctcagactgtgtggaaagatatgatcccaaaacagacatgtggactgcagtagcatccatgagcatcagcagagatgcagtgggggtctgtttacttggtgataagttatatgctgttggggggtatgatggacaggcataccttaatactgtggaggcttatgatccccagacaaatgagtggacccaggtatggcattcatgtttcattattacactgactctctttttattaaaacaattcttatggtaaaacagatcccctcaatcttgtccaatactgaaatatatggcataaatatgacaatcacgttttgattagcgatgagaaaaagaggcaatgtttaattttataacataattaaaatccagaattacctttgagatgtaagttaatactcagagaaattattaattatctgctaccacttgcatgatgaagtgttctagcctgattaaagctgataggactactggagggctgcaacaatgggaggggagactggaaaataaaaacaaggatagtagtcagaaaactttgaacaacttgcccatgtgtgagcagtcggatttttaaatactcaacccattgatatctgggagcagattaaagtcctgataacctaatgaagatggcaaccctaaattacactgagtaagaaacctgatctggcagtcttactaacagaaagaatttcacccttgtgtatttctgggagggtctagcacttctaaaaatgatcttttgagatctttgcttccatcatcaccaagaacagaatcaggaatttgtgcttgtgtcacccagttcagtacttggtacataaaagacaataaatgtttaactgagccaagattttcttgtatacaaggagccatgataagtatggtcaagaaaacaaagcttctaggccaggcatggtggcttatgcctataatcccagcactttgggaggctgaggcgggcagatcacgaggtcaggagttcaagaccagcctgaccaatatggtgagaccccatctctactaaaaatacaaaaaaattagccgggcatggtggcacgtgcctgtaatcccagctactcggggggctgaggcaggagaatcgcttgaacccaggaggcagaggttgcagtgagcagagatcatgccactgcacttcagcctgggtgacagagtgagactccatctt

SEQ ID NO: 15174 - DNA, 2690 bp, Homo sapiens
  source 1..2690: mol_type = unassigned DNA
actgcaacggggatagtgttttctgtctctgtcatttgtggtttaagaaaaagggggtggtgttctgcatttgaaaggactttaatgaatgctgtcagtgtttgtgagacctaatggtcagtatgggaaaggagagccgggaaagtggtctagctgcttcaggataggtggatgagagtttgctctgattgaacggaatgttccaccgtgtttcatctttattcattatcctttgttctttaaaatctgatatattggcataaaagtaattgtagatatatatatgaatgtgatttattttcctttacatatttttgttgtgtacagcagggcatatacttctcttgtcttggttggatgcacaaatctgtgtgcagtgctttttgcccgttgcctagacgatcacttggtttctctgaggatgtctggttctcgtaaagagtttgatgtgaaacagattttgaaaatcagatggaggtggtttggtcatcaagcatcatctcctaattctacagttgacagccagcagggagaattttggaaccgaggacagactggagcaaacggtgggagaaagtttttagatccatgtagcctacaattgcctttggcttcaattggttaccgaaggtccagccaactggattttcagaattcaccttcttggccaatggcatccacctctgaagtccctgcatttgagtttacagcagaagattgtggcggtgcacattggctggatagaccagaagtggatgatggcactagtgaagaagaaaatgaatctgattccagttcatgcaggacttccaatagtagtcagacattatcatcctgtcatactatggagccatgtacatcagatgaatttttccaagcccttaatcatgccgagcaaacatttaaaaaaatggaaaactatttgagacataaacagttgtgtgatgtaattttagtcgctggtgatcgcagaattccagctcacagattggtgctctcctctgtctcagactattttgctgccatgtttactaatgatgtcagagaggcaagacaagaagaaataaaaatggaaggtgtagaaccaaattcgttgtggtccttgatccagtatgcttatacaggccgccttgaattaaaagaagataatattgagtgcctgttatctacagcttgccttcttcagctttcacaggttgtagaagcatgctgtaagtttttaatgaaacagcttcatccatccaactgtcttggaattcgttcttttgctgatgcccaaggttgtacagatttgcataaagtggctcacaattatactatggagcatttcatggaagtaatcagaaaccaggaatttgtattattaccagccagcgaaattgcaaagctcttggctagtgatgacatgaacattcctaatgaggagacaatattgaatgcacttcttacttgggtccgtcatgatttggaacagagacggaaagatctaagtaaacttttggcttatattaggctacctcttcttgcaccacagttcctggcagacatggaaaataatgtactttttcgggatgatatagaatgtcagaaactcattatggaagcaatgaagtaccatttattaccagagagacgacccatgttacaaagtcctcggacaaaacctaggaagtcaactgttggtacattatttgcagttgggggaatggattcaacaaaaggagcaacaagcattgaaaagtatgatctccgtacaaatatgtggactccagtagcaaatatgaatgggaggaggctacagttcggtgttgcagtgctagatgacaaactgtatgtggttggaggaagagatggactgaagactttgaatactgtagagtgctacaaccccaaaacaaaaacttggagtgtgatgccacctatgtccacacatagacatggccttggtgtggctgtactggaaggtcccatgtatgccgtaggaggacatgatggctggagctatctgaacacagtggaaagatgggaccctcaggctcgccagtggaattttgttgccactatgtctacccctaggagtacagtaggtgtggcagtactaagtggaaaactttatgcagttggtggtcgtgatggaagttcttgtctcaaatcagtagaatgttttgatcctcatactaataagtggacactgtgtgcacagatgtcaaaaaggagaggtggcgtaggagtgacgacctggaatggactgctgtatgctataggggggcacgatgctcccgcatccaacttgacttccagactctcagactgtgtggaaagatatgatcccaaaacagacatgtggactgcagtagcatccatgagcatcagcagagatgcagtgggggtctgtttacttggtgataagttatatgctgttggggggtatgatggacaggcataccttaatactgtggaggcttatgatccccagacaaatgagtggacccaggttgctccactgtgcctaggaagagctggagcttgtgttgtgactgtaaaattataatttagtgccccgttttctacatgaagacaccgtcttcctttattaatttagtataattattctatcaatggatacatttttagtaaatgtgcattgtcacaatcctgggcacaaagtgcctgatgtcaaaatgaagata

SEQ ID NO: 15175 - DNA, 909 bp, Homo sapiens
  source 1..909: mol_type = unassigned DNA
ccgtacaaatatgtggactccagtagcaaatatgaatgggaggaggctacagttcggtgttgcagtgctagatgacaaactgtatgtggttggaggaagagatggactgaagactttgaatactgtagagtgctacaaccccaaaacaaaaacttggagtgtgatgccacctatgtccacacatagacatggccttggtgtggctgtactggaaggtcccatgtatgccgtaggaggacatgatggctggagctatctgaacacagtggaaagatgggaccctcaggctcgccagtggaattttgttgccactatgtctacccctaggagtacagtaggtgtggcagtactaagtggaaaactttatgcagttggtggtcgtgatggaagttcttgtctcaaatcagtagaatgttttgatcctcatactaataagtggacactgtgtgcacagatgtcaaaaaggagaggtggcgtaggagtgacgacctggaatggactgctgtatgctataggggggcacgatgctcccgcatccaacttgacttccagactctcagactgtgtggaaagatatgatcccaaaacagacatgtggactgcagtagcatccatgagcatcagcagagatgcagtgggggtctgtttacttggtgataagttatatgctgttggggggtatgatggacaggcataccttaatactgtggaggcttatgatccccagacaaatgagtggacccaggtattttcacatacttttgaggacagcaaagatcacctggtggccatcaagcagaccatctggaggcaaaactccttatctgaggaattcagaagtcattagactgccctattatctaaagccggcatcttgtactaggcttctttaccaaaaatgtatttaat

SEQ ID NO: 15176 - DNA, 7656 bp, Homo sapiens
  source 1..7656: mol_type = unassigned DNA
ggtcccctacccccacctactcgcccgccccctccggggccacccggggactctgaccccccggcctggcgccgcctgacggagcgggagtggctcgctccgggccggccggcgccggggatgaggctgcccggacagggtctaggggcgcgcgaggggccgagcatcccactcagctcgccggccccggcccccgcctcccccgctcctcccgcctggccgccccggcccgccgtgacccacggccgcctccggagcccgacgcgcagggcatatacttctcttgtcttggttggatgcacaaatctgtgtgcagtgctttttgcccgttgcctagacgatcacttggtttctctgaggatgtctggttctcgtaaagagtttgatgtgaaacagattttgaaaatcagatggaggtggtttggtcatcaagcatcatctcctaattctacagttgacagccagcagggagaattttggaaccgaggacagactggagcaaacggtgggagaaagtttttagatccatgtagcctacaattgcctttggcttcaattggttaccgaaggtccagccaactggattttcagaattcaccttcttggccaatggcatccacctctgaagtccctgcatttgagtttacagcagaagattgtggcggtgcacattggctggatagaccagaagtggatgatggcactagtgaagaagaaaatgaatctgattccagttcatgcaggacttccaatagtagtcagacattatcatcctgtcatactatggagccatgtacatcagatgaatttttccaagcccttaatcatgccgagcaaacatttaaaaaaatggaaaactatttgagacataaacagttgtgtgatgtaattttagtcgctggtgatcgcagaattccagctcacagattggtgctctcctctgtctcagactattttgctgccatgtttactaatgatgtcagagaggcaagacaagaagaaataaaaatggaaggtgtagaaccaaattcgttgtggtccttgatccagtatgcttatacaggccgccttgaattaaaagaagataatattgagtgcctgttatctacagcttgccttcttcagctttcacaggttgtagaagcatgctgtaagtttttaatgaaacagcttcatccatccaactgtcttggaattcgttcttttgctgatgcccaaggttgtacagatttgcataaagtggctcacaattatactatggagcatttcatggaagtaatcagaaaccaggaatttgtattattaccagccagcgaaattgcaaagctcttggctagtgatgacatgaacattcctaatgaggagacaatattgaatgcacttcttacttgggtccgtcatgatttggaacagagacggaaagatctaagtaaacttttggcttatattaggctacctcttcttgcaccacagttcctggcagacatggaaaataatgtactttttcgggatgatatagaatgtcagaaactcattatggaagcaatgaagtaccatttattaccagagagacgacccatgttacaaagtcctcggacaaaacctaggaagtcaactgttggtacattatttgcagttgggggaatggattcaacaaaaggagcaacaagcattgaaaagtatgatctccgtacaaatatgtggactccagtagcaaatatgaatgggaggaggctacagttcggtgttgcagtgctagatgacaaactgtatgtggttggaggaagagatggactgaagactttgaatactgtagagtgctacaaccccaaaacaaaaacttggagtgtgatgccacctatgtccacacatagacatggccttggtgtggctgtactggaaggtcccatgtatgccgtaggaggacatgatggctggagctatctgaacacagtggaaagatgggaccctcaggctcgccagtggaattttgttgccactatgtctacccctaggagtacagtaggtgtggcagtactaagtggaaaactttatgcagttggtggtcgtgatggaagttcttgtctcaaatcagtagaatgttttgatcctcatactaataagtggacactgtgtgcacagatgtcaaaaaggagaggtggcgtaggagtgacgacctggaatggactgctgtatgctataggggggcacgatgctcccgcatccaacttgacttccagactctcagactgtgtggaaagatatgatcccaaaacagacatgtggactgcagtagcatccatgagcatcagcagagatgcagtgggggtctgtttacttggtgataagttatatgctgttggggggtatgatggacaggcataccttaatactgtggaggcttatgatccccagacaaatgagtggacccaggttgctccactgtgcctaggaagagctggagcttgtgttgtgactgtaaaattataatttagtgccccgttttctacatgaagacaccgtcttcctttattaatttagtataattattctatcaatggatacatttttagtaaatgtgcattgtcacaatcctgggcacaaagtgcctgatgtcaaaatgaagatagtaaaacaagggaggaagcagtggatggaccaggattaattcctttcatttcttagtaaattaaaacctgcagctggtggattgtgatcacacattcccgaagtaataagtgaggacgaatgcactgctctggaacataacccagtgctaactgggggtttcatttattcagtcaagcacatcttactcacatccagatttattttcctacagtgcaaacacaccagatgaaactttaaaatgttactttttgtaagcttatcataaatgagttgcagtaatttgtttgcttgtttgtttaaccacaaccactattttaatgatatactaaagataacactatttagttttttcagaaacatctgcattatatgtgtgttggttgtggattttgtttctaaaattggcttagtccaataaataaagaaaagcattaaggacttaaagcaacaataaccaaataaaaacttgataggatctttgaagtctatttaaatattcattccattacatctagactcaccaagaactacatgttatgatgttaagttgaagttgaaacatgatgttttgcattaaatttaagatatgcaaatttatgtagagaaaataaatgttatataccctataatctttcacctaattagtatttaattatatggatttgttttatattataaaagatgttttgattttgtcttttgatattgacaaaattgtttggatatccttatgttctcaagtctgtatctgcctcccctgccttatttcttatgttttgccacagttaacccattgtgcttctttgtaatcaaacagtttgtgggagaatgggcttattgaatgtctaaaaaataagtttaaagtgtttgttaccctaagttttttacatttttaaactctaattacatatgtgaatgttattactctcagtgaattgttattgtttgcaaaaatgcactgggcagtaacattttgtgataaatcctataagatataagtcattgagatgtctaagatgctttttattttaaccccagttaataaccaccttacggaaaataatatttgctaatattgtttattgtgaactaggaatcaaagtttttgtatgcatcaatgcacttaatccttataacaaccttatgaggtagttctattccctttttatagctaaggaaattggggtacagagaagttagccccaaggttatatattgcaagtaagtggcagagcagggattcatacaaagaccttctcactcagcagtcttcactcttactattcctgccactaggtagaaaaagaaagatttcggccgggcacagtggctcacgcctataattcccagcactttgggaggctgaggtgggcggatcacgaggtcaggagatggagaccatcctggctaacacagtgaaaccccgtctctactaaaaataaaaaataaaaaaaaattagccaggcgtggtggcgggtgcctgtacgcccagctactcgggaggctgaggcgggagaatggcgtgaacccaggaggaggagcttgcagtgtgccaagatcgcaccactgcactccagcctgggtgacagagcgagactccatcaaaaaaaaataaataaaaaaaaaataaaagatttcattttatgtgaggaattattttaataaaaaaaagagggtttatgctctatagtaataaaatttaccagtaacacccaatcagaaaattttggttccttagtatttagggaagacttttgtttaaatctcttatggaattttacatgttttgatttagaaaagtagatgcaatataatatatttcaagttttatacatattagatgaattgcatggtattttaggcaacttaactataaacaaatttattcatagaagcattgttgccaacaatttagatgacctcgatgaaaaaacacaccaattgacaaaactggctcaaaaggaaataaaaaatccaaacagacctgtaacaagtaaagagattgaaccagtaatcaaaaatctcccaacaaagaaagtccaggactaaatgagtttactggcaaactatgccaaacatataaagaagaattaacactaatccttctcgaactctcccaaaaaatggaagagaaaggagcaccctgtgacattctataaggcggacattaccttaacaccaaagccagacaaagacctcacagggaagctacagaccaatatcccttatgaatatagatgcaaaaaaacttcaaaatactagcaggccaaatccagcagcttattaaaatgatcacacagcatgaccaagtgagatttatcaaagaaatgcagggatggttctacatacaaatgtcaatcgatgtaataatataccatattaatagaatgaaggggaaaaaacagcatgatcacctcaattgataagaaaaagcatttgacaaaaatccaacaccctttcatggtaaaaacactctgcaaactaggaagaaaagggaactttcttaacctgataaagacatccataaaaacccacagctaacaacataatagcaaaacattgaaaatttttcccctaatatcatgaaaattcctgatttccccactgctattcaacattatactagaaggtctagccagagcaattaggcaagaaaaagaaataaaatgaatcccaaataggaagaagtaaaactacatttgcagaaaacatggtcctatatattaaaaatcctaaagaatccacaaaatgattccggctgattttaaaaattcagcaatgttgcaggttgcaagatcaacacacaaaagtctaagaaaaacctgaggggaaattaaaacaatttcatttacaataacatgaaaaagaataaaatacttagaaataaatttgaccaagaaagtgcaagacttggacactgaaaagtacaaaacgttgctgaaagaaattaaagaagacctaaataaatggaagacatcctgtgctggcaggttggaagacttaacattgttaagatggcattactcccaaaattagtctatagatttaatacaatccccattaaaattccagtgacccttttacagaaactgaaaagctgaccctagaatttatatgggattgcaagttactgaaggtactcaagtctgttcaaaacaatcttgaacaagaataaagttgaaggactcacattttccaatttcaaaatttactgcaaagctacttcaatcaaaacagtgttgtgctggtataaaaatatataaagcaatagagtagaatggaaagtccagaaacaaattacgccaatacactatggtcaattgatttttgacaagggttccaggaccattcaatgaagaaagaacagtgtcttcaactaatagtgctaagacaagtgaatattcacatgcaaaagaatgaatttgtacctgtacttcataccatatataaaaattaattcaaaatagatcaaagacctaaatgtaagagctaaaaccataaaactttgagaagaaaatacaggaataaatcttcatgaccttggatttggcaatggtttcttagatatggcaccaaaagcacaagcaacaacagcaaaaaaaaaaaaaaaaaaaaaaaatcaaaattaaaagcttctacatatcaagggacactatgaagaaagtgaaaagacaacccacagaatgggagaaaatatttgtaaatcttacatatctggtaaggaactaatacctagaatatataaggaactccgatgctcgacaacaaaaagacaaaccaattttaaaatgggcaaaggacttaaatagacatttctctaatgaagatatacaaatggccgacaagcacatggaaagcactcaacctcatcagtcattatgcaaatcagcgccacaagaagataccacttcacacctattagaatgacgaaatagacctaggatctaaacctacaggaaaaaaaatgaataatagagaaaataaatgttagagaggatgtggagaaattgaaaaccttcattcgttgttggtgggaatgttaaatggtgtagccactgtggaaaacagtttggcagttcctcaataagttaaaaaaaagaattaccatatgacccagcaagtccactcctgggcatatactgaaaagaactgaaaacaggtgttcaagcaaaaactttcacgcaaatattcattgcagcactagtcacagtagccaaaaaagaggaaacaacccaaatggccatcagctgatgaatgaataaacaaattgtggtatctccacacggcacaatagaatattcagccataaagagaaatgagggactgatacatgctaaagcatggatgagccttgagcgcatttttgccaagtgaaagaaggcagacacaaaaggcaacgtattgcatgagtgcatttatatgaaatatccaaaataggcaaatccatggagacagaaagcagataaatggttgtaagaagctgagagaaaggagtggggagagattgctaaaaaggagtttccttctagggtgatgaaaatgttctggaactacttattggggatgattgcacaacatggtgaaggtactcaatgtcactaatggtaaatttcacatacactttaccataatttttaaaaagctttattagctacattatgttatgatacttaaatgtcataacaatagcattctgtacgcttcactaggataaaaacttcggatttatatgcatctggaagagaaatttttcactgtaatttgcaaataaatgaatttctaaaaatctaacagaaaggctcttaaatcttaatttcaacctaagaagggagtgagaaacaacgagaaccatgaggggagagttaacggggaacttccccaccgtccggtacatggcaggcattccacaaatgttttctgaaagttgaaatagacatcttttcatgaactctgtaatatttgaaattattgataactcttacacaaaaacaaatattcaataaaatgatatttaatttcactgtg

SEQ ID NO: 15177 - DNA, 6216 bp, Homo sapiens
  source 1..6216: mol_type = unassigned DNA
aagaagcatccatcaactgtaatggttccacaattcctggcagacatggaaaataatgtactttttcgggatgatatagaatgtcagaaactcattatggaagcaatgaagtaccatttattaccagagagacgacccatgttacaaagtcctcggacaaaacctaggaagtcaactgttggtacattatttgcagttgggggaatggattcaacaaaaggagcaacaagcattgaaaagtatgatctccgtacaaatatgtggactccagtagcaaatatgaatgggaggaggctacagttcggtgttgcagtgctagatgacaaactgtatgtggttggaggaagagatggactgaagactttgaatactgtagagtgctacaaccccaaaacaaaaacttggagtgtgatgccacctatgtccacacatagacatggccttggtgtggctgtactggaaggtcccatgtatgccgtaggaggacatgatggctggagctatctgaacacagtggaaagatgggaccctcaggctcgccagtggaattttgttgccactatgtctacccctaggagtacagtaggtgtggcagtactaagtggaaaactttatgcagttggtggtcgtgatggaagttcttgtctcaaatcagtagaatgttttgatcctcatactaataagtggacactgtgtgcacagatgtcaaaaaggagaggtggcgtaggagtgacgacctggaatggactgctgtatgctataggggggcacgatgctcccgcatccaacttgacttccagactctcagactgtgtggaaagatatgatcccaaaacagacatgtggactgcagtagcatccatgagcatcagcagagatgcagtgggggtctgtttacttggtgataagttatatgctgttggggggtatgatggacaggcataccttaatactgtggaggcttatgatccccagacaaatgagtggacccaggttgctccactgtgcctaggaagagctggagcttgtgttgtgactgtaaaattataatttagtgccccgttttctacatgaagacaccgtcttcctttattaatttagtataattattctatcaatggatacatttttagtaaatgtgcattgtcacaatcctgggcacaaagtgcctgatgtcaaaatgaagatagtaaaacaagggaggaagcagtggatggaccaggattaattcctttcatttcttagtaaattaaaacctgcagctggtggattgtgatcacacattcccgaagtaataagtgaggacgaatgcactgctctggaacataacccagtgctaactgggggtttcatttattcagtcaagcacatcttactcacatccagatttattttcctacagtgcaaacacaccagatgaaactttaaaatgttactttttgtaagcttatcataaatgagttgcagtaatttgtttgcttgtttgtttaaccacaaccactattttaatgatatactaaagataacactatttagttttttcagaaacatctgcattatatgtgtgttggttgtggattttgtttctaaaattggcttagtccaataaataaagaaaagcattaaggacttaaagcaacaataaccaaataaaaacttgataggatctttgaagtctatttaaatattcattccattacatctagactcaccaagaactacatgttatgatgttaagttgaagttgaaacatgatgttttgcattaaatttaagatatgcaaatttatgtagagaaaataaatgttatataccctataatctttcacctaattagtatttaattatatggatttgttttatattataaaagatgttttgattttgtcttttgatattgacaaaattgtttggatatccttatgttctcaagtctgtatctgcctcccctgccttatttcttatgttttgccacagttaacccattgtgcttctttgtaatcaaacagtttgtgggagaatgggcttattgaatgtctaaaaaataagtttaaagtgtttgttaccctaagttttttacatttttaaactctaattacatatgtgaatgttattactctcagtgaattgttattgtttgcaaaaatgcactgggcagtaacattttgtgataaatcctataagatataagtcattgagatgtctaagatgctttttattttaaccccagttaataaccaccttacggaaaataatatttgctaatattgtttattgtgaactaggaatcaaagtttttgtatgcatcaatgcacttaatccttataacaaccttatgaggtagttctattccctttttatagctaaggaaattggggtacagagaagttagccccaaggttatatattgcaagtaagtggcagagcagggattcatacaaagaccttctcactcagcagtcttcactcttactattcctgccactaggtagaaaaagaaagatttcggccgggcacagtggctcacgcctataattcccagcactttgggaggctgaggtgggcggatcacgaggtcaggagatggagaccatcctggctaacacagtgaaaccccgtctctactaaaaataaaaaataaaaaaaaattagccaggcgtggtggcgggtgcctgtacgcccagctactcgggaggctgaggcgggagaatggcgtgaacccaggaggaggagcttgcagtgtgccaagatcgcaccactgcactccagcctgggtgacagagcgagactccatcaaaaaaaaataaataaaaaaaaaataaaagatttcattttatgtgaggaattattttaataaaaaaaagagggtttatgctctatagtaataaaatttaccagtaacacccaatcagaaaattttggttccttagtatttagggaagacttttgtttaaatctcttatggaattttacatgttttgatttagaaaagtagatgcaatataatatatttcaagttttatacatattagatgaattgcatggtattttaggcaacttaactataaacaaatttattcatagaagcattgttgccaacaatttagatgacctcgatgaaaaaacacaccaattgacaaaactggctcaaaaggaaataaaaaatccaaacagacctgtaacaagtaaagagattgaaccagtaatcaaaaatctcccaacaaagaaagtccaggactaaatgagtttactggcaaactatgccaaacatataaagaagaattaacactaatccttctcgaactctcccaaaaaatggaagagaaaggagcaccctgtgacattctataaggcggacattaccttaacaccaaagccagacaaagacctcacagggaagctacagaccaatatcccttatgaatatagatgcaaaaaaacttcaaaatactagcaggccaaatccagcagcttattaaaatgatcacacagcatgaccaagtgagatttatcaaagaaatgcagggatggttctacatacaaatgtcaatcgatgtaataatataccatattaatagaatgaaggggaaaaaacagcatgatcacctcaattgataagaaaaagcatttgacaaaaatccaacaccctttcatggtaaaaacactctgcaaactaggaagaaaagggaactttcttaacctgataaagacatccataaaaacccacagctaacaacataatagcaaaacattgaaaatttttcccctaatatcatgaaaattcctgatttccccactgctattcaacattatactagaaggtctagccagagcaattaggcaagaaaaagaaataaaatgaatcccaaataggaagaagtaaaactacatttgcagaaaacatggtcctatatattaaaaatcctaaagaatccacaaaatgattccggctgattttaaaaattcagcaatgttgcaggttgcaagatcaacacacaaaagtctaagaaaaacctgaggggaaattaaaacaatttcatttacaataacatgaaaaagaataaaatacttagaaataaatttgaccaagaaagtgcaagacttggacactgaaaagtacaaaacgttgctgaaagaaattaaagaagacctaaataaatggaagacatcctgtgctggcaggttggaagacttaacattgttaagatggcattactcccaaaattagtctatagatttaatacaatccccattaaaattccagtgacccttttacagaaactgaaaagctgaccctagaatttatatgggattgcaagttactgaaggtactcaagtctgttcaaaacaatcttgaacaagaataaagttgaaggactcacattttccaatttcaaaatttactgcaaagctacttcaatcaaaacagtgttgtgctggtataaaaatatataaagcaatagagtagaatggaaagtccagaaacaaattacgccaatacactatggtcaattgatttttgacaagggttccaggaccattcaatgaagaaagaacagtgtcttcaactaatagtgctaagacaagtgaatattcacatgcaaaagaatgaatttgtacctgtacttcataccatatataaaaattaattcaaaatagatcaaagacctaaatgtaagagctaaaaccataaaactttgagaagaaaatacaggaataaatcttcatgaccttggatttggcaatggtttcttagatatggcaccaaaagcacaagcaacaacagcaaaaaaaaaaaaaaaaaaaaaaaatcaaaattaaaagcttctacatatcaagggacactatgaagaaagtgaaaagacaacccacagaatgggagaaaatatttgtaaatcttacatatctggtaaggaactaatacctagaatatataaggaactccgatgctcgacaacaaaaagacaaaccaattttaaaatgggcaaaggacttaaatagacatttctctaatgaagatatacaaatggccgacaagcacatggaaagcactcaacctcatcagtcattatgcaaatcagcgccacaagaagataccacttcacacctattagaatgacgaaatagacctaggatctaaacctacaggaaaaaaaatgaataatagagaaaataaatgttagagaggatgtggagaaattgaaaaccttcattcgttgttggtgggaatgttaaatggtgtagccactgtggaaaacagtttggcagttcctcaataagttaaaaaaaagaattaccatatgacccagcaagtccactcctgggcatatactgaaaagaactgaaaacaggtgttcaagcaaaaactttcacgcaaatattcattgcagcactagtcacagtagccaaaaaagaggaaacaacccaaatggccatcagctgatgaatgaataaacaaattgtggtatctccacacggcacaatagaatattcagccataaagagaaatgagggactgatacatgctaaagcatggatgagccttgagcgcatttttgccaagtgaaagaaggcagacacaaaaggcaacgtattgcatgagtgcatttatatgaaatatccaaaataggcaaatccatggagacagaaagcagataaatggttgtaagaagctgagagaaaggagtggggagagattgctaaaaaggagtttccttctagggtgatgaaaatgttctggaactacttattggggatgattgcacaacatggtgaaggtactcaatgtcactaatggtaaatttcacatacactttaccataatttttaaaaagctttattagctacattatgttatgatacttaaatgtcataacaatagcattctgtacgcttcactaggataaaaacttcggatttatatgcatctggaagagaaatttttcactgtaatttgcaaataaatgaatttctaaaaatctaacagaaaggctcttaaatcttaatttcaacctaagaagggagtgagaaacaacgagaaccatgaggggagagttaacggggaacttccccaccgtccggtacatggcaggcattccacaaatgttttctgaaagttgaaatagacatcttttcatgaactctgtaatatttgaaattattgataactcttacacaaaaacaaatattcaataaaatgatatttaatttcactgtg

SEQ ID NO: 15178 - DNA, 3425 bp, Homo sapiens
  source 1..3425: mol_type = unassigned DNA
ctcccgcctggccgccccggcccgccgtgacccacggccgcctccggagcccgacgcgcagggcatatacttctcttgtcttggttggatgcacaaatctgtgtgcagtgctttttgcccgttgcctagacgatcacttggtttctctgaggatgtctggttctcgtaaagagtttgatgtgaaacagattttgaaaatcagatggaggtggtttggtcatcaagcatcatctcctaattctacagttgacagccagcagggagaattttggaaccgaggacagactggagcaaacggtgggagaaagtttttagatccatgtagcctacaattgcctttggcttcaattggttaccgaaggtccagccaactggattttcagaattcaccttcttggccaatggcatccacctctgaagtccctgcatttgagtttacagcagaagattgtggcggtgcacattggctggatagaccagaagtggatgatggcactagtgaagaagaaaatgaatctgattccagttcatgcaggacttccaatagtagtcagacattatcatcctgtcatactatggagccatgtacatcagatgaatttttccaagcccttaatcatgccgagcaaacatttaaaaaaatggaaaactatttgagacataaacagttgtgtgatgtaattttagtcgctggtgatcgcagaattccagctcacagattggtgctctcctctgtctcagactattttgctgccatgtttactaatgatgtcagagaggcaagacaagaagaaataaaaatggaaggtgtagaaccaaattcgttgtggtccttgatccagtatgcttatacaggccgccttgaattaaaagaagataatattgagtgcctgttatctacagcttgccttcttcagctttcacaggttgtagaagcatgctgtaagtttttaatgaaacagcttcatccatccaactgtcttggaattcgttcttttgctgatgcccaaggttgtacagatttgcataaagtggctcacaattatactatggagcatttcatggaagtaatcagaaaccaggaatttgtattattaccagccagcgaaattgcaaagctcttggctagtgatgacatgaacattcctaatgaggagacaatattgaatgcacttcttacttgggtccgtcatgatttggaacagagacggaaagatctaagtaaacttttggcttatattaggctacctcttcttgcaccacagttcctggcagacatggaaaataatgtactttttcgggatgatatagaatgtcagaaactcattatggaagcaatgaagtaccatttattaccagagagacgacccatgttacaaagtcctcggacaaaacctaggaagtcaactgttggtacattatttgcagttgggggaatggattcaacaaaaggagcaacaagcattgaaaagtatgatctccgtacaaatatgtggactccagtagcaaatatgaatgggaggaggctacagttcggtgttgcagtgctagatgacaaactgtatgtggttggaggaagagatggactgaagactttgaatactgtagagtgctacaaccccaaaacaaaaacttggagtgtgatgccacctatgtccacacatagacatggccttggtgtggctgtactggaaggtcccatgtatgccgtaggaggacatgatggctggagctatctgaacacagtggaaagatgggaccctcaggctcgccagtggaattttgttgccactatgtctacccctaggagtacagtaggtgtggcagtactaagtggaaaactttatgcagttggtggtcgtgatggaagttcttgtctcaaatcagtagaatgttttgatcctcatactaataagtggacactgtgtgcacagatgtcaaaaaggagaggtggcgtaggagtgacgacctggaatggactgctgtatgctataggggggcacgatgctcccgcatccaacttgacttccagactctcagactgtgtggaaagatatgatcccaaaacagacatgtggactgcagtagcatccatgagcatcagcagagatgcagtgggggtctgtttacttggtgataagttatatgctgttggggggtatgatggacaggcataccttaatactgtggaggcttatgatccccagacaaatgagtggacccaggttgctccactgtgcctaggaagagctggagcttgtgttgtgactgtaaaattataatttagtgccccgttttctacatgaagacaccgtcttcctttattaatttagtataattattctatcaatggatacatttttagtaaatgtgcattgtcacaatcctgggcacaaagtgcctgatgtcaaaatgaagatagtaaaacaagggaggaagcagtggatggaccaggattaattcctttcatttcttagtaaattaaaacctgcagctggtggattgtgatcacacattcccgaagtaataagtgaggacgaatgcactgctctggaacataacccagtgctaactgggggtttcatttattcagtcaagcacatcttactcacatccagatttattttcctacagtgcaaacacaccagatgaaactttaaaatgttactttttgtaagcttatcataaatgagttgcagtaatttgtttgcttgtttgtttaaccacaaccactattttaatgatatactaaagataacactatttagttttttcagaaacatctgcattatatgtgtgttggttgtggattttgtttctaaaattggcttagtccaataaataaagaaaagcattaaggacttaaagcaacaataaccaaataaaaacttgataggatctttgaagtctatttaaatattcattccattacatctagactcaccaagaactacatgttatgatgttaagttgaagttgaaacatgatgttttgcattaaatttaagatatgcaaatttatgtagagaaaataaatgttatataccctataatctttcacctaattagtatttaattatatggatttgttttatattataaaagatgttttgattttgtcttttgatattgacaaaattgtttggatatccttatgttctcaagtctgtatctgcctcccctgccttatttcttatgttttgccacagttaacccattgtgcttctttgtaatcaaacagtttgtgggagaatgggcttattgaatgtctaaaaaataagtttaaagtgtttgttaccctaagttttttacatttttaaactctaattacatatgtgaatgttattactctcagtgaattgttattgtttgcaaaaatgcactgggcagtaacattttgtgataaatcctataagatataagtca

SEQ ID NO: 15179 - DNA, 3300 bp, Homo sapiens
  source 1..3300: mol_type = unassigned DNA
tgtttcatctttattcattatcctttgttctttaaaatctgatatattggcataaaagtaattgtagatatatatatgaatgtgatttattttcctttacatatttttgttgtgtacagcagggcatatacttctcttgtcttggttggatgcacaaatctgtgtgcagtgctttttgcccgttgcctagacgatcacttggtttctctgaggatgtctggttctcgtaaagagtttgatgtgaaacagattttgaaaatcagatggaggtggtttggtcatcaagcatcatctcctaattctacagttgacagccagcagggagaattttggaaccgaggacagactggagcaaacggtgggagaaagtttttagatccatgtagcctacaattgcctttggcttcaattggttaccgaaggtccagccaactggattttcagaattcaccttcttggccaatggcatccacctctgaagtccctgcatttgagtttacagcagaagattgtggcggtgcacattggctggatagaccagaagtggatgatggcactagtgaagaagaaaatgaatctgattccagttcatgcagattggtgctctcctctgtctcagactattttgctgccatgtttactaatgatgtcagagaggcaagacaagaagaaataaaaatggaaggtgtagaaccaaattcgttgtggtccttgatccagtatgcttatacaggccgccttgaattaaaagaagataatattgagtgcctgttatctacagcttgccttcttcagctttcacaggttgtagaagcatgctgtaagtttttaatgaaacagcttcatccatccaactgtcttggaattcgttcttttgctgatgcccaaggttgtacagatttgcataaagtggctcacaattatactatggagcatttcatggaagtaatcagaaaccaggaatttgtattattaccagccagcgaaattgcaaagctcttggctagtgatgacatgaacattcctaatgaggagacaatattgaatgcacttcttacttgggtccgtcatgatttggaacagagacggaaagatctaagtaaacttttggcttatattaggctacctcttcttgcaccacagttcctggcagacatggaaaataatgtactttttcgggatgatatagaatgtcagaaactcattatggaagcaatgaagtaccatttattaccagagagacgacccatgttacaaagtcctcggacaaaacctaggaagtcaactgttggtacattatttgcagttgggggaatggattcaacaaaaggagcaacaagcattgaaaagtatgatctccgtacaaatatgtggactccagtagcaaatatgaatgggaggaggctacagttcggtgttgcagtgctagatgacaaactgtatgtggttggaggaagagatggactgaagactttgaatactgtagagtgctacaaccccaaaacaaaaacttggagtgtgatgccacctatgtccacacatagacatggccttggtgtggctgtactggaaggtcccatgtatgccgtaggaggacatgatggctggagctatctgaacacagtggaaagatgggaccctcaggctcgccagtggaattttgttgccactatgtctacccctaggagtacagtaggtgtggcagtactaagtggaaaactttatgcagttggtggtcgtgatggaagttcttgtctcaaatcagtagaatgttttgatcctcatactaataagtggacactgtgtgcacagatgtcaaaaaggagaggtggcgtaggagtgacgacctggaatggactgctgtatgctataggggggcacgatgctcccgcatccaacttgacttccagactctcagactgtgtggaaagatatgatcccaaaacagacatgtggactgcagtagcatccatgagcatcagcagagatgcagtgggggtctgtttacttggtgataagttatatgctgttggggggtatgatggacaggcataccttaatactgtggaggcttatgatccccagacaaatgagtggacccaggttgctccactgtgcctaggaagagctggagcttgtgttgtgactgtaaaattataatttagtgccccgttttctacatgaagacaccgtcttcctttattaatttagtataattattctatcaatggatacatttttagtaaatgtgcattgtcacaatcctgggcacaaagtgcctgatgtcaaaatgaagatagtaaaacaagggaggaagcagtggatggaccaggattaattcctttcatttcttagtaaattaaaacctgcagctggtggattgtgatcacacattcccgaagtaataagtgaggacgaatgcactgctctggaacataacccagtgctaactgggggtttcatttattcagtcaagcacatcttactcacatccagatttattttcctacagtgcaaacacaccagatgaaactttaaaatgttactttttgtaagcttatcataaatgagttgcagtaatttgtttgcttgtttgtttaaccacaaccactattttaatgatatactaaagataacactatttagttttttcagaaacatctgcattatatgtgtgttggttgtggattttgtttctaaaattggcttagtccaataaataaagaaaagcattaaggacttaaagcaacaataaccaaataaaaacttgataggatctttgaagtctatttaaatattcattccattacatctagactcaccaagaactacatgttatgatgttaagttgaagttgaaacatgatgttttgcattaaatttaagatatgcaaatttatgtagagaaaataaatgttatataccctataatctttcacctaattagtatttaattatatggatttgttttatattataaaagatgttttgattttgtcttttgatattgacaaaattgtttggatatccttatgttctcaagtctgtatctgcctcccctgccttatttcttatgttttgccacagttaacccattgtgcttctttgtaatcaaacagtttgtgggagaatgggcttattgaatgtctaaaaaataagtttaaagtgtttgttaccctaagttttttacatttttaaactctaattacatatgtgaatgttattactctcagtgaattgttattgtttgcaaaaatgcactgggcagtaacattttgtgataaatcctataagatataag

SEQ ID NO: 15180 - DNA, 2926 bp, Homo sapiens
  source 1..2926: mol_type = unassigned DNA
ccgccgtgacccacggccgcctccggagcccgacgcggacttccaatagtagtcagacattatcatcctgtcatactatggagccatgtacatcagatgaatttttccaagcccttaatcatgccgagcaaacatttaaaaaaatggaaaactatttgagacataaacagttgtgtgatgtaattttagtcgctggtgatcgcagaattccagctcacagattggtgctctcctctgtctcagactattttgctgccatgtttactaatgatgtcagagaggcaagacaagaagaaataaaaatggaaggtgtagaaccaaattcgttgtggtccttgatccagtatgcttatacaggccgccttgaattaaaagaagataatattgagtgcctgttatctacagcttgccttcttcagctttcacaggttgtagaagcatgctgtaagtttttaatgaaacagcttcatccatccaactgtcttggaattcgttcttttgctgatgcccaaggttgtacagatttgcataaagtggctcacaattatactatggagcatttcatggaagtaatcagaaaccaggaatttgtattattaccagccagcgaaattgcaaagctcttggctagtgatgacatgaacattcctaatgaggagacaatattgaatgcacttcttacttgggtccgtcatgatttggaacagagacggaaagatctaagtaaacttttggcttatattaggctacctcttcttgcaccacagttcctggcagacatggaaaataatgtactttttcgggatgatatagaatgtcagaaactcattatggaagcaatgaagtaccatttattaccagagagacgacccatgttacaaagtcctcggacaaaacctaggaagtcaactgttggtacattatttgcagttgggggaatggattcaacaaaaggagcaacaagcattgaaaagtatgatctccgtacaaatatgtggactccagtagcaaatatgaatgggaggaggctacagttcggtgttgcagtgctagatgacaaactgtatgtggttggaggaagagatggactgaagactttgaatactgtagagtgctacaaccccaaaacaaaaacttggagtgtgatgccacctatgtccacacatagacatggccttggtgtggctgtactggaaggtcccatgtatgccgtaggaggacatgatggctggagctatctgaacacagtggaaagatgggaccctcaggctcgccagtggaattttgttgccactatgtctacccctaggagtacagtaggtgtggcagtactaagtggaaaactttatgcagttggtggtcgtgatggaagttcttgtctcaaatcagtagaatgttttgatcctcatactaataagtggacactgtgtgcacagatgtcaaaaaggagaggtggcgtaggagtgacgacctggaatggactgctgtatgctataggggggcacgatgctcccgcatccaacttgacttccagactctcagactgtgtggaaagatatgatcccaaaacagacatgtggactgcagtagcatccatgagcatcagcagagatgcagtgggggtctgtttacttggtgataagttatatgctgttggggggtatgatggacaggcataccttaatactgtggaggcttatgatccccagacaaatgagtggacccaggttgctccactgtgcctaggaagagctggagcttgtgttgtgactgtaaaattataatttagtgccccgttttctacatgaagacaccgtcttcctttattaatttagtataattattctatcaatggatacatttttagtaaatgtgcattgtcacaatcctgggcacaaagtgcctgatgtcaaaatgaagatagtaaaacaagggaggaagcagtggatggaccaggattaattcctttcatttcttagtaaattaaaacctgcagctggtggattgtgatcacacattcccgaagtaataagtgaggacgaatgcactgctctggaacataacccagtgctaactgggggtttcatttattcagtcaagcacatcttactcacatccagatttattttcctacagtgcaaacacaccagatgaaactttaaaatgttactttttgtaagcttatcataaatgagttgcagtaatttgtttgcttgtttgtttaaccacaaccactattttaatgatatactaaagataacactatttagttttttcagaaacatctgcattatatgtgtgttggttgtggattttgtttctaaaattggcttagtccaataaataaagaaaagcattaaggacttaaagcaacaataaccaaataaaaacttgataggatctttgaagtctatttaaatattcattccattacatctagactcaccaagaactacatgttatgatgttaagttgaagttgaaacatgatgttttgcattaaatttaagatatgcaaatttatgtagagaaaataaatgttatataccctataatctttcacctaattagtatttaattatatggatttgttttatattataaaagatgttttgattttgtcttttgatattgacaaaattgtttggatatccttatgttctcaagtctgtatctgcctcccctgccttatttcttatgttttgccacagttaacccattgtgcttctttgtaatcaaacagtttgtgggagaatgggcttattgaatgtctaaaaaataagtttaaagtgtttgttaccctaagttttttacatttttaaactctaattacatatgtgaatgttattactctcagtgaattgttattgtttgcaaaaatgcactgggcagtaacattttgtgataaatcctataagatataagtc

SEQ ID NO: 15181 - DNA, 6298 bp, Homo sapiens
  source 1..6298: mol_type = unassigned DNA
gggcctgcctgacacttgggcgctccttcagtctcgatgttgatggcaggacaaaggggcgcctggaccatgggtgatgtggtcgagaagagtttggaagggcccctggcaccttctacagatgagccctcccagaaaacaggagacttggtcgagatcttaaatggggaaaaggtcaaatttgacgacgcgggactctccttaattcttcagaatggcctggaaaccctgcgaatggaaaacgctctgacagatgtcatcttgtgtgtggacattcaggaattctcctgccaccgcgtggtgcttgccgcagccagcaactatttcagggccatgttctgcaacgatttaaaggaaaagtatgagaaaaggatcattattaaaggggttgatgctgagaccatgcacactctgttggactacacgtacaccagcaaggcgctgatcaccaagcagaatgtccagcgggtcctggaggctgctaacctcttccagttcctgcggatggtggatgcctgtgccagcttcctcactgaagccttgaacccagaaaactgcgttggaatactgaggctggctgacacacactcgctggacagtctaaagaagcaggttcagagttacatcattcaaaactttgtgcagattctgaactctgaggagtttcttgacctgcccgtggacactctgcaccacatcttgaagagtgatgacctttacgtgaccgaggaggctcaggtgtttgagaccgtgatgagctgggtccggcacaagccatcagaacgactctgcttactcccctatgtcctcgagaacgtgcgcttaccgcttctggacccgtggtactttgtggagacggtggaagcagatcctctcatcaggcagtgcccagaggtcttcccgctgctccaggaagccaggatgtaccacctttctggcaatgagatcatttcggaacgcaccaagcccaggatgcatgagttccagtctgaggtgttcatgatcattggcggctgcacgaaggatgaacggtttgtggcagaggtgacctgcctggaccccctgaggcgcagccgcctggaggtggccaagctcccgctaacagagcatgagctggagagtgagaataagaagtgggtggagtttgcatgcgtgacattgaaaaatgaggtctacatctcaggtggcaaagaaacacagcatgatgtttggaaatataattcttcgatcaacaagtggattcagattgagtatttaaacataggccgctggaggcataagatggtggtgttgggtggcaaggtctatgtgatcggaggctttgacggcttacagagaatcaacaatgtggagacctacgacccctttcacaactgctggtcagaggccgcacccctccttgtccatgtcagttcctttgcagccaccagccataagaagaagctgtatgtgatcgggggagggcccaatgggaaactggccacagacaagactcagtgttatgacccttccaccaacaagtggagtttgaaggcggccatgcccgtggaggctaaatgcatcaatgcagtgagtttccgggaccgcatctatgtcgttggtggggccatgagagcgctgtacgcctacagcccgctggaagacagctggtgcctggtgacccagctcagccacgagcgggccagctgcggtatcgcgccctgcaacaaccggctctacatcaccggcgggcgggacgagaagaacgaggttatcgccacggtgctgtgctgggaccccgaggcccagaaactgacagaggagtgcgtcctgccccggggcgtgtcgcaccacggcagcgtcaccatcaggaagtcgtacacccacatccgcaggatcgtgcccggagcagtgtctgtctgacggcaggatggggagctggagagcccccccgaccctcagcgtacccgcctcacctctcaccctcctccagtcccacttcaggcagcaggctcgagtttgaggccatacatcaggggatccccttgactcactttgggggaaccttggaagtcacagtttggggtcacttgagaccggccaggaatgtttgcatgacctacctcaggaggggaggcgaggaagagtaatatttagcattcaggacccacccaccctatgccggcttctgtgccaggcacttccttttatcggttcatttaacctggtgactggctcttatcacttctagtttacaggtgagggaaccaagtttcacagaggctaagtggcgtgcccctgatcactcagatagcaagtagctaccccaggagtctaaaatccaggtctttcatctccgaagtcaatgctctttccaccatgctgcctatctcagagcaggaaaaacaaacaaaaaacaacaacaaaacctggctcttgctgggcgtggcggctcacgcctgtaatcccagccctatgggaggctgaggcgggcggatgacctgaggtcaggagttcaagaccagcctggccaacatggtgagaccgccccgtctctactaaaaatacaaaaattagccgcgtgcagtggcaggcgcctgtaattccagctactcaggaggctgaggcaggaggatcacttgaacttgggaggtggaggttgcagtgagccgagatcgccacactgcactgcagcccgggaaacaaaagtgaagctctgtcttcaaaacaaaaacaaaaacaaaaacaaaaacaaagaaacctggctcatttcttgtttcggcaagtctgctaaaagattcactcagcacagcagggaaataaaggtgtttcctgctttctttccttttctttcttattctgcatcctccctcgtccccgccctttaccaatatttaaaccaaggagtcatttgggctccttgccaagaacatctcataggttcttccacttgaaaggtctgggggatgggcttgggaaggcctgtttgctttgaaagagatgaaatacttgtgttctgtcctcctcccattgaaaccctcttttttttttttttgagatgaagtcgcccaggctggagtgcagtggcatgatctcggctcactgcaacctctgtcaccctggttcaagtgattttcctgcctcagcctcctgagtagctgggattacaggcacctgccaccgcgcctggctaatttttgtagttttagtagagacggggtttcaccatcttggccaggctggtcttgaacgcctgaccttgtgatctgcccgcctcggcctcccgaagtgctgggattacaggtgtgagccactgggcccggtctttttttttttaaatgatcataagatggcccattttggaccggaactgtcattgccagacagaattgtacctttagcacattctggtgccctggcctcttagtgttcaccagttgtactgcaatatagacaagatgtctctagagactcaaactactgttttattaaaaaagtaaacacctgagcacagctggcctacacaggagcgacagattctccttgatggtacactttctagtttttacacagtgatttaggtccacgttcctgataccccatcctcctgaagccttcgttttcaagacttttaaaaagcacttctacttggttttttgatcagtgtagctcaattgtgacttaaagaacagaatctgtccttcactgtaagagctacagctttcaaatgagctcactggaaattcattctaatccccaagctggagaaacaggttaagagatcctgtttcatatgctgtatttaaaaagcaacaatgataacaacatagtaactgcgttacccaatggactttattttcatcatatgatttcaattctctttatagagttttatttcatatccggtgtggcttgttcttttcagcagtttgggaagttagttattagagttgatagtgaattgaattttcattaaacagtcacggttagaagaagctaatatttgaaacagattttaaaaacttgaaaaattacaggtgagatttctgtttatgccagattattgaagataaatataaatgtatgttggtgtgtgaaatgctctgtgccttagaagcgtgacagttcagctctctgctgtggaaagtaacacagggcaatagaaacatatttgtggaattttagaacaaactattgctgactcatgagcactataataaccatcaggaagctcccaactgaagcaatgtaacagtgtaatctagttcaattcagcaaacattcatggagttcttcatgtctgtcaagccttgaggacacccacgaatggcaaatctccacgctagacactcaatacaggtaaataggccaccagttaatattcttgtttttattttcttcaagttagctaaaaatgagatgcgtatgaagtgaggaggctggatccaagtcttgattgcctttcagggggtcaaggtggtaagctgtgcagtgaagtcaaccagtggccatggcttacatgtttgtctctttgagatcgccaccagaaccatttgtgaactgatttgtgaaggaaaagtcagtcttactccaaagactattgcagggaggaacttccagagaggaaatccaatgacaatggtactggcatacacagggagcctcccttcaaaaagacagcgcccctagtcagggaggggatggcggtcctttgataagacccataggcaaacttcgagcccatcagcaggtcaaccctatgctgggaaagtgaggatttgggatttctgtgctataaacctgattctaaatgtaggacccaagtttctggactacttcagaatacctaaatgaatcatggaaacactctttatgattttttacaacaccagatatgcaggtgaattgtggaaaatgtcatgtagctgacactcaagaaatagggattcctaataatggcatgggtagggaacagatacacctggttagaaggtctagggttctgtatatgaagctgccagtctgtagctcttcgagaaagaaagttcaagtcatttgggggaaacttaagaatagtcatcagggttttagcttctaggcaccagccaaggatgagaacttctaaaatctaaaatccatttcaagaaataaagacgaacacatttgcaggaaggtaactgttataacccacaccatcagcagggggaaagccaagctgagaataaacccagagacaaagaaccctcggactcaggcaggacatggcaggatgttctggcacagcagactggagactgaggcagggcctgtgagtggacagagcacccctggctgggaagaagaagatggggtaggaggaggtcaggttccaaggatgcaggtctggaaaatgatatcggaggccctggagtttgtgagcttggctctagtcccaagaagggtgagggagaataagggtaagggagtattctaggcaaggaactaaggaaggaatccccttcttagagcagaggcacaagttagagcaggcccagcatttgggccaacttactgtggggcctctgagctgctcagctgggtctcctgtcctagagggaaggtggcccagagtctttggtggagcggaatctgtagatgaggttaagggactccagttgccaaggttgatctgaaacaggcagggagctaagctcatcagaacaccaacagattcatgttctcgtcttagctttcatctattctggtctcaatggcttcgggaaacacacatatacacatacaccatgcccttgaactcaaagcaaactacgctctcagggaaatacaaatatcacgttcttatagctgtaaagtatagcttagctatttatagaagactatgaggtactgttgtgagttatttgcttatcctgttttattctgaaaaatgaaagtgctcaatagaatttttaacgttggcaacaccataaggatttcttatgttaagtcccaacttggggttgcaaaatcattttttcccttaatacctgggtgttgtattagatctcataatttgacaagttaaccttttagaaatccacatatatctcaaatctggctactgcaaaaccagttttgacaggtcagattttcatatgtataggtataaatagccaacactcagtgaacaaaatcctttaagcattttggttacataaagttgtatgttttaagtgatcaaactaagaatattgtttataggttttaaaaaccaaaccaataaaatttttatttattcaataaaatatgcacagaacagatgcaaatgtgttatatacaa

SEQ ID NO: 15182 - DNA, 3304 bp, Homo sapiens
  source 1..3304: mol_type = unassigned DNA
atagtgcccccgcctccttgcgcgaagtgcgcaggctcctgggcagggctcgggttctgcccggggacgcagcccagttggtagcgtcgctccctgagcgtttctaagggggccgcccggccttgtctttcggcagtggccgagccaccgccgcctgccgcgcgttccagagctgggcgctgcagctgcactgccgatcgccgtgtttggtcgatagaatccccagtgtgcccagagagtgcgacccctcgcccggcccggcgagccccgggcgtgaaccgagctgagggaggatggcagcctctggggtggagaagagcagcaagaagaagaccgagaagaaacttgctgctcgggaagaagctaaattgttggcgggtttcatgggcgtcatgaataacatgcggaaacagtgatttaaatctaccacccagctgtagttgaatctacaatctgctcagggatttatactcaatgccaatttgatatcatgctgggagggactgattgcagaaccttcttgacaagccacataaatctaaagaaaacgttgtgtgacgtgatcctcatggtccaggaaagaaagatacctgctcatcgtgttgttcttgctgcagccagtcatttttttaacttaatgttcacaactaacatgcttgaatcaaagtcctttgaagtagaactcaaagatgctgaacctgatattattgaacaactggtggaatttgcttatactgctagaatttccgtgaatagcaacaatgttcagtctttgctggatgcagcaaaccaatatcagattgaacctgtgaagaaaatgtgtgttgattttttgaaagaacaagttgatgcttcaaattgtcttggtataagtgtgctagcggagtgtctagattgtcctgaattgaaagcaactgcagatgactttattcatcagcactttactgaagtttacaaaactgatgaatttcttcaacttgatgtcaagcgagtaacacatcttctcaaccaggacactctgactgtgagagcagaggatcaggtttatgatgctgcagtcaggtggttgaaatacgatgaacctaatcgccagccatttatggttgatatccttgctaaagtcaggtttcctcttatatcaaagaatttcttaagtaaaacggtacaagctgaaccacttattcaagacaatcctgaatgccttaagatggtgataagtggaatgaggtaccatctactgtctccagaggaccgagaagaacttgtagatggcacaagacctagaagaaagaaacatgactaccgcatagccctatttggaggctctcaaccacagtcttgtagatattttaacccaaaggattatagctggacagacatccgctgcccctttgaaaaacgaagagatgcagcatgcgtgttttgggacaatgtagtatacattttgggaggctctcagcttttcccaataaagcgaatggactgctataatgtagtgaaggatagctggtattcgaaactgggtcctccgacacctcgagacagccttgctgcatgtgctgcagaaggcaaaatttatacatctggaggttcagaagtaggaaactcagctctgtatttatttgagtgctatgatacgagaactgaaagctggcacacaaagcccagcatgctgacccagcgctgcagccatgggatggtggaagccaatggcctaatctatgtttgtggtggaagtttaggaaacaatgtttctgggagagtgcttaattcctgtgaagtttatgatcctgccacagaaacatggactgagctgtgtccaatgattgaagccaggaagaatcatgggctggtatttgtaaaagacaagatatttgctgtgggtggtcagaatggtttaggtggtctggacaatgtggaatattacgatattaagttgaacgaatggaagatggtctcaccaatgccatggaagggtgtaacagtgaaatgtgcagcagttggctctatagtttatgtcttggctggttttcagggtgttggtcgattaggacacattctcgaatataataccgaaacagacaaatgggttgccaactccaaagttcgtgcttttccagtcacaagttgtttaatttgtgttgtcgatacttgtggagcaaatgaagagacccttgaaacatgaaaaatgagtggacttcagactcatcagagactctaaaatatagccaccagtgctttgttccaggagtttggtgacaaagttttggtttggtgttttggtaaagaaagtttcaagtgaaatgaggttcctataaaatagatgtttcttttatatggatttccttaattcaaagatcatattttagctggccacaaaaccaagaacatatctagcaagaaaacttgaaaaagtataagcatttgttaaaaatgtgaatttcttgaatgaatttcacatttgtaactatgattttggcagaatagaagattggctcatcagtgaagcgcagtatcttagctctagattctattttcatgcatcacagaagtgctatacggttaggtctgtttgtgctcagtcaagaactaagaaatagtatgaattgtaagtcaagatgggcaactcagatggagcagcttagtctcacagtttgcttgtctatttattttatttagtgccaaatgtattccattttaaaagtaagccagagtgagtcaaggcatatacacactttctcacaaaacttcctaaacagatttgggggtttaatatgtccaactcctcatgaaatatattcaatccacttaaatatattccatctttttaacataaaatgtaaagcttagcacccatcattaatttatgtctctgttttatccagtggttaaaaaaggattctgcctctttagtcctcactgttaaataaaacccaatcatagtaagtgattaactagcaaaaagtaaagctatttatagcaaatttctagatcattagaaaagcactggtagttgtacaatatcagtgttgactttgaacttctttaacgagatcatgaattcttttcccttagccaaaacatgaaatatttaacctagttgtctctaaaagttttgtaatcatgagttagatatatgtcatctcctattcattgcttttatgtgatcaataaatcttttacaaacccaactactcatttccttcctagtaatactttgcctttttcactgtgtatggaatgaaacatgtaaagctgtcacaatcaatgtttttatctgataatattaaatattttttaactt

SEQ ID NO: 15183 - DNA, 3127 bp, Homo sapiens
  source 1..3127: mol_type = unassigned DNA
cgggttctgcccggggacgcagcccagttggtagcgtcgctccctgagcgtttctaagggggccgcccggccttgtctttcggcagtggccgagccaccgccgcctgccgcgcgttccagagctgggcgctgcagctgcactgccgatcgccgtgtttggtcgatagaatccccagtgtgcccagagagtgcgacccctcgcccggcccggcgagccccgggcgtgaaccgagctgagggaggatggcagcctctggggtggagaagagcagcaagaagaagaccgagaagaaacttgctgctcgggaagaagctaaattgttggcgggtttcatgggcgtcatgaataacatgcggaaacagaaaacgttgtgtgacgtgatcctcatggtccaggaaagaaagatacctgctcatcgtgttgttcttgctgcagccagtcatttttttaacttaatgttcacaactaacatgcttgaatcaaagtcctttgaagtagaactcaaagatgctgaacctgatattattgaacaactggtggaatttgcttatactgctagaatttccgtgaatagcaacaatgttcagtctttgctggatgcagcaaaccaatatcagattgaacctgtgaagaaaatgtgtgttgattttttgaaagaacaagttgatgcttcaaattgtcttggtataagtgtgctagcggagtgtctagattgtcctgaattgaaagcaactgcagatgactttattcatcagcactttactgaagtttacaaaactgatgaatttcttcaacttgatgtcaagcgagtaacacatcttctcaaccaggacactctgactgtgagagcagaggatcaggtttatgatgctgcagtcaggtggttgaaatacgatgaacctaatcgccagccatttatggttgatatccttgctaaagtcaggtttcctcttatatcaaagaatttcttaagtaaaacggtacaagctgaaccacttattcaagacaatcctgaatgccttaagatggtgataagtggaatgaggtaccatctactgtctccagaggaccgagaagaacttgtagatggcacaagacctagaagaaagaaacatgactaccgcatagccctatttggaggctctcaaccacagtcttgtagatattttaacccaaaggattatagctggacagacatccgctgcccctttgaaaaacgaagagatgcagcatgcgtgttttgggacaatgtagtatacattttgggaggctctcagcttttcccaataaagcgaatggactgctataatgtagtgaaggatagctggtattcgaaactgggtcctccgacacctcgagacagccttgctgcatgtgctgcagaaggcaaaatttatacatctggaggttcagaagtaggaaactcagctctgtatttatttgagtgctatgatacgagaactgaaagctggcacacaaagcccagcatgctgacccagcgctgcagccatgggatggtggaagccaatggcctaatctatgtttgtggtggaagtttaggaaacaatgtttctgggagagtgcttaattcctgtgaagtttatgatcctgccacagaaacatggactgagctgtgtccaatgattgaagccaggaagaatcatgggctggtatttgtaaaagacaagatatttgctgtgggtggtcagaatggtttaggtggtctggacaatgtggaatattacgatattaagttgaacgaatggaagatggtctcaccaatgccatggaagggtgtaacagtgaaatgtgcagcagttggctctatagtttatgtcttggctggttttcagggtgttggtcgattaggacacattctcgaatataataccgaaacagacaaatgggttgccaactccaaagttcgtgcttttccagtcacaagttgtttaatttgtgttgtcgatacttgtggagcaaatgaagagacccttgaaacatgaaaaatgagtggacttcagactcatcagagactctaaaatatagccaccagtgctttgttccaggagtttggtgacaaagttttggtttggtgttttggtaaagaaagtttcaagtgaaatgaggttcctataaaatagatgtttcttttatatggatttccttaattcaaagatcatattttagctggccacaaaaccaagaacatatctagcaagaaaacttgaaaaagtataagcatttgttaaaaatgtgaatttcttgaatgaatttcacatttgtaactatgattttggcagaatagaagattggctcatcagtgaagcgcagtatcttagctctagattctattttcatgcatcacagaagtgctatacggttaggtctgtttgtgctcagtcaagaactaagaaatagtatgaattgtaagtcaagatgggcaactcagatggagcagcttagtctcacagtttgcttgtctatttattttatttagtgccaaatgtattccattttaaaagtaagccagagtgagtcaaggcatatacacactttctcacaaaacttcctaaacagatttgggggtttaatatgtccaactcctcatgaaatatattcaatccacttaaatatattccatctttttaacataaaatgtaaagcttagcacccatcattaatttatgtctctgttttatccagtggttaaaaaaggattctgcctctttagtcctcactgttaaataaaacccaatcatagtaagtgattaactagcaaaaagtaaagctatttatagcaaatttctagatcattagaaaagcactggtagttgtacaatatcagtgttgactttgaacttctttaacgagatcatgaattcttttcccttagccaaaacatgaaatatttaacctagttgtctctaaaagttttgtaatcatgagttagatatatgtcatctcctattcattgcttttatgtgatcaataaatcttttacaaacccaactactcatttccttcctagtaatactttgcctttttcactgtgtatggaatgaaacatgtaaagctgtcacaatcaatgtttttatctgataatattaaatattttttaacttaaaa

SEQ ID NO: 15184 - DNA, 3231 bp, Homo sapiens
  source 1..3231: mol_type = unassigned DNA
cgcagttggtagaggggcgcgtaaaacaattctcgagcaaaagtgcttctcgtctgccgaggatgtagctcccaagtcagactcctgggggactcctcaggctggctttcgccgtcgggtatcggttgtgtaacagctctgccctagttatctctttgtggggcgaggatccttccattggcgagccgttttaaggtgccgtgagatcttgtgtgaagaaacccgttggcatagcccaaaccgaagcccccaaagggaggagagttgctggcctgacatcagctgctcttaaataaggatccccgccccctcctgtgttccccggtggagctagttgaagaggagtcctcctgttcgtgctaatttagagcagaagcagccatcgataaataccatgccatcttctaagggcactgtgcgcctctgttattaagaggagctctttgttctgtccttggtgtgtggtgcattcgtgaaattctgcagcacatcggcgaaagaaaacgttgtgtgacgtgatcctcatggtccaggaaagaaagatacctgctcatcgtgttgttcttgctgcagccagtcatttttttaacttaatgttcacaactaacatgcttgaatcaaagtcctttgaagtagaactcaaagatgctgaacctgatattattgaacaactggtggaatttgcttatactgctagaatttccgtgaatagcaacaatgttcagtctttgctggatgcagcaaaccaatatcagattgaacctgtgaagaaaatgtgtgttgattttttgaaagaacaagttgatgcttcaaattgtcttggtataagtgtgctagcggagtgtctagattgtcctgaattgaaagcaactgcagatgactttattcatcagcactttactgaagtttacaaaactgatgaatttcttcaacttgatgtcaagcgagtaacacatcttctcaaccaggacactctgactgtgagagcagaggatcaggtttatgatgctgcagtcaggtggttgaaatacgatgaacctaatcgccagccatttatggttgatatccttgctaaagtcaggtttcctcttatatcaaagaatttcttaagtaaaacggtacaagctgaaccacttattcaagacaatcctgaatgccttaagatggtgataagtggaatgaggtaccatctactgtctccagaggaccgagaagaacttgtagatggcacaagacctagaagaaagaaacatgactaccgcatagccctatttggaggctctcaaccacagtcttgtagatattttaacccaaaggattatagctggacagacatccgctgcccctttgaaaaacgaagagatgcagcatgcgtgttttgggacaatgtagtatacattttgggaggctctcagcttttcccaataaagcgaatggactgctataatgtagtgaaggatagctggtattcgaaactgggtcctccgacacctcgagacagccttgctgcatgtgctgcagaaggcaaaatttatacatctggaggttcagaagtaggaaactcagctctgtatttatttgagtgctatgatacgagaactgaaagctggcacacaaagcccagcatgctgacccagcgctgcagccatgggatggtggaagccaatggcctaatctatgtttgtggtggaagtttaggaaacaatgtttctgggagagtgcttaattcctgtgaagtttatgatcctgccacagaaacatggactgagctgtgtccaatgattgaagccaggaagaatcatgggctggtatttgtaaaagacaagatatttgctgtgggtggtcagaatggtttaggtggtctggacaatgtggaatattacgatattaagttgaacgaatggaagatggtctcaccaatgccatggaagggtgtaacagtgaaatgtgcagcagttggctctatagtttatgtcttggctggttttcagggtgttggtcgattaggacacattctcgaatataataccgaaacagacaaatgggttgccaactccaaagttcgtgcttttccagtcacaagttgtttaatttgtgttgtcgatacttgtggagcaaatgaagagacccttgaaacatgaaaaatgagtggacttcagactcatcagagactctaaaatatagccaccagtgctttgttccaggagtttggtgacaaagttttggtttggtgttttggtaaagaaagtttcaagtgaaatgaggttcctataaaatagatgtttcttttatatggatttccttaattcaaagatcatattttagctggccacaaaaccaagaacatatctagcaagaaaacttgaaaaagtataagcatttgttaaaaatgtgaatttcttgaatgaatttcacatttgtaactatgattttggcagaatagaagattggctcatcagtgaagcgcagtatcttagctctagattctattttcatgcatcacagaagtgctatacggttaggtctgtttgtgctcagtcaagaactaagaaatagtatgaattgtaagtcaagatgggcaactcagatggagcagcttagtctcacagtttgcttgtctatttattttatttagtgccaaatgtattccattttaaaagtaagccagagtgagtcaaggcatatacacactttctcacaaaacttcctaaacagatttgggggtttaatatgtccaactcctcatgaaatatattcaatccacttaaatatattccatctttttaacataaaatgtaaagcttagcacccatcattaatttatgtctctgttttatccagtggttaaaaaaggattctgcctctttagtcctcactgttaaataaaacccaatcatagtaagtgattaactagcaaaaagtaaagctatttatagcaaatttctagatcattagaaaagcactggtagttgtacaatatcagtgttgactttgaacttctttaacgagatcatgaattcttttcccttagccaaaacatgaaatatttaacctagttgtctctaaaagttttgtaatcatgagttagatatatgtcatctcctattcattgcttttatgtgatcaataaatcttttacaaacccaactactcatttccttcctagtaatactttgcctttttcactgtgtatggaatgaaacatgtaaagctgtcacaatcaatgttttt

SEQ ID NO: 15185 - DNA, 2932 bp, Homo sapiens
  source 1..2932: mol_type = unassigned DNA
atagtgcccccgcctccttgcgcgaagtgcgcaggctcctgggcagggctcgggttctgcccggggacgcagcccagttggtagcgtcgctccctgagcgtttctaagggggccgcccggccttgtctttcggcagtggccgagccaccgccgcctgccgcgcgttccagagctgggcgctgcagctgcactgccgatcgccgtgtttggtcgatagaatccccagtgtgcccagagagtgcgacccctcgcccggcccggcgagccccgggcgtgaaccgagctgagggaggatggcagcctctggggtggagaagagcagcaagaagaagaccgagaagaaacttgctgctcgggaagaagctaaattgttggcgggtttcatgggcgtcatgaataacatgcggaaacagaaaacgttgtgtgacgtgatcctcatggtccaggaaagaaagatacctgctcatcgtgttgttcttgctgcagccagtcatttttttaacttaatgttcacaactaacatgcttgaatcaaagtcctttgaagtagaactcaaagatgctgaacctgatattattgaacaactgttgcactacaaattcttcaaaatgaaaaaccgcaaggatggaagagtttcagtatcctatgccatactaattcaaggactgaaaatttatgaaatttactcaactaattttcctgaacactttactgaagtttacaaaactgatgaatttcttcaacttgatgtcaagcgagtaacacatcttctcaaccaggacactctgactgtgagagcagaggatcaggtttatgatgctgcagtcaggtggttgaaatacgatgaacctaatcgccagccatttatggttgatatccttgctaaagtcaggtttcctcttatatcaaagaatttcttaagtaaaacggtacaagctgaaccacttattcaagacaatcctgaatgccttaagatggtgataagtggaatgaggtaccatctactgtctccagaggaccgagaagaacttgtagatggcacaagacctagaagaaagaaacatgactaccgcatagccctatttggaggctctcaaccacagtcttgtagatattttaacccaaaggattatagctggacagacatccgctgcccctttgaaaaacgaagagatgcagcatgcgtgttttgggacaatgtagtatacattttgggaggctctcagcttttcccaataaagcgaatggactgctataatgtagtgaaggatagctggtattcgaaactgggtcctccgacacctcgagacagccttgctgcatgtgctgcagaaggcaaaatttatacatctggaggttcagaagtaggaaactcagctctgtatttattttgcttaattcctgtgaagtttatgatcctgccacagaaacatggactgagctgtgtccaatgattgaagccaggaagaatcatgggctggtatttgtaaaagacaagatatttgctgtgggtggtcagaatggtttaggtggtctggacaatgtggaatattacgatattaagttgaacgaatggaagatggtctcaccaatgccatggaagggtgtaacagtgaaatgtgcagcagttggctctatagtttatgtcttggctggttttcagggtgttggtcgattaggacacattctcgaatataataccgaaacagacaaatgggttgccaactccaaagttcgtgcttttccagtcacaagttgtttaatttgtgttgtcgatacttgtggagcaaatgaagagacccttgaaacatgaaaaatgagtggacttcagactcatcagagactctaaaatatagccaccagtgctttgttccaggagtttggtgacaaagttttggtttggtgttttggtaaagaaagtttcaagtgaaatgaggttcctataaaatagatgtttcttttatatggatttccttaattcaaagatcatattttagctggccacaaaaccaagaacatatctagcaagaaaacttgaaaaagtataagcatttgttaaaaatgtgaatttcttgaatgaatttcacatttgtaactatgattttggcagaatagaagattggctcatcagtgaagcgcagtatcttagctctagattctattttcatgcatcacagaagtgctatacggttaggtctgtttgtgctcagtcaagaactaagaaatagtatgaattgtaagtcaagatgggcaactcagatggagcagcttagtctcacagtttgcttgtctatttattttatttagtgccaaatgtattccattttaaaagtaagccagagtgagtcaaggcatatacacactttctcacaaaacttcctaaacagatttgggggtttaatatgtccaactcctcatgaaatatattcaatccacttaaatatattccatctttttaacataaaatgtaaagcttagcacccatcattaatttatgtctctgttttatccagtggttaaaaaaggattctgcctctttagtcctcactgttaaataaaacccaatcatagtaagtgattaactagcaaaaagtaaagctatttatagcaaatttctagatcattagaaaagcactggtagttgtacaatatcagtgttgactttgaacttctttaacgagatcatgaattcttttcccttagccaaaacatgaaatatttaacctagttgtctctaaaagttttgtaatcatgagttagatatatgtcatctcctattcattgcttttatgtgatcaataaatcttttacaaacccaactactcatttccttcctagtaatactttgcctttttcactgtgtatggaatgaaacatgtaaagctgtcacaatcaatgtttttatctgataatattaaatattttttaactt

SEQ ID NO: 15186 - DNA, 2696 bp, Homo sapiens
  source 1..2696: mol_type = unassigned DNA
atagtgcccccgcctccttgcgcgaagtgcgcaggctcctgggcagggctcgggttctgcccggggacgcagcccagttggtagcgtcgctccctgagcgtttctaagggggccgcccggccttgtctttcggcagtggccgagccaccgccgcctgccgcgcgttccagagctgggcgctgcagctgcactgccgatcgccgtgtttggtcgatagaatccccagtgtgcccagagagtgcgacccctcgcccggcccggcgagccccgggcgtgaaccgagctgagggaggatggcagcctctggggtggagaagagcagcaagaagaagaccgagaagaaacttgctgctcgggaagaagctaaattgttggcgggtttcatgggcgtcatgaataacatgcggaaacagaaaacgttgtgtgacgtgatcctcatggtccaggaaagaaagatacctgctcatcgtgttgttcttgctgcagccagtcatttttttaacttaatgttcacaactaacatgcttgaatcaaagaatttcttaagtaaaacggtacaagctgaaccacttattcaagacaatcctgaatgccttaagatggtgataagtggaatgaggtaccatctactgtctccagaggaccgagaagaacttgtagatggcacaagacctagaagaaagaaacatgactaccgcatagccctatttggaggctctcaaccacagtcttgtagatattttaacccaaaggattatagctggacagacatccgctgcccctttgaaaaacgaagagatgcagcatgcgtgttttgggacaatgtagtatacattttgggaggctctcagcttttcccaataaagcgaatggactgctataatgtagtgaaggatagctggtattcgaaactgggtcctccgacacctcgagacagccttgctgcatgtgctgcagaaggcaaaatttatacatctggaggttcagaagtaggaaactcagctctgtatttatttgagtgctatgatacgagaactgaaagctggcacacaaagcccagcatgctgacccagcgctgcagccatgggatggtggaagccaatggcctaatctatgtttgtggtggaagtttaggaaacaatgtttctgggagagtgcttaattcctgtgaagtttatgatcctgccacagaaacatggactgagctgtgtccaatgattgaagccaggaagaatcatgggctggtatttgtaaaagacaagatatttgctgtgggtggtcagaatggtttaggtggtctggacaatgtggaatattacgatattaagttgaacgaatggaagatggtctcaccaatgccatggaagggtgtaacagtgaaatgtgcagcagttggctctatagtttatgtcttggctggttttcagggtgttggtcgattaggacacattctcgaatataataccgaaacagacaaatgggttgccaactccaaagttcgtgcttttccagtcacaagttgtttaatttgtgttgtcgatacttgtggagcaaatgaagagacccttgaaacatgaaaaatgagtggacttcagactcatcagagactctaaaatatagccaccagtgctttgttccaggagtttggtgacaaagttttggtttggtgttttggtaaagaaagtttcaagtgaaatgaggttcctataaaatagatgtttcttttatatggatttccttaattcaaagatcatattttagctggccacaaaaccaagaacatatctagcaagaaaacttgaaaaagtataagcatttgttaaaaatgtgaatttcttgaatgaatttcacatttgtaactatgattttggcagaatagaagattggctcatcagtgaagcgcagtatcttagctctagattctattttcatgcatcacagaagtgctatacggttaggtctgtttgtgctcagtcaagaactaagaaatagtatgaattgtaagtcaagatgggcaactcagatggagcagcttagtctcacagtttgcttgtctatttattttatttagtgccaaatgtattccattttaaaagtaagccagagtgagtcaaggcatatacacactttctcacaaaacttcctaaacagatttgggggtttaatatgtccaactcctcatgaaatatattcaatccacttaaatatattccatctttttaacataaaatgtaaagcttagcacccatcattaatttatgtctctgttttatccagtggttaaaaaaggattctgcctctttagtcctcactgttaaataaaacccaatcatagtaagtgattaactagcaaaaagtaaagctatttatagcaaatttctagatcattagaaaagcactggtagttgtacaatatcagtgttgactttgaacttctttaacgagatcatgaattcttttcccttagccaaaacatgaaatatttaacctagttgtctctaaaagttttgtaatcatgagttagatatatgtcatctcctattcattgcttttatgtgatcaataaatcttttacaaacccaactactcatttccttcctagtaatactttgcctttttcactgtgtatggaatgaaacatgtaaagctgtcacaatcaatgtttttatctgataatattaaatattttttaactt

SEQ ID NO: 15187 - DNA, 1970 bp, Homo sapiens
  source 1..1970: mol_type = unassigned DNA
ctgcccggggacgcagcccagttggtagcgtcgctccctgagcgtttctaagggggccgcccggccttgtctttcggcagtggccgagccaccgccgcctgccgcgcgttccagagctgggcgctgcagctgcactgccgatcgccgtgtttggtcgatagaatccccagtgtgcccagagagtgcgacccctcgcccggcccggcgagccccgggcgtgaaccgagctgagggaggatggcagcctctggggtggagaagagcagcaagaagaagaccgagaagaaacttgctgctcgggaagaagctaaattgttggcgggtttcatgggcgtcatgaataacatgcggaaacagctaacatgcttgaatcaaagtcctttgaagtagaactcaaagatgctgaacctgatattattgaacaactggtggaatttgcttatactgctagaatttccgtgaatagcaacaatgttcagtctttgctggatgcagcaaaccaatatcagattgaacctgtgaagaaaatgtgtgttgattttttgaaagaacaagttgatgcttcaaattgtcttggtataagtgtgctagcggagtgtctagattgtcctgaattgaaagcaactgcagatgactttattcatcagcactttactgaagtttacaaaactgatgaatttcttcaacttgatgtcaagcgagtaacacatcttctcaaccaggacactctgactgtgagagcagaggatcaggtttatgatgctgcagtcaggtggttgaaatacgatgaacctaatcgccagccatttatggttgatatccttgctaaagtcaggtttcctcttatatcaaagaatttcttaagtaaaacggtacaagctgaaccacttattcaagacaatcctgaatgccttaagatggtgataagtggaatgaggtaccatctactgtctccagaggaccgagaagaacttgtagatggcacaagacctagaagaaagaaacatgactaccgcatagccctatttggaggctctcaaccacagtcttgtagatattttaacccaaaggattatagctggacagacatccgctgcccctttgaaaaacgaagagatgcagcatgcgtgttttgggacaatgtagtatacattttgggaggctctcagcttttcccaataaagcgaatggactgctataatgtagtgaaggatagctggtattcgaaactgggtcctccgacacctcgagacagccttgctgcatgtgctgcagaaggcaaaatttatacatctggaggttcagaagtaggaaactcagctctgtatttatttgagtgctatgatacgagaactgaaagctggcacacaaagcccagcatgctgacccagcgctgcagccatgggatggtggaagccaatggcctaatctatgtttgtggtggaagtttaggaaacaatgtttctgggagagtgcttaattcctgtgaagtttatgatcctgccacagaaacatggactgagctgtgtccaatgattgaagccaggaagaatcatgggctggtatttgtaaaagacaagatatttgctgtgggtggtcagaatggtttaggtggtctggacaatgtggaatattacgatattaagttgaacgaatggaagatggtctcaccaatgccatggaagggtgtaacagtgaaatgtgcagcagttggctctatagtttatgtcttggctggttttcagggtgttggtcgattaggacacattctcgaatataataccgaaacagacaaatgggttgccaactccaaagttcgtgcttttccagtcacaagttgtttaatttgtgttgtcgatacttgtggagcaaatgaagagacccttgaaacatgaaaaatgagtggacttcagactcatcagagactctaaaatatagccaccagtgctttgttccaggagtttggtgac

SEQ ID NO: 15188 - DNA, 2032 bp, Homo sapiens
  source 1..2032: mol_type = unassigned DNA
agttggtagcgtcgctccctgagcgtttctaagggggccgcccggccttgtctttcggcagtggccgagccaccgccgcctgccgcgcgttccagagctgggcgctgcagctgcactgccgatcgccgtgtttggtcgatagaatccccagtgtgcccagagagtgcgacccctcgcccggcccggcgagccccgggcgtgaaccgagctgagggaggatggcagcctctggggtggagaagagcagcaagaagaagaccgagaagaaacttgctgctcgggaagaagctaaattgttggcgggtttcatgggcgtcatgaataacatgcggaaacaggtataagtgtgctagcggagtgtctagattgtcctgaattgaaagcaactgcagatgactttattcatcagcactttactgaagtttacaaaactgatgaatttcttcaacttgatgtcaagcgagtaacacatcttctcaaccaggacactctgactgtgagagcagaggatcaggtttatgatgctgcagtcaggtggttgaaatacgatgaacctaatcgccagccatttatggttgatatccttgctaaagtcaggtttcctcttatatcaaagaatttcttaagtaaaacggtacaagctgaaccacttattcaagacaatcctgaatgccttaagatggtgataagtggaatgaggtaccatctactgtctccagaggaccgagaagaacttgtagatggcacaagacctagaagaaagaaacatgactaccgcatagccctatttggaggctctcaaccacagtcttgtagatattttaacccaaaggattatagctggacagacatccgctgcccctttgaaaaacgaagagatgcagcatgcgtgttttgggacaatgtagtatacattttgggaggctctcagcttttcccaataaagcgaatggactgctataatgtagtgaaggatagctggtattcgaaactgggtcctccgacacctcgagacagccttgctgcatgtgctgcagaaggcaaaatttatacatctggaggttcagaagtaggaaactcagctctgtatttatttgagtgctatgatacgagaactgaaagctggcacacaaagcccagcatgctgacccagcgctgcagccatgggatggtggaagccaatggcctaatctatgtttgtggtggaagtttaggaaacaatgtttctgggagagtgcttaattcctgtgaagtttatgatcctgccacagaaacatggactgagctgtgtccaatgattgaagccaggaagaatcatgggctggtatttgtaaaagacaagatatttgctgtgggtggtcagaatggtttaggtggtctggacaatgtggaatattacgatattaagttgaacgaatggaagatggtctcaccaatgccatggaagggtgtaacagtgaaatgtgcagcagttggctctatagtttatgtcttggctggttttcagggtgttggtcgattaggacacattctcgaatataataccgaaacagacaaatgggttgccaactccaaagttcgtgcttttccagtcacaagttgtttaatttgtgttgtcgatacttgtggagcaaatgaagagacccttgaaacatgaaaaatgagtggacttcagactcatcagagactctaaaatatagccaccagtgctttgttccaggagtttggtgacaaagttttggtttggtgttttggtaaagaaagtttcaagtgaaatgaggttcctataaaatagatgtttcttttatatggatttccttaattcaaagatcatattttagctggccacaaaaccaagaacatatctagcaagaaaacttgaaaaagtataagcatttgttaaaaatgtgaatttcttgaatgaatttcacatttgtaactatgattttggcagaatagaagattggctcatcagtgaagcgcagtatcttagctctagattctattttcatgcatcacagaagtgctatac

SEQ ID NO: 15189 - DNA, 2814 bp, Homo sapiens
  source 1..2814: mol_type = unassigned DNA
atgctgggagggactgattgcagaaccttcttgacaagccacataaatctaaagaaaacgttgtgtgacgtgatcctcatggtccaggaaagaaagatacctgctcatcgtgttgttcttgctgcagccagtcatttttttaacttaatgttcacaactaacatgcttgaatcaaagtcctttgaagtagaactcaaagatgctgaacctgatattattgaacaactggtggaatttgcttatactgctagaatttccgtgaatagcaacaatgttcagtctttgctggatgcagcaaaccaatatcagattgaacctgtgaagaaaatgtgtgttgattttttgaaagaacaagttgatgcttcaaattgtcttggtataagtgtgctagcggagtgtctagattgtcctgaattgaaagcaactgcagatgactttattcatcagcactttactgaagtttacaaaactgatgaatttcttcaacttgatgtcaagcgagtaacacatcttctcaaccaggacactctgactgtgagagcagaggatcaggtttatgatgctgcagtcaggtggttgaaatacgatgaacctaatcgccagccatttatggttgatatccttgctaaagtcaggtttcctcttatatcaaagaatttcttaagtaaaacggtacaagctgaaccacttattcaagacaatcctgaatgccttaagatggtgataagtggaatgaggtaccatctactgtctccagaggaccgagaagaacttgtagatggcacaagacctagaagaaagaaacatgactaccgcatagccctatttggaggctctcaaccacagtcttgtagatattttaacccaaaggattatagctggacagacatccgctgcccctttgaaaaacgaagagatgcagcatgcgtgttttgggacaatgtagtatacattttgggaggctctcagcttttcccaataaagcgaatggactgctataatgtagtgaaggatagctggtattcgaaactgggtcctccgacacctcgagacagccttgctgcatgtgctgcagaaggcaaaatttatacatctggaggttcagaagtaggaaactcagctctgtatttatttgagtgctatgatacgagaactgaaagctggcacacaaagcccagcatgctgacccagcgctgcagccatgggatggtggaagccaatggcctaatctatgtttgtggtggaagtttaggaaacaatgtttctgggagagtgcttaattcctgtgaagtttatgatcctgccacagaaacatggactgagctgtgtccaatgattgaagccaggaagaatcatgggctggtatttgtaaaagacaagatatttgctgtgggtggtcagaatggtttaggtggtctggacaatgtggaatattacgatattaagttgaacgaatggaagatggtctcaccaatgccatggaagggtgtaacagtgaaatgtgcagcagttggctctatagtttatgtcttggctggttttcagggtgttggtcgattaggacacattctcgaatataataccgaaacagacaaatgggttgccaactccaaagttcgtgcttttccagtcacaagttgtttaatttgtgttgtcgatacttgtggagcaaatgaagagacccttgaaacatgaaaaatgagtggacttcagactcatcagagactctaaaatatagccaccagtgctttgttccaggagtttggtgacaaagttttggtttggtgttttggtaaagaaagtttcaagtgaaatgaggttcctataaaatagatgtttcttttatatggatttccttaattcaaagatcatattttagctggccacaaaaccaagaacatatctagcaagaaaacttgaaaaagtataagcatttgttaaaaatgtgaatttcttgaatgaatttcacatttgtaactatgattttggcagaatagaagattggctcatcagtgaagcgcagtatcttagctctagattctattttcatgcatcacagaagtgctatacggttaggtctgtttgtgctcagtcaagaactaagaaatagtatgaattgtaagtcaagatgggcaactcagatggagcagcttagtctcacagtttgcttgtctatttattttatttagtgccaaatgtattccattttaaaagtaagccagagtgagtcaaggcatatacacactttctcacaaaacttcctaaacagatttgggggtttaatatgtccaactcctcatgaaatatattcaatccacttaaatatattccatctttttaacataaaatgtaaagcttagcacccatcattaatttatgtctctgttttatccagtggttaaaaaaggattctgcctctttagtcctcactgttaaataaaacccaatcatagtaagtgattaactagcaaaaagtaaagctatttatagcaaatttctagatcattagaaaagcactggtagttgtacaatatcagtgttgactttgaacttctttaacgagatcatgaattcttttcccttagccaaaacatgaaatatttaacctagttgtctctaaaagttttgtaatcatgagttagatatatgtcatctcctattcattgcttttatgtgatcaataaatcttttacaaacccaactactcatttccttcctagtaatactttgcctttttcactgtgtatggaatgaaacatgtaaagctgtcacaatcaatgtttttatctgataatattaaatattttttaactt

SEQ ID NO: 15190 - DNA, 1053 bp, Homo sapiens
  source 1..1053: mol_type = unassigned DNA
ttagagcagaagcagccatcgataaataccatgccatcttctaagggcactgtgcgcctctgttattaagaggagctctttgttctgtccttggtgtgtggtgcattcgtgaaattctgcagcacatcggcgaaagtgatttaaatctaccacccagctgtagttgaatctacaatctgctcagggatttatactcaatgccaatttgatatcatgctgggagggactgattgcagaaccttcttgacaagccacataaatctaaagaaaacgttgtgtgacgtgatcctcatggtccaggaaagaaagatacctgctcatcgtgttgttcttgctgcagccagtcatttttttaacttaatgttcacaactaacatgcttgaatcaaagtcctttgaagtagaactcaaagatgctgaacctgatattattgaacaactggtggaatttgcttatactgctagaatttccgtgaatagcaacaatgttcagtctttgctggatgcagcaaaccaatatcagattgaacctgtgaagaaaatgtgtgttgattttttgaaagaacaagttgatgcttcaaattgtcttggtaagaaatatcagattcctgttgtgtgtttattttgttttatcctttatttctaatttaattttttaaaaaggctgattttaagtatccgcatttaaccttaaagacattgtccactagaacgttttctagtaataaaatttaagaggggcttagagagatgcatattaacctgggcagcagcaagcttattaaatattatatcaacattttctaaaacacaaaatggcatttttaatggtttttcacggatctaggacaatgaataaggattgcatgtggtgatagtaacatgattatgaatgtttccttttatttaagcacttatgatatgctaaggtctatcacagatgaggcaacttatagttaggtaacttgccagaggtcacatagctagtgtatgaacgagctgggattggaactcaagtaatctaattcttagctactacaccttgctgcctccc

SEQ ID NO: 15191 - DNA, 969 bp, Homo sapiens
  source 1..969: mol_type = unassigned DNA
gggttctgcccggggacgcagcccagttggtagcgtcgctccctgagcgtttctaagggggccgcccggccttgtctttcggcagtggccgagccaccgccgcctgccgcgcgttccagagctgggcgctgcagctgcactgccgatcgccgtgtttggtcgatagaatccccagtgtgcccagagagtgcgacccctcgcccggcccggcgagccccgggcgtgaaccgagctgagggaggatggcagcctctggggtggagaagagcagcaagaagaagaccgagaagaaacttgctgctcgggaagaagctaaattgttggcgggtttcatgggcgtcatgaataacatgcggaaacagaaaacgttgtgtgacgtgatcctcatggtccaggaaagaaagatacctgctcatcgtgttgttcttgctgcagccagtcatttttttaacttaatgttcacaactaacatgcttgaatcaaagtcctttgaagtagaactcaaagatgctgaacctgatattattgaacaactggtggaatttgcttatactgctagaatttccgtgaatagcaacaatgttcagtctttgctggatgcagcaaaccaatatcagattgaacctgtgaagaaaatgtgtgttgattttttgaaagaacaagttgatgcttcaaattgtcttggagaagcagaaaaagttgatcagagccttccagagtgtggtatgcttttcactgtgtgatgatccttagtggcacatgaatgaacgtccagatgtttgtgcagtagcccacccttatctgcaggatacgttccaagacccccagtgaatgcctgaaactgcagatagtactgaatcctatatatactgtgttttttatgatacatacatgcctatgatgaagtttaatttctaaattagacagtaaaagattaacaacaataataataaaatagaacaactttaa

SEQ ID NO: 15192 - DNA, 5621 bp, Homo sapiens
  source 1..5621: mol_type = unassigned DNA
gctcgcgggggctgaggcgagaggacgccaagcgcccgccggggctccgcggggccgcgcaggagagcgcgcgtccgccgggtgctcgcgcggggttggtgaggttccgctgagggcggccggggctctgggagcgtggtaacgtggctgcaaccttagcgacatcaggaagaacagggtcgaggatcgagtcacagcaaactgtacaatggcagttgagtgggttttgaaaaacgtctgaattgtagtgtctacatctaccttctgccttctctctaccctttgaaaaaaaataaatggcatgtttgagaagagagctctattaaaagaggaatattgcaaatggcttcagattctatgagtagtaaacaagctaggaatcacattacaaaggggaaaaggcaacaacagcaccagcaaataaagaacagatcctcaattagtgatggtgatggagaagattcctttatttttgaagcaaatgaagcttggaaagattttcatggttctcttcttcgattttatgaaaatggagaactctgtgatgtcacactcaaggttggctcaaagctaatctcttgtcacaagctggtattggcttgtgttattccctactttagagccatgtttctttctgaaatggctgaagccaagcaaacgctgattgagattagagattttgatggtgatgcaatagaagacttggtaaagtttgtctattcttcacggctcactttgactgttgacaatgtccagcctctcttatatgcagcctgtattctgcaggttgaactggtggctagagcttgttgtgaatacatgaagttacattttcatccctccaattgcctggcagtaagagcctttgcagaaagtcacaatcgaatagacttaatggacatggcggatcagtatgcctgtgaccattttactgaagtagtggagtgtgaagactttgtaagtgtatcaccgcagcacctccataagcttttgtcctccagtgatctaaatattgaaaatgaaaagcaggtctataatgctgccatcaagtggcttcttgccaatcctcagcatcattccaaatggttggatgaaacacttgcacaggttcgcctgccattgttgccggttgattttcttatgggtgttgtggcaaaagaacagattgtcaagcaaaatctaaaatgtagagatttactggatgaagcaagaaattaccaccttcacttgagtagcagagcagtacctgactttgaatactccattcggactaccccaaggaagcatactgctggtgtgctgttttgtgtaggtggtcgaggtggatctggtgacccctttcgcagtattgaatgctattctatcaacaaaaacagttggttctttggaccagaaatgaatagtcgaaggcgacatgtgggtgtaatctctgtggaaggtaaagtgtatgcagtaggtggacatgatggaaatgaacatttagggagtatggagatgtttgatcctctcactaataaatggatgatgaaggcatcaatgaacacaaagaggcgaggaattgccttggcttccttaggaggcccaatttatgcaattggagggttagatgacaatacttgcttcaatgatgtggagagatatgacatagaatctgatcagtggagtacagtggcaccaatgaatactccccgtggaggagttggctctgttgctctagtaaaccatgtttatgcagtaggtggcaatgatggaatggcttctttatctagcgtggagagatatgatccacatctggataagtggatagaagttaaagaaatgggtcagcgaagagcaggcaatggagttagcaagcttcatggttgcttatacgtagttggtggttttgatgataattctcctctgagttcagttgagcggtatgacccccgaagcaacaagtgggattatgtggcagcacttactactcccagaggtggagtgggaatcgcaacagtgatgggcaaaatctttgcagttggtggtcataatggcaatgcatacttaaatacagtagaagcgtttgatccagtgctgaataggtgggagcttgttggatctgtgtctcactgcagagctggagcaggagtagctgtgtgttcctgtttaactagccaaattcgagatgtaggtcatggatccaataatgtggttgactgtatgtgatttgagttctggccaccaacaatttagtcatatctgataggtacaaaagaaaaccaagattttgatatgaccacctttcaacactttttactgcaactagagtcttatttaaatgttaactgttgtattgtgactaagtacaacttttggaatgatacctgaagaattattagtaatagagttaaatttgatacttcctgcttttgcaaataatggagtagggaagaagatagtcgaacttaaaatcatacctaccctgaaaaatgcttaaagtagtgccaaaaatcttgaaatctctctctctctctctatttggatgaatcaaaatgtaatttgttgagttttgccttttcttttgcctaaagatgttaacgtcaggcagtgggtttttcctagaggagagattagtacctattcattaacacaaggatacataagagacttgccccttttgaagatcatttctacttggtgctgatgaatttatgcctagctttttttttctaggtggtgatttttcaatttcttttatatttacggaagtagaaaaaatgttctgtctttttgaatgccacttagctgcattttcagaagcttataggctataagaagcctttaatttcagtttgaattgctaggacaccaaaagacctagctgggctaactccatccaaatgattttacagttttattttttcatcttttgcaaaaagtatttgttacataatcaaaaggtgaaccagaggaaatattgaacaaggttttagatctgatgttattctggtgcccaattgagagaccttgagaaagaatgatgcagattacatgactctaatgtgggcagtctgaaaatatctttaactgtcttctttgatcatttgattttggatccaagatttatcatctctctattttgctatttgccaccatcctggtttttctgactgtacagaatcaatctgcatttatttattatcagaaatgaatgcatttttacaaaaacctttttgtagactgtagtttattgattagttcaagcccatcacgaactaattaaacatattgttggtaaaaacagagattgaaattactgtttttatcatatttaaatccctctggtgtatttattgaaatttaattaaaaatatttctacatattgatttgaagccaggatattgatggacctacagatttaacagctcttcaaagttttaactagcattataaaatggcctattcattatatgtatatttttttataaatatttatcaagaacatgaaaatattttattttgtatttgcagtgcagtttggcacctctcttccaggccttcctaagtttttgttagttgtgtcttcgaatttattgtagttcaccgctggtcagtaatctggttcataaggaagctggggcagtgaaaaacacttcgttgatccatccagccctaaagttcattgactaatagctcatgcatcttattaaatgggattctggacttctacaatagtgtggaaagccacatcacaaaaaaagccacatcacaaaaaaaagccagtgcctattgagtatatcaaaccaaaaaagaaaaaaaaaagttttaagaggggtcaggctggcagataaaagtctcttatgaagcagatataaatccagtaagctatttttttctacctatgggcaagttcataagtcattgctggatctgaaccagtgttcttttgtgtaagtacaaccatatttcagtcagtccagaggcagttaaccctgtagcacttactagactggtgacaactggctggatgtggagaataagtgtcaaaacctggcttcaatgtctatttcttatgtctaatggagttcttatattacagtgtttgtttagctatggttactaatatgtttgttatatttattttcggggagaggatcttgttattgtttcctgagattatttaaaatgttttttctttgatgtatttctgtctttcttatatgtaaggagttataagggttattatattttcatttctggtttttactatacaatggttatctaacatactaagttggtaccctacctacccgtaaaatatgaaatactcagaagtaaagtgtgtgggcaatcagaagcatagccttgaaggacctgacagcagtatgaaaagataaataggccaggcatggtggctcacgcctgtgatcccagcactttgggaggccgaggtgggtggaccacctgagatcaggtgttcaagaccagcctgaccaacatggtgaaaccctgtctctactaaaagtacaaaaattagccaggcgtggtggcgcatacctgtaattccagctactcaggaggctgaggcaggagaattgcttgaacccaggaggtggaggttgcaatgagccgaggttgagccatcgcactccagcggtgaaacaagagtgaaactccatctcaaaaaaaaaaaaaaaaaaaagataaaaaagcagaatcaatatgtgcacagttctctttatcaggcaaaaacacgtttattgagacatgaaatgagaatcaggctgaaggaatcatgcagctgaaagatgattatattcatagaaatgaagagatgaaatattcaaagaagatggctactttattgtgagacttaccactttaacctcatatgttaacagcacctaccaaaaaatgatatgagatagagctaaaatactgaaattgcaaatggacaaaataaatcatgaaaatttgtttattatttcttcaataaatatttctaggtgctttgtgattctttcatttagtcattaaagccattgctttactatattgcgttgccactttaaaaacaagttacttgacattgtttttgacagatttcactatatacttatgtaattaattgattatttctaaaatgtttgaataaactttgtactccctctaaggagtattttattcattcttttaattcccaaatgaactttgaacttacagtgctgttgaatgccttggtaaggacttcttgaaattgcataaactattcttgtaaatggtaaacttgagaattttctttgtttcttttttctctatgtcttaaagaatgcctttagaatctaattcatgttgtatcagttaagaatgtttctgtggtttctcgtatcagatgtgtaaagaaattattactgggatgccattggctatgtctctttccccttcatgtaaaattccaagtgtcagtaaaacttctctataatattttcttaaaaccatttataaatttgtgttataatactccagaaaatcaatgtaataagtggtcatatatatcaccaactatggatatcaaaaagttggggtcacatcagtgctatttatttaattaaaatacattgcatatttctattagcacaaa

SEQ ID NO: 15193 - DNA, 3245 bp, Homo sapiens
  source 1..3245: mol_type = unassigned DNA
aaattcgagccctcgtgcaccaaccgaaactccacagctgagagggcttggggcccggacagcaggagatccagcccctgagcaaccttccacggcttttgtcgcccccattggcgggaggagcagggttatgctcccggctcccgtaggggagctccagcctctggctctgtcagcctccccggcagctccttgactccttcctcccagtctttcgaagaggggcccaggcagtcacagcaaactgtacaatggcagttgagtgggttttgaaaaacgtctgaattgtagtgtctacatctaccttctgccttctctctaccctttgaaaaaaaataaatggcatgtttgagaagagagctctattaaaagaggaatattgcaaatggcttcagattctatgagtagtaaacaagctaggaatcacattacaaaggggaaaaggcaacaacagcaccagcaaataaagaacagatcctcaattagtgatggtgatggagaagattcctttatttttgaagcaaatgaagcttggaaagattttcatggttctcttcttcgattttatgaaaatggagaactctgtgatgtcacactcaaggttggctcaaagctaatctcttgtcacaagctggtattggcttgtgttattccctactttagagccatgtttctttctgaaatggctgaagccaagcaaacgctgattgagattagagattttgatggtgatgcaatagaagacttggtaaagtttgtctattcttcacggctcactttgactgttgacaatgtccagcctctcttatatgcagcctgtattctgcaggttgaactggtggctagagcttgttgtgaatacatgaagttacattttcatccctccaattgcctggcagtaagagcctttgcagaaagtcacaatcgaatagacttaatggacatggcggatcagtatgcctgtgaccattttactgaagtagtggagtgtgaagactttgtaagtgtatcaccgcagcacctccataagcttttgtcctccagtgatctaaatattgaaaatgaaaagcaggtctataatgctgccatcaagtggcttcttgccaatcctcagcatcattccaaatggttggatgaaacacttgcacaggttcgcctgccattgttgccggttgattttcttatgggtgttgtggcaaaagaacagattgtcaagcaaaatctaaaatgtagagatttactggatgaagcaagaaattaccaccttcacttgagtagcagagcagtacctgactttgaatactccattcggactaccccaaggaagcatactgctggtgtgctgttttgtgtaggtggtcgaggtggatctggtgacccctttcgcagtattgaatgctattctatcaacaaaaacagttggttctttggaccagaaatgaatagtcgaaggcgacatgtgggtgtaatctctgtggaaggtaaagtgtatgcagtaggtggacatgatggaaatgaacatttagggagtatggagatgtttgatcctctcactaataaatggatgatgaaggcatcaatgaacacaaagaggcgaggaattgccttggcttccttaggaggcccaatttatgcaattggagggttagatgacaatacttgcttcaatgatgtggagagatatgacatagaatctgatcagtggagtacagtggcaccaatgaatactccccgtggaggagttggctctgttgctctagtaaaccatgtttatgcagtaggtggcaatgatggaatggcttctttatctagcgtggagagatatgatccacatctggataagtggatagaagttaaagaaatgggtcagcgaagagcaggcaatggagttagcaagcttcatggttgcttatacgtagttggtggttttgatgataattctcctctgagttcagttgagcggtatgacccccgaagcaacaagtgggattatgtggcagcacttactactcccagaggtggagtgggaatcgcaacagtgatgggcaaaatctttgcagttggtggtcataatggcaatgcatacttaaatacagtagaagcgtttgatccagtgctgaataggtgggagcttgttggatctgtgtctcactgcagagctggagcaggagtagctgtgtgttcctgtttaactagccaaattcgagatgtaggtcatggatccaataatgtggttgactgtatgtgatttgagttctggccaccaacaatttagtcatatctgataggtacaaaagaaaaccaagattttgatatgaccacctttcaacactttttactgcaactagagtcttatttaaatgttaactgttgtattgtgactaagtacaacttttggaatgatacctgaagaattattagtaatagagttaaatttgatacttcctgcttttgcaaataatggagtagggaagaagatagtcgaacttaaaatcatacctaccctgaaaaatgcttaaagtagtgccaaaaatcttgaaatctctctctctctctctatttggatgaatcaaaatgtaatttgttgagttttgccttttcttttgcctaaagatgttaacgtcaggcagtgggtttttcctagaggagagattagtacctattcattaacacaaggatacataagagacttgccccttttgaagatcatttctacttggtgctgatgaatttatgcctagctttttttttctaggtggtgatttttcaatttcttttatatttacggaagtagaaaaaatgttctgtctttttgaatgccacttagctgcattttcagaagcttataggctataagaagcctttaatttcagtttgaattgctaggacaccaaaagacctagctgggctaactccatccaaatgattttacagttttattttttcatcttttgcaaaaagtatttgttacataatcaaaaggtgaaccagaggaaatattgaacaaggttttagatctgatgttattctggtgcccaattgagagaccttgagaaagaatgatgcagattacatgactctaatgtgggcagtctgaaaatatctttaactgtcttctttgatcatttgattttggatccaagatttatcatctctctattttgctatttgccaccatcctggtttttctgactgtacagaatcaatctgcatttatttattatcagaaatgaatgcatttttac

SEQ ID NO: 15194 - DNA, 2394 bp, Homo sapiens
  source 1..2394: mol_type = unassigned DNA
ggctgcaaccttagcgacatcaggaagaacagggtcgaggatcgagtcacagcaaactgtacaatggcagttgagtgggttttgaaaaacgtctgaattgtagtgtctacatctaccttctgccttctctctaccctttgaaaaaaaataaatggcatgtttgagaagagagctctattaaaagaggaatattgcaaatggcttcagattctatgagtagtaaacaagctaggaatcacattacaaaggggaaaaggcaacaacagcaccagcaaataaagaacagatcctcaattagtgatggtgatggagaagattcctttatttttgaagcaaatgaagcttggaaagattttcatggttctcttcttcgattttatgaaaatggagaactctgtgatgtcacactcaaggtgtgctgttttgtgtaggtggtcgaggtggatctggtgacccctttcgcagtattgaatgctattctatcaacaaaaacagttggttctttggaccagaaatgaatagtcgaaggcgacatgtgggtgtaatctctgtggaaggtaaagtgtatgcagtaggtggacatgatggaaatgaacatttagggagtatggagatgtttgatcctctcactaataaatggatgatgaaggcatcaatgaacacaaagaggcgaggaattgccttggcttccttaggaggcccaatttatgcaattggagggttagatgacaatacttgcttcaatgatgtggagagatatgacatagaatctgatcagtggagtacagtggcaccaatgaatactccccgtggaggagttggctctgttgctctagtaaaccatgtttatgcagtaggtggcaatgatggaatggcttctttatctagcgtggagagatatgatccacatctggataagtggatagaagttaaagaaatgggtcagcgaagagcaggcaatggagttagcaagcttcatggttgcttatacgtagttggtggttttgatgataattctcctctgagttcagttgagcggtatgacccccgaagcaacaagtgggattatgtggcagcacttactactcccagaggtggagtgggaatcgcaacagtgatgggcaaaatctttgcagttggtggtcataatggcaatgcatacttaaatacagtagaagcgtttgatccagtgctgaataggtgggagcttgttggatctgtgtctcactgcagagctggagcaggagtagctgtgtgttcctgtttaactagccaaattcgagatgtaggtcatggatccaataatgtggttgactgtatgtgatttgagttctggccaccaacaatttagtcatatctgataggtacaaaagaaaaccaagattttgatatgaccacctttcaacactttttactgcaactagagtcttatttaaatgttaactgttgtattgtgactaagtacaacttttggaatgatacctgaagaattattagtaatagagttaaatttgatacttcctgcttttgcaaataatggagtagggaagaagatagtcgaacttaaaatcatacctaccctgaaaaatgcttaaagtagtgccaaaaatcttgaaatctctctctctctctctatttggatgaatcaaaatgtaatttgttgagttttgccttttcttttgcctaaagatgttaacgtcaggcagtgggtttttcctagaggagagattagtacctattcattaacacaaggatacataagagacttgccccttttgaagatcatttctacttggtgctgatgaatttatgcctagctttttttttctaggtggtgatttttcaatttcttttatatttacggaagtagaaaaaatgttctgtctttttgaatgccacttagctgcattttcagaagcttataggctataagaagcctttaatttcagtttgaattgctaggacaccaaaagacctagctgggctaactccatccaaatgattttacagttttattttttcatcttttgcaaaaagtatttgttacataatcaaaaggtgaaccagaggaaatattgaacaaggttttagatctgatgttattctggtgcccaattgagagaccttgagaaagaatgatgcagattacatgactctaatgtgggcagtctgaaaatatctttaactgtcttctttgatcatttgattttggatccaagatttatcatctctctattttgctatttgccaccatcctggtttttctgactgtacagaatcaatctgcatttatttattatcagaaatgaatgcatttttacaaaaacctttttgtagactgtagtttattgattagttcaagcccatcacgaactaattaaacatattgttggt

SEQ ID NO: 15195 - DNA, 2592 bp, Homo sapiens
  source 1..2592: mol_type = unassigned DNA
ctttccgccctctccccgcctccttttcgggcgtcccgaggccgctccccaaccgacaaccaagaccccgcaggccacgcagccctggagccgaggccccccgacggcggaggcgcccgcgggtcccctacagccaaggtccctgagtgccagaggtggtggtgttgcttatcttctggaaccccatgcagccagatcccaggcctagcggggctggggcctgctgccgattcctgcccctgcagtcacagtgccctgagggggcaggggacgcggtgatgtacgcctccactgagtgcaaggcggaggtgacgccctcccagcatggcaaccgcaccttcagctacaccctggaggatcataccaagcaggcctttggcatcatgaacgagctgcggctcagccagcagctgtgtgacgtcacactgcaggtcaagtaccaggatgcaccggccgcccagttcatggcccacaaggtggtgctggcctcatccagccctgtcttcaaggccatgttcaccaacgggctgcgggagcagggcatggaggtggtgtccattgagggtatccaccccaaggtcatggagcgcctcattgaattcgcctacacggcctccatctccatgggcgagaagtgtgtcctccacgtcatgaacggtgctgtcatgtaccagatcgacagcgttgtccgtgcctgcagtgacttcctggtgcagcagctggaccccagcaatgccatcggcatcgccaacttcgctgagcagattggctgtgtggagttgcaccagcgtgcccgggagtacatctacatgcattttggggaggtggccaagcaagaggagttcttcaacctgtcccactgccaactggtgaccctcatcagccgggacgacctgaacgtgcgctgcgagtccgaggtcttccacgcctgcatcaactgggtcaagtacgactgcgaacagcgacggttctacgtccaggcgctgctgcgggccgtgcgctgccactcgttgacgccgaacttcctgcagatgcagctgcagaagtgcgagatcctgcagtccgactcccgctgcaaggactacctggtcaagatcttcgaggagctcaccctgcacaagcccacgcaggtgatgccctgccgggcgcccaaggtgggccgcctgatctacaccgcgggcggctacttccgacagtcgctcagctacctggaggcttacaaccccagtgacggcacctggctccggttggcggacctgcaggtgccgcggagcggcctggccggctgcgtggtgggcgggctgttgtacgccgtgggcggcaggaacaactcgcccgacggcaacaccgactccagcgccctggactgttacaaccccatgaccaatcagtggtcgccctgcgcccccatgagcgtgccccgtaaccgcatcggggtgggggtcatcgatggccacatctatgccgtcggcggctcccacggctgcatccaccacaacagtgtggagaggtatgagccagagcgggatgagtggcacttggtggccccaatgctgacacgaaggatcggggtgggcgtggctgtcctcaatcgtctcctttatgccgtggggggctttgacgggacaaaccgccttaattcagctgagtgttactacccagagaggaacgagtggcgaatgatcacagcaatgaacaccatccgaagcggggcaggcgtctgcgtcctgcacaactgtatctatgctgctgggggctatgatggtcaggaccagctgaacagcgtggagcgctacgatgtggaaacagagacgtggactttcgtagcccccatgaagcaccggcgaagtgccctggggatcactgtccaccaggggagaatctacgtccttggaggctatgatggtcacacgttcctggacagtgtggagtgttacgacccagatacagacacctggagcgaggtgacccgaatgacatcgggccggagtggggtgggcgtggctgtcaccatggagccctgccggaagcagattgaccagcagaactgtacctgttgaggcacttttgtttcttgggcaaaaatacagtccaatggggagtatcattgtttttgtacaaaaaccgggactaaaagaaaagacagcactgcaaataacccatcttccgggaagggaggccaggatgcctcagtgttaaaatgacatctcaaaagaagtccaaagcgggaatcatgtgcccctcagcggagccccgggagtgtccaagacagcctggctgggaaagggggtgtggaaagagcaggcttccaggagagaggcccccaaaccctctggccgggtaataggcctgggtcccactcacccatgccggcagctgtcaccatgtgatttattcttggatacctgggagggggccaatgggggcctcagggggaggccccctctggaaatgtggttcccagggatgggcctgtacatagaagccaccggatggcacttccccaccggatggacagttattttgttgataagtaaccctgtaattttccaaggaaaataaagaacagactaactagtgtctttcaccctg

SEQ ID NO: 15196 - DNA, 2563 bp, Homo sapiens
  source 1..2563: mol_type = unassigned DNA
tctgcttagtcatggtgacctgcgcgcgctccgcgcctcccccacgcgcagcgatggaggcgccggggctcgggcggtggaggcggagccggagcgcggccatggcggggtccctgagtgccagaggtggtggtgttgcttatcttctggaaccccatgcagccagatcccaggcctagcggggctggggcctgctgccgattcctgcccctgcagtcacagtgccctgagggggcaggggacgcggtgatgtacgcctccactgagtgcaaggcggaggtgacgccctcccagcatggcaaccgcaccttcagctacaccctggaggatcataccaagcaggcctttggcatcatgaacgagctgcggctcagccagcagctgtgtgacgtcacactgcaggtcaagtaccaggatgcaccggccgcccagttcatggcccacaaggtggtgctggcctcatccagccctgtcttcaaggccatgttcaccaacgggctgcgggagcagggcatggaggtggtgtccattgagggtatccaccccaaggtcatggagcgcctcattgaattcgcctacacggcctccatctccatgggcgagaagtgtgtcctccacgtcatgaacggtgctgtcatgtaccagatcgacagcgttgtccgtgcctgcagtgacttcctggtgcagcagctggaccccagcaatgccatcggcatcgccaacttcgctgagcagattggctgtgtggagttgcaccagcgtgcccgggagtacatctacatgcattttggggaggtggccaagcaagaggagttcttcaacctgtcccactgccaactggtgaccctcatcagccgggacgacctgaacgtgcgctgcgagtccgaggtcttccacgcctgcatcaactgggtcaagtacgactgcgaacagcgacggttctacgtccaggcgctgctgcgggccgtgcgctgccactcgttgacgccgaacttcctgcagatgcagctgcagaagtgcgagatcctgcagtccgactcccgctgcaaggactacctggtcaagatcttcgaggagctcaccctgcacaagcccacgcaggtgatgccctgccgggcgcccaaggtgggccgcctgatctacaccgcgggcggctacttccgacagtcgctcagctacctggaggcttacaaccccagtgacggcacctggctccggttggcggacctgcaggtgccgcggagcggcctggccggctgcgtggtgggcgggctgttgtacgccgtgggcggcaggaacaactcgcccgacggcaacaccgactccagcgccctggactgttacaaccccatgaccaatcagtggtcgccctgcgcccccatgagcgtgccccgtaaccgcatcggggtgggggtcatcgatggccacatctatgccgtcggcggctcccacggctgcatccaccacaacagtgtggagaggtatgagccagagcgggatgagtggcacttggtggccccaatgctgacacgaaggatcggggtgggcgtggctgtcctcaatcgtctcctttatgccgtggggggctttgacgggacaaaccgccttaattcagctgagtgttactacccagagaggaacgagtggcgaatgatcacagcaatgaacaccatccgaagcggggcaggcgtctgcgtcctgcacaactgtatctatgctgctgggggctatgatggtcaggaccagctgaacagcgtggagcgctacgatgtggaaacagagacgtggactttcgtagcccccatgaagcaccggcgaagtgccctggggatcactgtccaccaggggagaatctacgtccttggaggctatgatggtcacacgttcctggacagtgtggagtgttacgacccagatacagacacctggagcgaggtgacccgaatgacatcgggccggagtggggtgggcgtggctgtcaccatggagccctgccggaagcagattgaccagcagaactgtacctgttgaggcacttttgtttcttgggcaaaaatacagtccaatggggagtatcattgtttttgtacaaaaaccgggactaaaagaaaagacagcactgcaaataacccatcttccgggaagggaggccaggatgcctcagtgttaaaatgacatctcaaaagaagtccaaagcgggaatcatgtgcccctcagcggagccccgggagtgtccaagacagcctggctgggaaagggggtgtggaaagagcaggcttccaggagagaggcccccaaaccctctggccgggtaataggcctgggtcccactcacccatgccggcagctgtcaccatgtgatttattcttggatacctgggagggggccaatgggggcctcagggggaggccccctctggaaatgtggttcccagggatgggcctgtacatagaagccaccggatggcacttccccaccggatggacagttattttgttgataagtaaccctgtaattttccaaggaaaataaagaacagactaactagtgtctttcaccctg

SEQ ID NO: 15197 - DNA, 2812 bp, Homo sapiens
  source 1..2812: mol_type = unassigned DNA
attttgtcatcgcaacactaaacctttgtcggtctggtgctccccaattcatgaattgcttcttacttaaataaactctttaaaattttactgtgcctcatattttttttaatacagaagaaatgagagaaggaagaatattttagaaataaaggaacttcatgggcagagtcacagtgcaagacaaaaggagcagaccaagggcaagattgcttggggagtgaagactccctccctcttctcccctgagaagctgagataaagggggaggagaagcctgggtgccccccactgataagcaggctccacccagaggccagtcctgtgtgtctggggacaaggcgaaagagcagcagaagtgccccttctccaggatcaaggaactggggcggggggtgtttcctggaccccagtcctccgaatcagctcctagagtggaaccaggaaggattctggagccacagaagatagacagatggaaggtggggaccaaagtgaggaagagccgagggaacgcagccaggcaggtggaatgggaactctctggagccaagagagcactccagaagagaggctgcccgtggaagggagcaggccatgggcagtggccaggcgggtgctgacagctatcctgattttgggcctgctcctttgtttttctgtgcttttgttctacaacttccagaactgtggccctcgcccctgtgagacatctgtgtgtttggatctccgggatcattacctggcctctgggaacacaagtgtggccccctgcaccgacttcttcagctttgcctgtggaagggccaaagagaccaataattcttttcaggagcttgccacaaagaacaaaaaccgacttcggagaatactggaggtccagaattcctggcacccaggctctggggaggagaaagccttccagttctacaactcctgcatggatacacttgccattgaagctgcagggactggtcccctcagacaagttattgaggagcttggaggctggcgcatctctggtaaatggacttccttaaactttaaccgaacgctgagacttctgatgagtcagtatggccatttccctttcttcagagcctacctaggacctcatcctgcctctccacacacaccagtcatccagatagaccagccagagtttgatgttcccctcaagcaagatcaagaacagaagatctatgcccagatctttcgggaatacctgacttacctgaatcagctgggaaccttgctgggaggagacccaagcaaggtgcaagaacactcttccttgtcaatctccatcacttcacggctgttccagtttctgaggcccctggagcagcggcgggcacagggcaagctcttccagatggtcactatcgaccagctcaaggaaatggcccccgccatcgactggttgtcctgcttgcaagcgacattcacaccgatgtccctgagcccttctcagtccctcgtggtccatgacgtggaatatttgaaaaacatgtcacaactggtggaggagatgctgctaaagcagagggactttctgcagagccacatgatcttagggctggtggtgaccctttctccagccctggacagtcaattccaggaggcacgcagaaagctcagccagaaactgcgggaactgacagagcaaccacccatgcctgcccgcccacgatggatgaagtgcgtggaggagacaggcacgttcttcgagcccacgctggcggctttgtttgttcgtgaggcctttggcccgagcacccgaagtgctgccatgaaattattcactgcgatccgggatgccctcatcactcgcctcagaaaccttccctggatgaatgaggagacccagaacatggcccaggacaaggttgctcaactgcaggtggagatgggggcttcagaatgggccctgaagccagagctggcccgacaagaatacaacgatatacagcttggatcgagcttcctgcagtctgtcctgagctgtgtccggtccctccgagctagaattgtccagagcttcttgcagcctcacccccaacacaggtggaaggtgtccccttgggacgtcaatgcttactattcggtatctgaccatgtggtagtctttccagctggactcctccaacccccattcttccaccctggctatcccagagccgtgaactttggcgctgctggcagcatcatggcccacgagctgttgcacatcttctaccagctcttactgcctgggggctgcctcgcctgtgacaaccatgccctccaggaagctcacctgtgcctgaagcgccattatgctgcctttccattacctagcagaacctccttcaatgactccctcacattcttagagaatgctgcagacgttggggggctagccatcgcgctgcaggcatacagcaagaggctgttacggcaccatggggagactgtcctgcccagcctggacctcagcccccagcagatcttctttcgaagctatgcccaggtgatgtgtaggaagcccagcccccaggactctcacgacactcacagccctccacacctccgagtccacgggcccctcagcagcaccccagcctttgccaggtatttccgctgtgcacgtggtgctctcttgaacccctccagccgctgccagctctggtaacttggttaccaaagatgccacagcacagaaatatcgaccaacacctccctggtcacatccatggaatcagagcaagatttcctttctgcttctgttccaaaaataaaagctggcacttggcttccgcttgtctcttaa

SEQ ID NO: 15198 - DNA, 2451 bp, Homo sapiens
  source 1..2451: mol_type = unassigned DNA
agaggagtgtttagctccttcccttactctaccttgctcctacttttctctaagtcaacatgagtcgacagtttagttccaggtctgggtaccgaagtggagggggcttcagctctggctctgctgggatcatcaactaccagcgcaggaccaccagcagctccacacgccgcagtggaggaggtggtgggagattttcaagctgtggtggtggtggtggtagctttggtgctggtggtggatttggaagtcggagtcttgttaaccttggtggcagtaaaagcatctccataagtgtggctagaggaggtggacgtggtagtggctttggtggtggttatggtggtggtggctttggtggtggtggctttggtggtggtggctttggtggaggtggcattgggggtggtggctttggtggttttggcagtggtggtggtggttttggtggaggtggctttgggggtggtggatatgggggtggttatggtcctgtctgccctcctggtggcatacaagaagtcactatcaaccagagccttcttcagcccctcaatgtggagattgaccctgagatccaaaaggtgaagtctcgagaaagggagcaaatcaagtcactcaacaaccaatttgcctccttcattgacaaggtgaggttcctggagcagcagaaccaggtactgcaaacaaaatgggagctgctgcagcaggtagatacctccactagaacccataatttagagccctactttgagtcattcatcaacaatctccgaaggagagtggaccaactgaagagtgatcaatctcggttggattcggaactgaagaacatgcaggacatggtggaggattaccggaacaagtatgaggatgaaatcaacaagcggacaaatgcagagaatgaatttgtgaccatcaagaaggatgtggatggtgcttatatgaccaaggtggaccttcaggccaaacttgacaacttgcagcaggaaattgatttccttacagcactctaccaagcagagttgtctcagatgcagactcaaatcagtgaaactaatgtcatcctctctatggacaacaaccgcagtctcgacctggacagcatcattgctgaggtcaaggcccagtacgaggatatagcccagaagagcaaagctgaggccgagtccttgtaccagagcaagtatgaagagctgcagatcactgctggcagacatggggatagtgtgagaaattcaaagatagaaatttctgagctgaatcgtgtgatccagagacttagatctgaaatcgacaatgtcaagaagcagatctccaacttgcagcagtccatcagtgatgcagagcagcgtggcgagaatgccctcaaggatgccaagaacaagctgaatgacctggaggatgccctgcagcaggccaaggaagacctggcccgcctgctgcgcgactaccaggagctgatgaacacaaagctggccctggatctggagattgccacctacaggaccctcctggagggagaagaaagcaggatgtctggagaatgtgccccgaacgtgagtgtgtctgtgagcacaagccacaccaccatcagtggaggtggcagccgaggaggtggcggcggtggctacggctctggaggtagcagctatggctccggaggtggtagctatggttctggaggtggcggcggcggcggccgtggcagctatggctccggaggtagcagctacggctccggaggtggcagctatggctctggaggtggcggcggcggccatggcagctacggctccggaagcagcagtgggggctacagaggtggctctggaggcggcggcggcggcagctctggcggccggggctctggcggcgggagctctggaggctccataggaggccggggatccagctctgggggtgtcaagtcctctggtggcagttccagcgtgaagtttgtttctaccacttattccggagtaaccagataaagagatgccctctgtttcattagctctagttctcccccagcatcactaacaaatatgcttggcaagaccgaggtcgatttgtcccagccttaccggagaaaagagctatggttagttacactagctcatcctattcccccagctctttcttttctgctgtttcccaatgaagttttcagatcagtggcaatctcagtcccctggctatgaccctgctttgttctttccctgagaaacagttcagcagtgaccaccacccacatgacatttcaaagcacctccttaagccagccagagtaggaccagttagacccagggtgtggacagctccttagcatcttatctctgtgctgttttggttttgtacataaggtgtaagcaagttgtttttcttttgtggagaggtcttaaactccccatttccttgttttgctgcaataaactgcatttgaaattc

SEQ ID NO: 15199 - DNA, 2124 bp, Homo sapiens
  source 1..2124: mol_type = unassigned DNA
cagcatcaccatgtctgttcgatacagctcaagcaagcactactcttcctcccgcagtggaggaggaggaggaggaggaggatgtggaggaggaggaggagtgtcatccctaagaatttctagcagcaaaggctcccttggtggaggatttagctcaggggggttcagtggtggctcttttagccgtgggagctctggtgggggctgctttgggggctcatcaggtggctatggaggattaggaggttttggtggaggtagctttcgtggaagctatggaagtagcagctttggtgggagttatggaggcatctttggagggggcagtttcggaggtggcagctttggtgggggcagctttggtggaggcggctttggtggaggcggctttggaggaggctttggtggtggatttggaggagatggtggccttctctctggaaatgaaaaagtaaccatgcagaatctgaatgaccgcctggcttcctacttggacaaagttcgggctctggaagaatcaaactatgagctggaaggcaaaatcaaggagtggtatgaaaagcatggcaactcacatcagggggagcctcgtgactacagcaaatactacaaaaccatcgatgaccttaaaaatcagattctcaacctaacaactgataatgccaacatcctgcttcagatcgacaatgccaggctggcagctgatgacttcaggctgaagtatgagaatgaggtagctctgcgccagagcgtggaggctgacatcaacggcctgcgtagggtgctggatgagctgaccctgaccaaggctgacctggagatgcaaattgagagcctgactgaagagctggcctatctgaagaagaaccacgaggaggaaatgaaagaccttcgaaatgtgtccactggtgatgtgaatgtggaaatgaatgctgccccgggtgttgatctgactcaacttctgaataacatgagaagccaatatgaacaacttgctgaacaaaaccgcaaagatgctgaagcctggttcaatgaaaagagcaaggaactgactacagaaattgataataacattgaacagatatccagctataaatctgagattactgaattgagacgtaatgtacaagctctggagatagaactacagtcccaactggccttgaaacaatccctggaagcctccttggcagaaacagaaggtcgctactgtgtgcagctctcacagattcaggcccagatatccgctctggaagaacagttgcaacagattcgagctgaaaccgagtgccagaatactgaataccaacaactcctggatattaagatccgactggagaatgaaattcaaacctaccgcagcctgctagaaggagagggaagttccggaggcggcggacgcggcggcggaagtttcggcggcggctacggcggcggaagctccggcggcggaagctccggcggcggccacggcggcggccacggcggcagttccggcggcggctacggaggcggaagctccggcggcggaagctccggcggcggctacgggggcggaagctccagcggcggccacggcggcagttccagcggcggctacggtggtggcagttccggcggcggcggcggcggctacgggggcggcagctccggcggcggcagcagctccggcggcggatacggcggcggcagctccagcggaggccacaagtcctcctcttccgggtccgtgggcgagtcttcatctaagggaccaagatactaacaaaaccagagtaatcaagacaattattgaagaggtggcgcccgacggtagagttctttcatctatggttgaatcagaaaccaagaaacactactattaaactgcatcaagaggaaagagtctcccttcacacagaccattatttacagatgcatggaaaacaaagtctccaagaaaacacttctgtcttgatggtctatggaaatagaccttgaaaataaggtgtctacaaggtgttttgtggtttctgtatttcttcttttcactttaccagaaagtgttctttaatggaaagaaaaacaactttctgttctcatttactaatgaatttcaataaactttcttactgatgcaaacta

SEQ ID NO: 15200 - DNA, 2227 bp, Homo sapiens
  source 1..2227: mol_type = unassigned DNA
agttgtggccaccttccccaggccatggatctctccaacaacaccatgtcactctcagtgcgcacccccggactgtcccggcggctctcctcgcagagtgtgataggcagacccaggggcatgtctgcttccagtgttggaagtggttatgggggaagtgcctttggctttggagccagctgtgggggaggcttttctgctgcttccatgtttggttctagttccggctttgggggtggctccggaagttccatggcaggaggactgggtgctggttatgggagagccctgggtggaggtagctttggagggctggggatgggatttgggggcagcccaggaggtggctctctaggtattctctcgggcaatgatggaggccttctttctggatcagaaaaagaaactatgcaaaatcttaatgatagattagcttcctacctggataaggtgcgagctctagaagaggctaatactgagctagaaaataaaattcgagaatggtatgaaacacgaggaactgggactgcagatgcttcacagagcgattacagcaaatattatccactgattgaagacctcaggaataagatcatttcagccagcattggaaatgcccagctcctcttgcagattgacaatgcgagactagctgctgaggacttcaggatgaagtatgagaatgaactggccctgcgccagggcgtagaggccgacatcaatggcctgcgccgggtgctggacgagctgaccctgaccaggaccgacctggagatgcagatcgagagcctgaacgaggagctggcctacatgaagaagaaccacgaggatgagctccaaagcttccgggtgggcggcccaggcgaggtcagcgtagaaatggacgctgcccccggagtggacctcaccaggctcctcaatgatatgcgggcgcagtatgaaaccatcgctgagcagaatcggaaggacgctgaagcctggttcattgaaaagagcggggagctccgtaaggagattagcaccaacaccgagcagcttcagtccagcaagagcgaggtcaccgacctgcgtcgcgcctttcagaacctggagatcgagctacagtcccagctcgccatgaagaaatccctggaggactccttggccgaagccgagggcgattactgcgcgcagctgtcccaggtgcagcagctcatcagcaacctggaggcacagctgctccaggtgcgcgcggacgcagagcgccagaacgtggaccaccagcggctgctgaatgtcaaggcccgcctggagctggagattgagacctaccgccgcctgctggacggggaggcccaaggtgatggtttggaggaaagtttatttgtgacagactccaaatcacaagcacagtcaactgattcctctaaagacccaaccaaaacccgaaaaatcaagacagttgtgcaggagatggtgaatggtgaggtggtctcatctcaagttcaggaaattgaagaactaatgtaaaatttcacaagatctgccccatgattggttccttaggaacaagaaatttacaagtagaaattattcctttcagagtaacatgctgtattacttcaatccctatttttgtctgttccattttctttggattccctattcacattgaatcctttttgcccttctgaaacaatattcagtcacaagtcattttggtcatgttggtctttgtaacaaatcaaaattaccttatatccttctggacctggagtagtcttttaacgaactttcttctggtaacccggaatattttttaatcatagagctttaatcaagtagtattgttttaatagagttaattgtaataaaagatgaatggtaataatgtgaaatgtatgccttgattccaacaagaatgtcaagagcatagagagaagtttttgaaatactactaataaaatagaggctgggagtaatgactcacacctataatcccagcactttgggaggctgagaggcaagatgattgcttgaggcccggagttcaagaccagcctggacaacatagagagacccccatctctacacaacattaataatgataataatgataatgtagataaaactgggatgaagatgtcagggtttgaggattaagctaaaagaagattcttttagaagttctggcctttttatgtaagctcatcaaggttgtagcaaaattatattgtctactacagca

SEQ ID NO: 15201 - DNA, 1068 bp, Homo sapiens
  source 1..1068: mol_type = unassigned DNA
atgagcctccgcctgcagagctcctctgccagctatggaggtggtttcgggggtggctcttgccagctgggaggaggccgtggtgtctctacctgttcaactcggtttgtgtccgggggatcagctgggggctatggaggcggcgtgagctgtggttttggtggaggggctggtagtggctttggaggtggccttggaggtggctttggtgggggttttgctggtggctttgttgactttggtgcttgtgatggcggcctcctcactggcaatgagaagatcaccatgcagaacctcaacgaccgcctggcttcctacctggagaaggtgcgcgccctggaggaggccaacgctgacctggaggtgaagatccgtgactggcacctgaagcagagcccagctagccctgagcgggactacagcccctactacaagaccattgaagagctccgggacaagatcctgaccgccaccattgaaaacaaccgggtcatcctggagattgacaatgccaggctggctgcggacgacttcaggctcaagtatgagaatgagctggccctgcgccagagcgtggaggccgacatcaacggcctgcgccgggtgctggatgagctcactctgtctaagactgacctggagatgcagatcgagagcctgaatgaagagctagcctacatgaagaagaaccatgaagaggagatgaaggaatttagcaaccaggtggtcggccaggtcaacgtggagatggatgccaccccaggcattgacctgacccgcgtgctggcagagatgagggagcagtacgaggccatggcagagaggaaccgccgggatgctgaggaatggttccacaccaagagtgcagagctgaacaaggaggtgtctaccaacactgccatgattcagaccagcaagacagagatcacggagctcaggcgcacgctccaaggcctggagattgagctgcagtcccagctgagcatgaaagcggggctggagaacactgcagcagatccagggactcatcagcagcatcgaggcccagctgagcgagctccgcagtga

SEQ ID NO: 15202 - DNA, 1699 bp, Homo sapiens
  source 1..1699: mol_type = unassigned DNA
ggccaagcaagcttctatctgcacctgctctcaatcctgctctcaccatgagcctccgcctgcagagctcctctgccagctatggaggtggtttcgggggtggctcttgccagctgggaggaggccgtggtgtctctacctgttcaactcggtttgtgtccgggggatcagctgggggctatggaggcggcgtgagctgtggttttggtggaggggctggtagtggctttggaggtggctatggaggtggccttggaggtggctatggaggtggccttggaggtggctttggtgggggttttgctggtggctttgttgactttggtgcttgtgatggcggcctcctcactggcaatgagaagatcaccatgcagaacctcaacgaccgcctggcttcctacctggagaaggtgcgcgccctggaggaggccaacgctgacctggaggtgaagatccgtgactggcacctgaagcagagcccagctagccctgagcgggactacagcccctactacaagaccattgaagagctccgggacaagatcctgaccgccaccattgaaaacaaccgggtcatcctggagattgacaatgccaggctggctgcggacgacttcaggctcaagtatgagaatgagctggccctgcgccagagcgtggaggccgacatcaacggcctgcgccgggtgctggatgagctcactctgtctaagactgacctggagatgcagatcgagagcctgaatgaagagctagcctacatgaagaagaaccatgaagaggagatgaaggaatttagcaaccaggtggtcggccaggtcaacgtggagatggatgccaccccaggcattgacctgacccgcgtgctggcagagatgagggagcagtacgaggccatggcagagaggaaccgccgggatgctgaggaatggttccacaccaagagtgcagagctgaacaaggaggtgtctaccaacactgccatgattcagaccagcaagacagagatcacggagctcaggcgcacgctccaaggcctggagattgagctgcagtcccagctgagcatgaaagcggggctggagaacacggtggcagagacggagtgccgctatgccctgcagctgcagcagatccagggactcatcagcagcatcgaggcccagctgagcgagctccgcagtgagatggagtgccagaaccaagagtacaagatgctgctggacatcaagacacgtctggagcaggagatcgccacctaccgcagcctgctcgagggccaggacgccaagatgattggtttcccttcctcagcaggaagcgtcagcccccgtagcacctctgttaccacgacttctagtgcctctgttaccaccacctctaatgcctctggtcgccgcacttctgatgtccgtaggccttaaatctgcctggcgtcccctccctctgtcttcagcacccagaggaggagagagccggcagttccctgcaggagagaggaggggctgctggacccaaggctcagtccctctgctctcaggaccccctgtcctgactctctcctgatggtgggccctctgtgctcttctcttccggtcggatctctctcctctctgacctggatacgctttggtttctcaacttctctaccccaaagaaaagattattcaataaagtttcctgcctttctgcaaacata

SEQ ID NO: 15203 - DNA, 1673 bp, Homo sapiens
  source 1..1673: mol_type = unassigned DNA
ggccaagcaagcttctatctgcacctgctctcaatcctgctctcaccatgagcctccgcctgcagagctcctctgccagctatggaggtggtttcgggggtggctcttgccagctgggaggaggccgtggtgtctctacctgttcaactcggtttgtgtccgggggatcagctgggggctatggaggcggcgtgagctgtggttttggtggaggggctggtagtggctttggaggtggctatggaggtggccttggaggtggctatggaggtggccttggaggtggctttggtgggggttttgctggtggctttgttgactttggtgcttgtgatggcggcctcctcactggcaatgagaagatcaccatgcagaacctcaacgaccgcctggcttcctacctggagaaggtgcgcgccctggaggaggccaacgctgacctggaggtgaagatccgtgactggcacctgaagcagagcccagctagccctgagcgggactacagcccctactacaagaccattgaagagctccgggacaagatcctgaccgccaccattgaaaacaaccgggtcatcctggagattgacaatgccaggctggctgcggacgacttcaggctcaagtatgagaatgagctggccctgcgccagagcgtggaggccgacatcaacggcctgcgccgggtgctggatgagctcactctgtctaagactgacctggagatgcagatcgagagcctgaatgaagagctagcctacatgaagaagaaccatgaagaggagatgaaggaatttagcaaccaggtggtcggccaggtcaacgtggagatggatgccaccccaggcattgacctgacccgcgtgctggcagagatgagggagcagtacgaggccatggcagagaggaaccgccgggatgctgaggaatggttccacaccaagagtgcagagctgaacaaggaggtgtctaccaacactgccatgattcagaccagcaagacagagatcacggagctcaggcgcacgctccaaggcctggagattgagctgcagtcccagctgagcatgaaagcggggctggagaacacggtggcagagacggagtgccgctatgccctgcagctgcagcagatccagggactcatcagcagcatcgaggcccagctgagcgagctccgcagtgagatggagtgccagaaccaagagtacaagatgctgctggacatcaagacacgtctggagcaggagatcgccacctaccgcagcctgctcgagggccaggacgccaagaagcgtcagcccccgtagcacctctgttaccacgacttctagtgcctctgttaccaccacctctaatgcctctggtcgccgcacttctgatgtccgtaggccttaaatctgcctggcgtcccctccctctgtcttcagcacccagaggaggagagagccggcagttccctgcaggagagaggaggggctgctggacccaaggctcagtccctctgctctcaggaccccctgtcctgactctctcctgatggtgggccctctgtgctcttctcttccggtcggatctctctcctctctgacctggatacgctttggtttctcaacttctctaccccaaagaaaagattattcaataaagtttcctgcctttctgcaaacata

SEQ ID NO: 15204 - DNA, 5237 bp, Homo sapiens
  source 1..5237: mol_type = unassigned DNA
aaatgtactcagcaccctgctaaggaggctggagaccccatcacggccatggcaatcccgaaggaggagctgtttcaaggttggttatgaacatgtaaccccagagccccgctgctgtagcctggactgggacccccttctgccccctccctagctgtcctgttctggcctccagcacccacaaaccaccacccccaacttaacttctcaggaagccttggagctggagggagaggcctggctgcacccccagctgggactgcccagaggcgcttgtccctgcccatgaaagcctcccttgtcacagctgaaaccttccctctgcctcaggggcccctggaatgtggctgcggggcggggtctgggcccacacaggtggggcaggtgactgtcaggtctcaggcctgagtgtcaggaatgaagcctgcctttgtgtgtgcacagtgcagggtggggctggactggggacacttttctgtctcagcctggagacctgggataggagggagaggggagtggggaagttgaggggagtgcctttacatcctgctggtcatcgtggccacttcagtctgttgagcatttcctgtgagtcatcttgctccaactgagagtcaggctgagctggagttatttccattttcctgattggtagactaaggctcagagagaggaggcggcattacccaaagccgcacagctggtaaatgggaaaagaggggtttaaaggtaagtctctgggctccaggacacaccccctctccctggcatttccctggggaacaggagaggtgtgggagggttctaaggttgttggagacttcattctccttgtgccctcaaatgctcactatggccctgaggggagtctgtgttaatggcctaagtttaaatcaggaaccaggctcagagaggctgagtctctttccactgggctgcactgcctcattctaaggagaaaaggccagctccacagatggccccatctggctgcagtgggcaaaggtcagaaactggcacagcatcctgggcaggctgcctggggcagggcccggggctacagcctgggctggggccagacagagctttatcttcgcaaggccatcccacctggtgctaatgaggaggctccgggccccacccagatctggagctcacagtagcggtttggactgaaaccagggatttgtgcgtggggcagtgaggggggcagctgccgcccctggcctgggcctgagagtatagagaaagccacctcgaggggctgctggaggagagtcaggtgcagaaggggatctggctggggtccagcccttcctcaccctggggtgaaaggcgagtaattgttcttgagttaattgctggggccacaatgtctgcagaggcttttaatgagctctggatgatctgagtttgattatttttctttcggaggaaaagacaataccctcccacccatgagacaataccacactgtctgtgcccagcattggaggccaggctcactgcgaagatggatgagaaggaacccacccccagccttgctggctggcagttccccttgccagcccagctcagatgcaggaatttggggtctgcaggaaggactctttccctgtgccctgtttggttgagggtgtgaggacctgtttgagtcctggctttgccccttaccagtggtgccacctggcacaagttgcttcacctctccaagtttcaatttcattctttctgaatcttgggtgggggtcaccctctgttgtgaggatgagaggaggtgatggatgcaaaagtgctttgtaaatcacaaagtgcagggtagaagtaaaggattatgctattatagcaaaataagaacctaagaacaacctgcgttgccccataggagctggctatggaaggtcgatgccgttgagcctaagaacatgctcaggctcacagggcatgttctgatgcccaacgacaaagcccctcctggtgagggcactcaggcgcaggtgccggtcatgcaccctggcccctgcatgtctggcacctgggtggggatccaggagggggcaggatgggggctcttgggccacagggcttccctggaagtgagagttgagagcgccccttgccacagggaaacagagacttaaaaaggtaaatgtccacagtcttaccatggtaattggtagggtcaggatttgaacccaggcctcacagtcttaccatgataattgataaagccaggattcaaacccgggcctgagggactccagagccctgtccacttcaccatgctgcaacctgggctaggaatcctcctcctgagtttctgtaagccctggggccaggtccagagggctgagccacacctccaagtggcactgcccacaggtatcaggtgtccctggaaaggtgtccctgagctggtggcagagaaaagggctctcctgagtgttcaactccccgtctgtgtgaagcaatgccttggtcttcaagatctccggtgtcttccagcctgcctgccagtctcccttctcttcccttccacagcattcaggcacatagagccttctgcagcggcccgtccccagccagcacttgacaggacagatgggggctaatctggccctgctaagcagcgacatgcctctcctggagaaggcaggggcttcctggaacttgccccagccttatcagcggaggtttgccccaacacatcccagaaacgagcaaaggttcagcgccgtgcagttggcaggtgtcgggatcatcagtcatccccttgtcagtcccaagcctgctgggcttttgtgagggtgccaggaacacaggctggaggatggcaggaggggagtagaggtgggaggaggggagtccatctgcagcaccaggtaaggggatggatgctggctcctctggtcacctcagctggaacactactcaaggtccctggctcctgtcctccacctgcccccaggggccctgcattcccatccccagggcctccactctccctgagccctgcagtctctcactcactcactcactcactcattcactcactcactcactcacagggttttgagttggataacacagcataatgatcggccagtggactcccaaactaagaacacggagctgtcctcttggggagaggctcagggctcggggaagtgaagtccagctgagggcacagttggcctgagctgctctcagtacaggcagaggccttggtagctgtgctgtgatgagagttcgctccctgctgctctcttctggcatggagagatgaacctgtaatccaagtgttaaaaccgtgccctggggaaaaacactattaattctgaatcatctcttttgttgcattaaaaaaaaatagaagagaaaaacttcacatgacccactcaaggtgtgcaggcagctgtgtttgtcaggaaggcagaaggagttggctttgctttaggggaggagacgaggtcccacaacaccctctgaagggtatataaggagccccagcgtgcagcctggcctggtacctcctgccagcatctcttgggtttgctgagaactcacgggctccagctacctggccatgaccaccacatttctgcaaacttcttcctccacctttgggggtggctcaacccgagggggttccctcctggctgggggaggtggctttggtggggggagtctctctgggggaggtggaagccgaagtatctcagcttcttctgctaggtttgtctcttcagggtcaggaggaggatatgggggtggcatgagggtctgtggctttggtggaggggctggtagtgttttcggtggaggctttggagggggcgttggtgggggttttggtggtggctttggtggtggcgatggtggtctcctctctggcaatgagaaaattaccatgcagaacctcaatgaccgcctggcctcctacctggacaaggtacgtgccctggaggaggccaatgctgacctggaggtgaagatccatgactggtaccagaagcagaccccaaccagcccagaatgcgactacagccaatacttcaagaccattgaagagctccgggacaagatcatggccaccaccatcgacaactcccgggtcatcctggagatcgacaatgccaggctggctgcggacgacttcaggctcaagtatgagaatgagctggccctgcgccagggcgttgaggctgacatcaacggcttgcgccgagtcctggatgagctgaccctggccaggactgacctggagatgcagatcgagggcctgaatgaggagctagcctacctgaagaagaaccacgaagaggagatgaaggagttcagcagccagctggccggccaggtcaatgtggagatggacgcagcaccgggtgtggacctgacccgtgtgctggcagagatgagggagcagtacgaggccatggcggagaagaaccgccgggatgtcgaggcctggttcttcagcaagactgaggagctgaacaaagaggtggcctccaacacagaaatgatccagaccagcaagacggagatcacagacctgagacgcacgatgcaggagctggagatcgagctgcagtcccagctcagcatgaaagctgggctggagaactcactggccgagacagagtgccgctatgccacgcagctgcagcagatccaggggctcattggtggcctggaggcccagctgagtgagctccgatgcgagatggaggctcagaaccaggagtacaagatgctgcttgacataaagacacggctggagcaggagatcgctacttaccgcagcctgctcgagggccaggatgccaagatggctggcattgccatcagggaagcctcttcaggaggtggtggtagcagcagcaatttccacatcaatgtagaagagtcagtggatggacaggtggtttcttcccacaagagagaaatctaagtgtctattgcaggagaaacgtcccttgccactccccactctcatcaggccaagtggaggactggccagagggcctgcacatgcaaactccagtccctgccttcagagagctgaaaagggtccctcggtcttttatttcagggctttgcatgcgctctattccccctctgcctctccccaccttctttggagcaaggagatgcagctgtattgtgtaacaagctcatttgtacagtgtctgttcatgtaataaagaattacttttccttttgcaaatatc

SEQ ID NO: 15205 - DNA, 3758 bp, Homo sapiens
  source 1..3758: mol_type = unassigned DNA
agctctggatgatctgagtttgattatttttctttcggaggaaaagacaataccctcccacccatgagacaataccacactgtctgtgcccagcattggaggccaggctcactgcgaagatggatgagaaggaacccacccccagccttgctggctggcagttccccttgccagcccagctcagatgcaggaatttggggtctgcaggaaggactctttccctgtgccctgtttggttgagggtgtgaggacctgtttgagtcctggctttgccccttaccagtggtgccacctggcacaagttgcttcacctctccaagtttcaatttcattctttctgaatcttgggtgggggtcaccctctgttgtgaggatgagaggaggtgatggatgcaaaagtgctttgtaaatcacaaagtgcagggtagaagtaaaggattatgctattatagcaaaataagaacctaagaacaacctgcgttgccccataggagctggctatggaaggtcgatgccgttgagcctaagaacatgctcaggctcacagggcatgttctgatgcccaacgacaaagcccctcctggtgagggcactcaggcgcaggtgccggtcatgcaccctggcccctgcatgtctggcacctgggtggggatccaggagggggcaggatgggggctcttgggccacagggcttccctggaagtgagagttgagagcgccccttgccacagggaaacagagacttaaaaaggtaaatgtccacagtcttaccatggtaattggtagggtcaggatttgaacccaggcctcacagtcttaccatgataattgataaagccaggattcaaacccgggcctgagggactccagagccctgtccacttcaccatgctgcaacctgggctaggaatcctcctcctgagtttctgtaagccctggggccaggtccagagggctgagccacacctccaagtggcactgcccacaggtatcaggtgtccctggaaaggtgtccctgagctggtggcagagaaaagggctctcctgagtgttcaactccccgtctgtgtgaagcaatgccttggtcttcaagatctccggtgtcttccagcctgcctgccagtctcccttctcttcccttccacagcattcaggcacatagagccttctgcagcggcccgtccccagccagcacttgacaggacagatgggggctaatctggccctgctaagcagcgacatgcctctcctggagaaggcaggggcttcctggaacttgccccagccttatcagcggaggtttgccccaacacatcccagaaacgagcaaaggttcagcgccgtgcagttggcaggtgtcgggatcatcagtcatccccttgtcagtcccaagcctgctgggcttttgtgagggtgccaggaacacaggctggaggatggcaggaggggagtagaggtgggaggaggggagtccatctgcagcaccaggtaaggggatggatgctggctcctctggtcacctcagctggaacactactcaaggtccctggctcctgtcctccacctgcccccaggggccctgcattcccatccccagggcctccactctccctgagccctgcagtctctcactcactcactcactcactcattcactcactcactcactcacagggttttgagttggataacacagcataatgatcggccagtggactcccaaactaagaacacggagctgtcctcttggggagaggctcagggctcggggaagtgaagtccagctgagggcacagttggcctgagctgctctcagtacaggcagaggccttggtagctgtgctgtgatgagagttcgctccctgctgctctcttctggcatggagagatgaacctgtaatccaagtgttaaaaccgtgccctggggaaaaacactattaattctgaatcatctcttttgttgcattaaaaaaaaatagaagagaaaaacttcacatgacccactcaaggtgtgcaggcagctgtgtttgtcaggaaggcagaaggagttggctttgctttaggggaggagacgaggtcccacaacaccctctgaagggtatataaggagccccagcgtgcagcctggcctggtacctcctgccagcatctcttgggtttgctgagaactcacgggctccagctacctggccatgaccaccacatttctgcaaacttcttcctccacctttgggggtggctcaacccgagggggttccctcctggctgggggaggtggctttggtggggggagtctctctgggggaggtggaagccgaagtatctcagcttcttctgctaggtttgtctcttcagggtcaggaggaggatatgggggtggcatgagggtctgtggctttggtggaggggctggtagtgttttcggtggaggctttggagggggcgttggtgggggttttggtggtggctttggtggtggcgatggtggtctcctctctggcaatgagaaaattaccatgcagaacctcaatgaccgcctggcctcctacctggacaaggtacgtgccctggaggaggccaatgctgacctggaggtgaagatccatgactggtaccagaagcagaccccaaccagcccagaatgcgactacagccaatacttcaagaccattgaagagctccgggacaaggtatgagaatgagctggccctgcgccagggcgttgaggctgacatcaacggcttgcgccgagtcctggatgagctgaccctggccaggactgacctggagatgcagatcgagggcctgaatgaggagctagcctacctgaagaagaaccacgaagaggagatgaaggagttcagcagccagctggccggccaggtcaatgtggagatggacgcagcaccgggtgtggacctgacccgtgtgctggcagagatgagggagcagtacgaggccatggcggagaagaaccgccgggatgtcgaggcctggttcttcagcaagactgaggagctgaacaaagaggtggcctccaacacagaaatgatccagaccagcaagacggagatcacagacctgagacgcacgatgcaggagctggagatcgagctgcagtcccagctcagcatgaaagctgggctggagaactcactggccgagacagagtgccgctatgccacgcagctgcagcagatccaggggctcattggtggcctggaggcccagctgagtgagctccgatgcgagatggaggctcagaaccaggagtacaagatgctgcttgacataaagacacggctggagcaggagatcgctacttaccgcagcctgctcgagggccaggatgccaagatggctggcattgccatcagggaagcctcttcaggaggtggtggtagcagcagcaatttccacatcaatgtagaagagtcagtggatggacaggtggtttcttcccacaagagagaaatctaagtgtctattgcaggagaaacgtcccttgccactccccactctcatcaggccaagtggaggactggccagagggcctgcacatgcaaactccagtccctgccttcagagagctgaaaagggtccctcggtcttttatttcagggctttgcatgcgctctattccccctctgcctctccccaccttctttggagcaaggagatgcagctgtattgtgtaacaagctcatttgtacagtgtctgttcatgtaataaagaattacttttccttttgcaaata

SEQ ID NO: 15206 - DNA, 2393 bp, Homo sapiens
  source 1..2393: mol_type = unassigned DNA
gcacagctggtaaatgggaaaagaggggtttaaagcattcaggcacatagagccttctgcagcggcccgtccccagccagcacttgacaggacagatgggggctaatctggccctgctaagcagcgacatgcctctcctggagaaggcaggggcttcctggaacttgccccagccttatcagcggaggtttgccccaacacatcccagaaacgagcaaaggttcagcgccgtgcagttggcaggtgtcgggatcatcagtcatccccttgtcagtcccaagcctgctgggcttttgtgagggtgccaggaacacaggctggaggatggcaggaggggagtagaggtgggaggaggggagtccatctgcagcaccaggtaaggggatggatgctggctcctctggtcacctcagctggaacactactcaaggtccctggctcctgtcctccacctgcccccaggggccctgcattcccatccccagggcctccactctccctgagccctgcagtctctcactcactcactcactcactcattcactcactcactcactcacaggtgtgcaggcagctgtgtttgtcaggaaggcagaaggagttggctttgctttaggggaggagacgaggtcccacaacaccctctgaagggtatataaggagccccagcgtgcagcctggcctggtacctcctgccagcatctcttgggtttgctgagaactcacgggctccagctacctggccatgaccaccacatttctgcaaacttcttcctccacctttgggggtggctcaacccgagggggttccctcctggctgggggaggtggctttggtggggggagtctctctgggggaggtggaagccgaagtatctcagcttcttctgctaggtttgtctcttcagggtcaggaggaggatatgggggtggcatgagggtctgtggctttggtggaggggctggtagtgttttcggtggaggctttggagggggcgttggtgggggttttggtggtggctttggtggtggcgatggtggtctcctctctggcaatgagaaaattaccatgcagaacctcaatgaccgcctggcctcctacctggacaaggtacgtgccctggaggaggccaatgctgacctggaggtgaagatccatgactggtaccagaagcagaccccaaccagcccagaatgcgactacagccaatacttcaagaccattgaagagctccgggacaagatcatggccaccaccatcgacaactcccgggtcatcctggagatcgacaatgccaggctggctgcggacgacttcaggctcaagtatgagaatgagctggccctgcgccagggcgttgaggctgacatcaacggcttgcgccgagtcctggatgagctgaccctggccaggactgacctggagatgcagatcgagggcctgaatgaggagctagcctacctgaagaagaaccacgaagaggagatgaaggagttcagcagccagctggccggccaggtcaatgtggagatggacgcagcaccgggtgtggacctgacccgtgtgctggcagagatgagggagcagtacgaggccatggcggagaagaaccgccgggatgtcgaggcctggttcttcagcaagactgaggagctgaacaaagaggtggcctccaacacagaaatgatccagaccagcaagacggagatcacagacctgagacgcacgatgcaggagctggagatcgagctgcagtcccagctcagcatgaaagctgggctggagaactcactggccgagacagagtgccgctatgccacgcagctgcagcagatccaggggctcattggtggcctggaggcccagctgagtgagctccgatgcgagatggaggctcagaaccaggagtacaagatgctgcttgacataaagacacggctggagcaggagatcgctacttaccgcagcctgctcgagggccaggatgccaagatggctggcattgccatcagggaagcctcttcaggaggtggtggtagcagcagcaatttccacatcaatgtagaagagtcagtggatggacaggtggtttcttcccacaagagagaaatctaagtgtctattgcaggagaaacgtcccttgccactccccactctcatcaggccaagtggaggactggccagagggcctgcacatgcaaactccagtccctgccttcagagagctgaaaagggtccctcggtcttttatttcagggctttgcatgcgctctattccccctctgcctctccccaccttctttggagcaaggagatgcagctgtattgtgtaacaagctcatttgtacagtgtctgttcatgtaataaagaattacttttccttttgcaaat

SEQ ID NO: 15207 - DNA, 2527 bp, Homo sapiens
  source 1..2527: mol_type = unassigned DNA
aaggtacgtgccctggaggaggccaatgctgacctggaggtgaagatccatgactggtaccagaagcagaccccaaccagcccagaatgcgactacagccaatacttcaagaccattgaagagctccgggacaaggtatgagaatgagctggccctgcgccagggcgttgaggctgacatcaacggcttgcgccgagtcctggatgagctgaccctggccaggactgacctggagatgcagatcgagggcctgaatgaggagctagcctacctgaagaagaaccacgaagaggagatgaaggagttcagcagccagctggccggccaggtcaatgtggagatggacgcagcaccgggtgtggacctgacccgtgtgctggcagagatgagggagcagtacgaggccatggcggagaagaaccgccgggatgtcgaggcctggttcttcagcaagactgaggagctgaacaaagaggtggcctccaacacagaaatgatccagaccagcaagacggagatcacagacctgagacgcacgatgcaggagctggagatcgagctgcagtcccagctcagcatgaaagctgggctggagaactcactggccgagacagagtgccgctatgccacgcagctgcagcagatccaggggctcattggtggcctggaggcccagctgagtgagctccgatgcgagatggaggctcagaaccaggagtacaagatgctgcttgacataaagacacggctggagcaggagatcgctacttaccgcagcctgctcgagggccaggatgccaagtaggcgcctgggcacaggggaaggagtgatgagggctgcttgtggctagggtgcagggtcatcctaagggaatggcagggtgtccctaagcagccttgagggactgtgaaaagagaactgagcaaggagggaggatctggactcctcactctggtccttggctgttacctgggacaggtcacttcctctctctggatccgtgtttcttctgtaaatgatagaggctgggctagtggtagttaagatctagtgctcattccattctctgcatgagatagatgggtattcttgtagttcagaatcttgaccagctcagtggctcatgcctgtaatcccagcactttgggagtccaaggcgggtggatcacttgaggtcaggagttcgagaccagcatggccaatatggtgaaaccccgtctctactaaaaatacaaaaattagctgggcgtggtggcgggtgcctgtaatcccagctactcgggaggctgaggcacaagaatcacttgaacccgggaggcggaggtttcagtgggctgagatcgtgccactgcactccagcctgggcgacagagtgagattccgtctcaaaaaacaaaacaaaacaaaacaaaatctgtctacttggggatagcaggcctggatgggctagcaggatgtcccacccctagaggagtcagatgtgtgggtggtggtggtgtagggtctgaagaacactgcatagctatctacatgagcttcccttacggacacttgagcttgtgccctttgcttaaatcagcttccctctttctttcaggatggctggcattgccatcagggaaggtaggaaggctttactcttctggtgtggggtggggaggggagatgttgaagccaccacccccttcggaatagggaggaaggagaaagagcccaaacatcccattaggtgggaacattcccattcattagatgcctcttccccagtgggaacttctgtcagccccaggtgagattgcagctggtgatttattgagaaacttccaggttgagtaggcttcattcagggcatgtctctcccccaggccccatcttcatacacttccgctaagatgcccacaattcatcccccttcatgtgcagcttgaaaaaccctgacattgttgctccctgccgggcatacctgccattgccactgcccatctctgtgatgaggaattcaacaccagatctctggcagctcttgagggattggccagtggccattctcaggggtgctgtctagttttcccagagccccgccaaggtcctggccaccgtggcagagcggggaggttcccccactctaaagcctactccttctctctctagcctcttcaggaggtggtggtagcagcagcaatttccacatcaatgtagaagagtcagtggatggacaggtggtttcttcccacaagagagaaatctaagtgtctattgcaggagaaacgtcccttgccactccccactctcatcaggccaagtggaggactggccagagggcctgcacatgcaaactccagtccctgccttcagagagctgaaaagggtccctcggtcttttatttcagggctttgcatgcgctctattccccctctgcctctccccaccttctttggagcaaggagatgcagctgtattgtgtaacaagctcatttgtacagtgtctgttcatgtaataaagaattacttttccttttgcaaat

SEQ ID NO: 15208 - DNA, 903 bp, Homo sapiens
  source 1..903: mol_type = unassigned DNA
gaagaggccccaaaagaagtcccacttcttcctggtggagaggtgagggctgcaggcccaaccctatgagtgatgggggcaagtgagggacactagttccacgcccgcatgctgccaaatgtactcagcaccctgctaaggaggctggagaccccatcacggccatggcaatcccgaaggaggagctgtttcaaggtacgtgccctggaggaggccaatgctgacctggaggtgaagatccatgactggtaccagaagcagaccccaaccagcccagaatgcgactacagccaatacttcaagaccattgaagagctccgggacaaggtatgagaatgagctggccctgcgccagggcgttgaggctgacatcaacggcttgcgccgagtcctggatgagctgaccctggccaggactgacctggagatgcagatcgagggcctgaatgaggagctagcctacctgaagaagaaccacgaagaggagatgaaggagttcagcagccagctggccggccaggtcaatgtggagatggacgcagcaccgggtgtggacctgacccgtgtgctggcagagatgagggagcagtacgaggccatggcggagaagaaccgccgggatgtcgaggcctggttcttcagcaagactgaggagctgaacaaagaggtggcctccaacacagaaatgatccagaccagcaagacggagatcacagacctgagacgcacgatgcaggagctggagatcgagctgcagtcccagctcagcatgaaagctgggctggagaactcactggccgagacagagtgccgctatgccacgcagctgcagcagatccaggggctcattggtggcctggaggcccagctgagtgagctccgatgcgagatggaggctcagaa

SEQ ID NO: 15209 - DNA, 1644 bp, Homo sapiens
  source 1..1644: mol_type = unassigned DNA
gccttcctgagcacctttccttctttcagccaactgctcactcgctcacctccctccttggcaccatgaccacctgcagccgccagttcacctcctccagctccatgaagggctcctgcggcatcggaggcggcatcgggggcggctccagccgcatctcctccgtcctggccggagggtcctgccgtgcccccagcacctacgggggcggcctgtctgtctcctctcgcttctcctctgggggagcctgcgggctggggggcggctatggcggtggcttcagcagcagcagcagctttggtagtggcttcgggggaggatatggtggtggccttggtgctggcttcggtggtggcttgggtgctggctttggtggtggttttgctggtggtgatgggcttctggtgggcagtgagaaggtgaccatgcagaacctcaatgaccgcctggcctcctacctggacaaggtgcgtgctctggaggaggccaacgccgacctggaagtgaagatccgtgactggtaccagaggcagcggcccagtgagatcaaagactacagtccctacttcaagaccatcgaggacctgaggaacaagatcattgcggccaccattgagaatgcgcagcccattttgcagattgacaatgccaggctggcagccgatgacttcaggaccaagtatgagcatgaactggccctgcggcagactgtggaggccgacgtcaatggcctgcgccgggtgttggatgagctgaccctggccaggactgacctggagatgcagatcgaaggcctgaaggaggagctggcctacctgaggaagaaccacgaggaggagatgcttgctctgagaggtcagaccggcggagatgtgaacgtggagatggatgctgcacctggcgtggacctgagccgcatcctgaatgagatgcgtgaccagtacgagcagatggcagagaaaaaccgcagagacgctgagacctggttcctgagcaagaccgaggagctgaacaaagaagtggcctccaacagcgaactggtacagagcagccgcagtgaggtgacggagctccggagggtgctccagggcctggagattgagctgcagtcccagctcagcatgaaagcatccctggagaacagcctggaggagaccaaaggccgctactgcatgcagctgtcccagatccagggactgattggcagtgtggaggagcagctggcccagctacgctgtgagatggagcagcagagccaggagtaccagatcttgctggatgtgaagacgcggctggagcaggagattgccacctaccgccgcctgctggagggcgaggatgcccacctttcctcccagcaagcatctggccaatcctattcttcccgcgaggtcttcacctcctcctcgtcctcttcgagccgtcagacccggcccatcctcaaggagcagagctcatccagcttcagccagggccagagctcctagaactgagctgcctctaccacagcctcctgcccaccagctggcctcacctcctgaaggcccgggtcaggaccctgctctcctggcgcagttcccagctatctcccctgctcctctgctggtggtgggctaataaagctgactttctggttgatgcaaa

SEQ ID NO: 15210 - DNA, 1524 bp, Homo sapiens
  source 1..1524: mol_type = unassigned DNA
ctacacaacttggggcccctctcctctccagcccttctcctgtgtgcctgcctcctgccgccgccaccatgaccacctccatccgccagttcacctcctccagctccatcaagggctcctccggcctggggggcggctcgtcccgcacctcctgccggctgtctggcggcctgggtgccggctcctgcaggctgggatctgctggcggcctgggcagcaccctcgggggtagcagctactccagctgctacagctttggctctggtggtggctatggcagcagctttgggggtgttgatgggctgctggctggaggtgagaaggccaccatgcagaacctcaatgaccgcctggcctcctacctggacaaggtgcgtgccctggaggaggccaacactgagctggaggtgaagatccgtgactggtaccagaggcaggccccggggcccgcccgtgactacagccagtactacaggacaattgaggagctgcagaacaagatcctcacagccaccgtggacaatgccaacatcctgctacagattgacaatgcccgtctggctgctgatgacttccgcaccaagtttgagacagagcaggccctgcgcctgagtgtggaggccgacatcaatggcctgcgcagggtgctggatgagctgaccctggccagagccgacctggagatgcagattgagaacctcaaggaggagctggcctacctgaagaagaaccacgaggaggagatgaacgccctgcgaggccaggtgggtggtgagatcaatgtggagatggacgctgccccaggcgtggacctgagccgcatcctcaacgagatgcgtgaccagtatgagaagatggcagagaagaaccgcaaggatgccgaggattggttcttcagcaagacagaggaactgaaccgcgaggtggccaccaacagtgagctggtgcagagtggcaagagtgagatctcggagctccggcgcaccatgcaggccttggagatagagctgcagtcccagctcagcatgaaagcatccctggagggcaacctggcggagacagagaaccgctactgcgtgcagctgtcccagatccaggggctgattggcagcgtggaggagcagctggcccagcttcgctgcgagatggagcagcagaaccaggaatacaaaatcctgctggatgtgaagacgcggctggagcaggagattgccacctaccgccgcctgctggagggagaggatgcccacctgactcagtacaagaaagaaccggtgaccacccgtcaggtgcgtaccattgtggaagaggtccaggatggcaaggtcatctcctcccgcgagcaggtccaccagaccacccgctgaggactcagctaccccggccggccacccaggaggcagggaggcagccgccccatctgccccacagtctccggcctctccagcctcagccccctgcttcagtcccttccccatgcttccttgcctgatgacaataaagcttgttgactcagctatgaaa

SEQ ID NO: 15211 - DNA, 2403 bp, Homo sapiens
  source 1..2403: mol_type = unassigned DNA
ttcctccctggacaaaggcatcatgagttgtcagatctcttgcaaatctcgaggaagaggaggaggtggaggaggattccggggcttcagcagcggctcagctgtggtgtctggtggaagccggagatcaacttccagcttctcctgcttgagccgccatggtggtggtggcgggggcttcggtggaggcggctttggcagtcggagtcttgttggccttggagggaccaagagcatctccattagtgtggctggaggaggtggtggctttggcgccgctggtggatttggtggcagaggaggtggttttggaggcggcagcagctttggaggtggcagcggcttcagtggtggtggtttcggtggaggcggctttggtggaggccgctttggaggttttgggggccctggtggtgttggaggtttagggggtcctggtggctttgggcctggaggataccctggtggcatccacgaagtctctgtcaaccagagcctcctgcagcctctcaacgtgaaagttgacccagagatccagaatgtgaaggcccaagagcgtgagcagatcaaaactctcaacaacaaatttgcctccttcattgacaaggtgcggttcttggagcagcagaaccaggtgttacagaccaaatgggagctgctacaacaaatgaatgttggcacccgccccatcaacctggagcccatcttccaggggtatatcgacagcctcaagagatatctggatgggctcactgcagaaagaacatcacagaattcagagctgaataacatgcaggatcttgtggaggattataagaagaagtatgaggatgaaatcaataagcgcacagctgctgagaatgattttgtgacgcttaaaaaggacgtggacaatgcctacatgataaaggtggagttgcagtccaaggtggacctgctgaaccaggaaattgagtttctgaaagttctctatgatgcggagatatcccagatacatcagagtgtcactgacaccaacgtcatcctctccatggacaacagccgcaacctggacttggatagcatcatcgccgaggtcaaggcccagtatgaggagatcgcccagaggagcaaggaagaagcggaggccctgtaccacagcaagtatgaggagctccaggtgactgtcgggagacatggagacagcctgaaagagatcaagatagagatcagcgagctgaaccgcgtgatccagaggctgcagggggagatcgcacatgtgaagaagcagtgtaagaatgtgcaagatgccatcgcagatgccgagcagcgtggggagcatgccctcaaggatgccaggaacaagttgaatgacctggaggaggccctgcagcaggccaaggaggacttggcgcggctgctgcgtgactaccaggagctgatgaacgtgaagctggccctagatgtggagatcgccacctaccgcaaactgctggagggcgaggagtgcaggatgtctggagacctcagcagcaatgtgactgtgtctgtgacaagcagcaccatttcatcaaatgtggcatccaaggctgcctttggaggttctggaggtagagggtccagttccggaggaggatacagctctggaagcagcagttatggctctggaggccgacagtctggctccagaggcggtagtggaggaggaggttctatctctggaggaggatatggctctggcggtggttctggaggaagatacggatctggtggtggctctaagggagggtccatctctggaggaggatatggctctggaggtggaaaacacagctctggaggtggctctagaggaggctccagctctggaggaggatatggctctggaggtgggggttctagctctgtaaagggtagctcaggtgaagcttttggttccagcgtgaccttctcttttagataaagatgagcccccaccaccaccgactctcccaacccagactctcccactccagaatgtagaagcctgtctctgtacctctaactggcagcaagttaaatttttgtcatttatctctgatggcactttgagggaaaagaatgtccacatacagtttttgaaagatcttctctccaaaccagttagttagagccagtgacgcctctgtgttctggggcggaatctgtgctgtctaggtttgtgcttctagccatgcccattcccgcccccaccatgcctctttgcattgcccattttccagatgtgtattctgttgaggacccaggcccatccagggatttcatctctaagcctggcagtgctggggggaaatgtgtttctgtgtatatagctcctcttgtccactctgctttcggaagtgctgtggtctgggggtcttcataataaacctcatttgcaattca

SEQ ID NO: 15212 - DNA, 3078 bp, Homo sapiens
  source 1..3078: mol_type = unassigned DNA
caaccatcctgaagctacaggtgctccctcctggaatctccaatggatttcagtcgcagaagcttccacagaagcctgagctcctccttgcaggcccctgtagtcagtacagtgggcatgcagcgcctcgggacgacacccagcgtttatgggggtgctggaggccggggcatccgcatctccaactccagacacacggtgaactatgggagcgatctcacaggcggcggggacctgtttgttggcaatgagaaaatggccatgcagaacctaaatgaccgtctagcgagctacctagaaaaggtgcggaccctggagcagtccaactccaaacttgaagtgcaaatcaagcagtggtacgaaaccaacgccccgagggctggtcgcgactacagtgcatattacagacaaattgaagagctgcgaagtcagattaaggatgctcaactgcaaaatgctcggtgtgtcctgcaaattgataatgctaaactggctgctgaggacttcagactgaagtatgagactgagagaggaatacgtctaacagtggaagctgatctccaaggcctgaataaggtctttgatgacctaaccctacataaaacagatttggagattcaaattgaagaactgaataaagacctagctctcctcaaaaaggagcatcaggaggaagtcgatggcctacacaagcatctgggcaacactgtcaatgtggaggttgatgctgctccaggcctgaaccttggcgtcatcatgaatgaaatgaggcagaagtatgaagtcatggcccagaagaaccttcaagaggccaaagaacagtttgagagacagactgcagttctgcagcaacaggtcacagtgaatactgaagaattaaaaggaactgaggttcaactaacggagctgagacgcacctcccagagccttgagatagaactccagtcccatctcagcatgaaagagtctttggagcacactctagaggagaccaaggcccgttacagcagccagttagccaacctccagtcgctgttgagctctctggaggcccaactgatgcagattcggagtaacatggaacgccagaacaacgaataccatatccttcttgacataaagactcgacttgaacaggaaattgctacttaccgccgccttctggaaggagaagacgtaaaaactacagaatatcagttaagcaccctggaagagagagatataaagaaaaccaggaagattaagacagtcgtgcaagaagtagtggatggcaaggtcgtgtcatctgaagtcaaagaggtggaagaaaatatctaaatagctaccagaaggagatgctgctgaggttttgaaagaaatttggctataatcttatctttgctccctgcaagaaatcagccataagaaagcactattaatactctgcagtgattagaaggggtggggtggcgggaatcctatttatcagactctgtaattgaatataaatgttttactcagaggagctgcaaattgcctgcaaaaatgaaatccagtgagcactagaatatttaaaacatcattactgccatctttatcatgaagcacatcaattacaagctgtagaccacctaatatcaatttgtaggtaatgttcctgaaaattgcaatacatttcaattatactaaacctcacaaagtagaggaatccatgtaaattgcaaataaaccactttctaattttttcctgtttctgaattgtaaaaccccctttgggagtccctggtttcttattgagccaatttctgggttaatcttattgatttttcagcatcagtacaactctacaacctttgagctatatctgctttttcccattgcttccactgccttttaaaactcaacacagctttttgaataatttgagagtcaaattcaatcacaaatgctgagcagaataagagtgaagtacactatacttaaaatggaaatagattaaaaacaacattactgaaacccttctcaaggcaaaatgtgtctccttttgataataagctgcatatactatcaggtcctctctttctttatatggtgaacatatatttttaatgaaatgtctctcatttttttaataacagatttattgagatataattcacacaccatgaaattcacccttacaaaacgtacaattcagtggtcttcagtatgcttacaatgttttgcaaccatcaccactatctagttttagaacacttcatcaccccaaaaggaaatcttgtacctattagtagtcaccgccttttcccttcctcccagcccctaacaaccactaatctacttcctgtctctacggatttgcctactctggacatttcatataaataggttaatacgatgtgtccttttatacacaaatgttcatagcagcattactcataaaagccccaaagcgaaacacctcaagtgtccatcaaccgatgaatggataaacaaaatgtaatatatccacacaatagaatcttattcgtcaataaaaaggaatgaagtactgatacatgctataacagagatgaacttcgaaaacatgctaagtgaaagaagccaaatccaaaaacaataaaaacacatattgtatcctcaccctttttgcattttagtgagcaatcattgcatatgaatgtttatgggaaaaatcaatgtgtgctaaatcattgtattccagtaaatagattggacttaaaacttgatacagaagttgcaaataagtgggattgagtttgattattatatagaaaataattacatgattcatttaagaataataatatccaccatttattgagcacttactatgagcctgtgtgccaaacatttcatgcatttctcatttaattctcacaataatcctgtgaggtagaagctattaggttgaatcatatgaacttgccaatatatgataatttctaagagttgggaatttttgaggatgtgaatggtaccactttgaattcctaagatgtaatataatatctaacacatagcaggcacttgattcattattttaaattgaaagaataaagatttttttaaagcttt

SEQ ID NO: 15213 - DNA, 1881 bp, Homo sapiens
  source 1..1881: mol_type = unassigned DNA
actcttcgtcatcacctctcctattcgcctggacaagctcatgtttgcaggagcaccatgtcttgctcgtctcgcgcctcctcctccagggctggaggcagcagctcagccagggtgtctgctggtggaagcagcttcagcagtggaagcagatgtggtctggggggcagctcggcccagggcttccgaggaggagccagcagctgcagcctgagtggggggtctagcggtgcttttgggggcagctttggagggggctttggtagctgctcagtagggggtggttttgggggagcttcaggctctgggacaggatttggtgggggttctagctttggcggggtctctggatttggcaggggttctggattctgtgggagttctagattcagcagtggtgctactggaggcttctacagctatggtggtggtatgggaggtggtgttggcgatggggggcttttctctggaggggaaaagcaaaccatgcagaacctcaatgaccgcttggccaattacctagacaaggtcagagccctggaggaggctaacactgatctggagaacaaaatcaaggagtggtatgacaaatatgggcctgggtctggagacggtggatcgggaagagattatagcaaatactattcaataattgaagatctcagaaaccagatcattgctgccactgttgaaaatgctgggatcattttgcacattgacaatgccagattggctgctgatgacttcagactgaagtatgagaacgagctgtgtctccggcagagcgtggaggctgacatcaatggcctgcggaaagtcctggatgacctgactatgacccgctctgacctggagatgcagattgagagtttcaccgaggagctagcctacctgaggaagaaccacgaggaggaaatgaagaatatgcaaggaagctctggaggggaggtgaccgtagaaatgaatgctgcgccagggaccgacctgaccaaattactgaatgacatgagggcgcagtacgaggagctggctgagcaaaaccgccgagaggctgaggagcggttcaacaagcagagcgcatcactacaagcacaaatctccactgatgctggggcagccacttctgccaagaatgagataacagaactaaaacgtaccctgcaagccctggaaattgagcttcagtcccaactggccatgaaaagctccctggagggaaccctggctgacacagaagctggctacgtggctcagctgtcagaaattcaaacgcagatcagtgccctggaggaggagatctgccagatctggggtgagactaaatgccagaacgcagagtacaagcaattgctggacatcaagacacgcctggaggtggagatcgagacctaccgccgcctgctcgatggagagggaggtggttctagttttgcagaatttggtggtagaaactcaggatctgtaaacatgggatccagggatctggtatctggtgactcaagatctggaagctgttctggtcaaggacgagattcaagcaagactagagtgactaagactatcgtagaggagttggtggatggcaaggttgtctcgtctcaagtcagcagtatttctgaggtgaaagttaaataaggaacttccagatcaacaaaagtgtctttcaaagaaaaaaaaatcaagaaggacacaagcgaagaaatggcatcaatctaggcatctttctggataatttcaggaaaagcttcagtccagaaatggatgactagccaacttttctgcatcttcttatttcctcattagaatgctcttgaaatagctgaattaacaactttgctttaattgtttctatgcttcaataaatttacttttgcaagttaa

SEQ ID NO: 15214 - DNA, 2312 bp, Homo sapiens
  source 1..2312: mol_type = unassigned DNA
ccctcttcctctgactctcagtgtccctgcttaacttacactcttctcttcgccaagctccttaccatgagcagacaagccagcaagacatctggtggcgggagccagggtttctccggccgctctgctgtggtctccggcagcagcaggatgagctgtgtggcccactctgggggagctggcggaggggcctatggcttccggagcggagcaggtggctttggcagtcgcagcctctacaacctgggcggcaacaagagcatctccatcagcgtggcagctggcggctcccgggctggaggctttgggggagggcggagcagctgtgcctttgcaggtggctatggaggtggctttgggagcggctatggaggtggctttggtggtggctttggtggtggcagaggaatgggaggtggctttggtggagctggtggctttggaggggctggtggctttggaggggctggtggctttggtggtcctggtggctttggtgggtctggtggctttggtgggcctggcagcttgggcagtcctggtggctttggccctgggggctttcctgggggaattcaggaagtgactatcaaccagagtctcctgcagcccctcaatgtggagatcgacccccagattgggcaagtaaaggcccaggagcgggaacagatcaagaccctcaacaacaagtttgcctccttcattgacaaggtgcggttcctggagcaacagaacaaagtcctggagaccaagtggaacctgctccagcagcagggcacaagttccatctcaggcacaaacaaccttgagcctctttttgagaatcacatcaactacctgcggagctacctggacaacatcctcggggagagagggcgcctggactctgagctgaagaacatggaggacctggtggaagacttcaagaagaaatatgaggatgaaatcaataaacgtacagctgctgagaatgaatttgtgactctgaagaaggatgtggacagtgcctatatgaacaaggtggagcttcaggccaaagtggatgccttgatagatgagatcgacttcttaaggaccctctacgacgctgagctatctcagatgcagagccacatcagtgacacatctgtggtgctgtccatggacaataatcgctccctggacctggacagcatcattgctgaagttcgtgcacagtatgaggatatcgctcagagaagcaaggccgaagctgaggccctgtaccagaccaagttgggggagctgcagaccacggctggcaggcatggggatgacctaagaaataccaagagcgagatcatagagctcaacagaatgatccagaggctgcgggcagagatcgagggtgtcaagaagcagaatgccaacctgcagacggccattgccgaggccgagcagcatggagagatggccctcaaggatgccaatgccaagctccaagagctgcaggctgctctacagcaggcgaaggatgacctggcgcggctgctacgtgactaccaggagctgatgaatgtcaagctggccctggacgtggagatcgccacctaccgcaagctgctggagggcgaggagtacagcaggatgtctggagagtgtccgagtgctgtcagcatctccgtggtcagcagcagcacgacttccgcctccgcaggtggctatggaggaggttacggcggaggcatgggcggtggtttaggaggtggcttcagtgcgggcggcggctcaggcagtggctttggccggggaggcggcggtggaatcggcggtggatttggcggcggcagcagcggtttcagcggtggcagcggctttggctccatctctggcgcccgctatggagtcagtggcgggggcttcagctcggccagcaaccggggcggcagcatcaagttctcccagtcctcccagtcctcccagcgctactccagataaagagcacgcatcagcatcgcagccactccagcgcctcccctccgctccccacgcccccatattggcaacacccccagcgccaccccatgctccccaagaacgcggctctgcgctggaaggcttgtggcctcttgctcctccttccagatccccggccaagcccagtcacgagaatttcaggctcttctctccggctccagcctgtgcctgtgattgtccaggtgtggcctaggccgccaccttctgctgccccggagtcccctccctgggtgggatgctcactacagctctgatgtatatagcacacagccccctccgcccctccggtctgtcgccaataaagtgcactgtgtttc

SEQ ID NO: 15215 - DNA, 2319 bp, Homo sapiens
  source 1..2319: mol_type = unassigned DNA
atttcccatccctcttcctctgactctcagtgtccctgcttaacttacactcttctcttcgccaagctccttaccatgagcagacaagccagcaagacatctggtggcgggagccagggtttctccggccgctctgctgtggtctccggcagcagcaggatgagctgtgtggcccactctgggggagctggcggaggggcctatggcttccggagcggagcaggtggctttggcagtcgcagcctctacaacctgggcggcaacaagagcatctccatcagcgtggcagctggcggctcccgggctggaggctttgggggagggcggagcagctgtgcctttgcaggtggctatggaggtggctttgggagcggctatggaggtggctttggtggtggctttggtggtggcagaggaatgggaggtggctttggtggagctggtggctttggaggggctggtggctttggaggggctggtggctttggtggtcctggtggctttggtgggtctggtggctttggtgggcctggcagcttgggcagtcctggtggctttggccctgggggctttcctgggggaattcaggaagtgactatcaaccagagtctcctgcagcccctcaatgtggagatcgacccccagattgggcaagtaaaggcccaggagcgggaacagatcaagaccctcaacaacaagtttgcctccttcattgacaaggtgcggttcctggagcaacagaacaaagtcctggagaccaagtggaacctgctccagcagcagggcacaagttccatctcaggcacaaacaaccttgagcctctttttgagaatcacatcaactacctgcggagctacctggacaacatcctcggggagagagggcgcctggactctgagctgaagaacatggaggacctggtggaagacttcaagaagaaatatgaggatgaaatcaataaacgtacagctgctgagaatgaatttgtgactctgaagaaggatgtggacagtgcctatatgaacaaggtggagcttcaggccaaagtggatgccttgatagatgagatcgacttcttaaggaccctctacgacgctgagctatctcagatgcagagccacatcagtgacacatctgtggtgctgtccatggacaataatcgctccctggacctggacagcatcattgctgaagttcgtgcacagtatgaggatatcgctcagagaagcaaggccgaagctgaggccctgtaccagaccaagttgggggagctgcagaccacggctggcaggcatggggatgacctaagaaataccaagagcgagatcatagagctcaacagaatgatccagaggctgcgggcagagatcgagggtgtcaagaagcagaatgccaacctgcagacggccattgccgaggccgagcagcatggagagatggccctcaaggatgccaatgccaagctccaagagctgcaggctgctctacagcaggcgaaggatgacctggcgcggctgctacgtgactaccaggagctgatgaatgtcaagctggccctggacgtggagatcgccacctaccgcaagctgctggagggcgaggagtacaggatgtctggagagtgtccgagtgctgtcagcatctccgtggtcagcagcagcacgacttccgcctccgcaggtggctatggaggaggttacggcggaggcatgggcggtggtttaggaggtggcttcagtgcgggcggcggctcaggcagtggctttggccggggaggcggcggtggaatcggcggtggatttggcggcggcagcagcggtttcagcggtggcagcggctttggctccatctctggcgcccgctatggagtcagtggcgggggcttcagctcggccagcaaccggggcggcagcatcaagttctcccagtcctcccagtcctcccagcgctactccagataaagagcacgcatcagcatcgcagccactccagcgcctcccctccgctccccacgcccccatattggcaacacccccagcgccaccccatgctccccaagaacgcggctctgcgctggaaggcttgtggcctcttgctcctccttccagatccccggccaagcccagtcacgagaatttcaggctcttctctccggctccagcctgtgcctgtgattgtccaggtgtggcctaggccgccaccttctgctgccccggagtcccctccctgggtgggatgctcactacagctctgatgtatatagcacacagccccctccgcccctccggtctgtcgccaataaagtgcactgtgtttca

SEQ ID NO: 15216 - DNA, 1596 bp, Homo sapiens
  source 1..1596: mol_type = unassigned DNA
gagaatttagactctgtcttcagccaggcactccctccctccctcccagcactatgccctacaacttctgcctgcccagcctgagctgccgcaccagctgctcctcccggccctgcgtgccccccagctgccacagctgcaccctgcccggggcctgcaacatccccgccaatgtgagcaactgcaactggttctgcgagggctccttcaatggtagcgagaaggagactatgcagttcctgaacgaccgcctggccagctacctggagaaagtgcgtcagctggagcgggacaacgcggagctggagaacctcatccgggagcggtctcagcagcaggagcccttgctgtgccccagttaccagtcctattttaagaccattgaggagctccagcagaagatcctgtgtaccaagtctgagaatgccaggcttgtggtgcagatcgacaacgccaagctggctgcggatgatttcagaaccaagtaccagaccgagctgtccctgcggcagctggtggagtcggacatcaacggtctgcgcaggatcctggatgagctgaccctgtgcaagtccgacctggaggcccaggtggagtccctgaaggaggagctgctctgcctcaagagcaaccatgagcaggaggtcaataccctgcgctgccagcttggagaccgcctcaatgtggaggtggatgctgctcccactgtggacctgaatcgggtgctgaacgagaccaggagtcagtatgaggccctggtggaaaccaaccgcagggaagtggagcaatggttcaccacgcagaccgaggagctgaacaagcaggtggtatccagctcagagcagctgcagtcctaccaggcggagatcatcgagctgagacgcacagtcaacgccctggagatcgagctgcaggcccagcacaacctgcgagactctctggaaaacacgctgacagagagtgaggcccgctacagctcccagctgtcccaggtgcagagcctgatcaccaacgtggagtcccagctggcggagatccgcagtgacctggagcggcagaaccaggagtaccaggtgctgctggatgtgcgtgcccggctggagtgtgagatcaacacataccggagcctgctggagagcgaggactgcaatctgcccagcaatccctgtgccacgaccaacgcgtgcagcaagcccatcggaccctgtctctccaatccctgtacctcttgtgtccctcctgccccctgcacaccctgtgccccacgcccccgctgtgggccctgcaattccttcgtgcgctagaacctagggaatgccagaggagcaaggatgcagggcccaggactccagagctgtgacctggctctggttcaacaaaaggggcctgaaaacatcatttgcatggctggagttgcccgcgtaaggcagccaagaaactcacccaaagcctgtagcctccccaactactccagactgtcctgctcaccctttccttcctgggggtctgttccttcctatgctcacccagagaactctctgatgtgccagtgggcctcccttttaacctcctaataaatatcatttccttggcaaa

SEQ ID NO: 15217 - DNA, 1750 bp, Homo sapiens
  source 1..1750: mol_type = unassigned DNA
ttctatcatgagccccctcactgcaagggcataaaatggcccgggcggcatggggtctgtagacatccaggtagctgtggctgaggagaaagggcctctccaacatgacatcctcctgctgtgtcaccaacaacttgcaagcctctctcaagagctgcccccggcctgcctcggtctgttccagcggcgtgaactgccggcctgagctgtgcctgggctatgtctgccagcccatggcatgcctgccttcggtctgcctgcccaccaccttccggccagccagctgcctctccaaaacctatctatccagttcctgccaggcagccagtggcatctccggctccatgggccccggcagctggtacagcgaaggggccttcaatggcaatgagaaggaaaccatgcagttccttaacgaccgcctggccagctacctgacgagggtgcggcagctggagcaggagaatgcggagctggagagcaggatccaagaggcctctcactcccaggtgctcaccatgactcctgactaccagtctcatttcaggaccattgaggagctccagcagaagattctgtgtaccaaggcagagaatgccaggatggttgtgaacattgataatgccaaactggctgccgatgacttcagggccaagtacgaggcagagctggccatgcggcagctggtggaggccgacatcaatggcctgcgcaggatcctggatgatctcactctgtgcaaggctgacctggaggcccaggttgagtccctgaaggaggagctgatgtgcctcaaaaagaaccatgaggaggaagtcggttcccttcgatgccagcttggggaccgccttaacatcgaggtggacgctgcacccccggtggacctgaccagggtgctggaggagatgcggtgtcagtacgaggccatggtggaggccaaccgcagggacgtggaggaatggttcaatatgcagatggaggagcttaaccaacaggtggccacaagctctgagcagcttcagaactaccagtcagacatcattgacctgagacgcacggtcaacacgctggagatcgagctgcaggcccagcacagcctgagggactccctggaaaacacgctgacggagagtgaggcccgctacagctcccagctggcccagatgcagtgcatgatcaccaacgttgaggcccagctggctgagatccgggctgacctggagcggcagaaccaggagtaccaggtgctgctggacgtccgggcccggctggagggcgagatcaacacgtaccggagcctgctggagaacgaggactgcaagctgccctgtaacccatgctccactccttcctgcaccacctgtgtgccctccccatgcgtgccccgcaccgtctgtgtgccacgcactgttggcatgccttgctcaccctgcccccagggccgctactgaagtccctttgtgccagtggatcctggagggcctggggctgggcagcctggtattcagtggccaccagaagagcagggccagccccggtcagcaaggaagaccctgagcaggaccgtggatcacctgcaacaagctctgatactccaggggatacttaagccctcatcacttcaaaactgcctcttttttccatgggtgaactgttctctttggtgatgtttctggttgtctgtgctgcctcaaagagcgtgtgttcttagttaactggcaaatagagctgtactcagtggccttgcaaa

SEQ ID NO: 15218 - DNA, 1287 bp, Homo sapiens
  source 1..1287: mol_type = unassigned DNA
gagattttggactctgtcttcagctggacactccctccctgcaccatgtcttacagttgtggcctgcccagcctgagctgccgcaccagctgctcctcccggccctgtgtgccccccagctgccacggctgcaccctgcccggggcctgcaacatccccgccaatgtgagcaactgcaactggttctgtgagggctccttcaatggcagtgagaaggagaccatgcagttcctgaacgaccgcctggccagctacctggagaaggtgcgtcagctggagcgggacaacgcggagctggagaacctcatccgggagcggtcacagcagcaggagcccttggtgtgtgccagctaccagtcctacttcaagaccattgaggagctccagcagaagatcctgtgcagcaagtctgagaatgccaggcttgtggtgcagatcgacaatgccaagctggcctcagatgacttcaggaccaaatatgagaccgagctgtccctgcggcagctggtggagtcggacatcaatggcctgcgcaggatcctggatgagctgaccctgtgcaggtctgacctggaggcccaggtggagtccctgaaggaggagctgctgtgcctcaagcagaaccatgagcaggaggttaacaccctgcgctgccagcttggagaccgcctcaacgtggaggtggacgctgctcccactgtggacctgaaccaggtcctgaatgagaccaggagtcagtatgaggccctggtggaaaccaaccgcagggaagtggagcaatggttcgccacgcagaccgaggagctgaacaagcaggtggtatccagctcggagcagctgcagtcctaccaggcggagatcatcgagctgagacgcacggtcaatgccctggagatcgagctgcaggcccagcacaacctgcgagactctctggaaaacacgctgacagagagcgaggcccgctacagctcccagctgtcccaggtgcagagactgatcaccaacgtggagtcccagctggcggagatccgcagtgacctggagcggcagaaccaggagtatcaggtgctgctggacgtgcgggcgcggctggagtgtgagatcaacacgtaccggagcctgctggagagcgaggactgcaagctcccctccaacccctgcgccacaaccaatgcatgtgacaagtccactgggccctgtatctctaatccctgtggcctacgtgctcggtgtgggccttgcaacacatttgggtactagaggccccacaaccaggaggagaagaaa

SEQ ID NO: 15219 - DNA, 1607 bp, Homo sapiens
  source 1..1607: mol_type = unassigned DNA
ggaatcaggttttgaaactgacttccagagctccactgcctccctgcaccatgccctacaacttctgcctgcccagcctgagctgccgcaccagctgctcctcccggccctgtgtgccccccagctgccacggctacaccctgcccggggcctgcaacatccctgccaatgtgagcaactgcaactggttctgcgagggctccttcaatggcagcgagaaggagactatgcagttcctgaacgaccgcctggccagctacctggagaaggtgcgtcagctggagcgggacaacgcggagctggagaacctcatccgggagcggtctcagcagcaggagcccttgctgtgccccagctaccagtcctacttcaagaccattgaggagctccagcagaagatcctgtgcagcaagtctgagaatgccaggctggtggtgcagatcgacaatgccaagctggctgcagatgacttcagaaccaagtaccagacggagcagtccctgcggcagctggtggagtccgacatcaacagcctgcgcaggattctggatgagctgaccctgtgcaggtctgacctggaggcccagatggagtccctgaaggaggagctgctgtccctcaagcagaaccatgagcaggaagtcaacaccttgcgctgccagcttggagaccgcctcaacgtggaggtggacgctgctcccgctgtggacctgaaccaggtcctgaacgagaccaggaatcagtatgaggccctggtggaaaccaaccgcagggaagtggagcaatggttcgccacgcagaccgaggagctgaacaagcaggtggtatccagctcggagcagctgcagtcctaccaggcggagatcatcgagctgagacgcacagtcaatgccctggagatcgagctgcaggcccagcacaacctgcgatactctctggaaaacacgctgacagagagcgaggcccgctacagctcccagctgtcccaggtgcagagcctgatcaccaacgtggagtcccagctggcggagatccgcagtgacctggagcggcagaaccaggagtatcaggtgctgctggacgtgcgggcgcggctggagtgtgagatcaacacataccggagcctgctggagagcgaggactgcaagctgccctccaacccctgcgccaccaccaatgcatgtgaaaagcccattggatcctgtgtcaccaatccttgtggtcctcgttcccgctgtgggccttgcaacacctttgggtactagataccctggggccagcagaagtatagcatgaagacagaactaccatcggtgggccagttctgcctctctgacaaccatcagccaccggaccccaccccgaggcatcaccacaaatcatggtctggaaggagaacaaatgcccagcgtttgggtctgactctgagcctagggctacttgatcctcctcaccccaggtccctctcctgtagtcagtctgagttctgatggtcagaggttggagctgtgacagtggcatacgaggtgttttgttctctctgctgcttctacctttattgcagttccccaaatcgcctaataaactttcctcttgcaaagcagaca

SEQ ID NO: 15220 - DNA, 1728 bp, Homo sapiens
  source 1..1728: mol_type = unassigned DNA
aaaattagctgaagcattaggaaaggaaactatgctgtatgccaagcccccacccacaattaatggtataaaaggactgcagaggaaggagagactcaaacctgcccacatccacctccagcagcttacctgcttttccattacctgttccagcaccatgtcttacagttgttgcctgcccagcctgggctgccgcaccagctgctcctcccggccctgcgtgccccccagctgccacggctacaccctgcctggggcctgcaacatccccgccaatgtgagcaactgcaactggttctgtgagggctccttcaatggcagcgagaaggagactatgcagttcctgaacgaccgcctggccagctacctggagaaggtgcgtcagctggagcgggacaacgcggagctggagaaactcatccaggagcggtcccagcagcaggagcccttgctgtgccccagctaccagtcctacttcaagaccattgaggagctccagcagaagattctgtgtgccaaggctgagaatgccaggctggtggtgaacattgacaatgccaagctggcctctgacgacttcagaagcaagtaccagacggagcagtccctgaggctgttggtggagtcggacatcaacagcatacgcaggatcctggatgagctgaccctctgcaagtctgacctggagtcccaggtggagtccctgagggaggagctgatctgcttgaagaagaaccatgaggaggaggttaacaccctgcgctcccagcttggagaccgcctcaacgtggaggtggacactgcccccactgtggacctgaaccaggtcctgaacgagaccaggagtcagtatgaggctctggtggaaattaaccgcagggaagtggagcaatggttcgccacgcagaccgaggagctgaacaagcaggtggtatccagctcagagcagctgcagtcctgccaggcggagatcatcgagctgagacgcacagtcaacgccctggagatcgagctgcaggcccagcacaacctgcgagactctctggaaaacacgctgacggagagcgaggcccactacagctcccagctgtcccaggtgcagagcctgatcaccaacgtggagtctcagctggcagagatccgctgtgacctggagcggcagaaccaggagtaccaggtgctgctggacgtgcgtgcccggctggagtgtgagatcaacacgtaccggagcctcctggagagtgaggactgcaagctcccctgcaacccatgcgccaccaccaatgctagtggcaactcctgtggaccctgtggcacctctcaaaagggttgctgtaattgaaaagcttgtatcctctttgaagacatctacaaagccatttagatcaaccacaggaaggatcctcaagtcctgacttttctggagctcagctgacatcaagaaacctcatcttgcctctatgttatttctagaatgctgaaaagctttcctgacccaagcaaagacacacatcatcaacttccaatgtctggacaactccttcctgttgagggtcgagcctgtttgtttctaaagatgttcagctccctgtaatctgagctccagttactacttaaggtgtttcctgaacgtactactgcatttcctgttttccttttttctttggcattctctggaatgcaaggaggagacttcatttacttcccaataaacttcatttctctggc

SEQ ID NO: 15221 - DNA, 1751 bp, Homo sapiens
  source 1..1751: mol_type = unassigned DNA
aaaattagctgaagcattaggaaaggaaactatgctgtatgccaagcccccacccacaattaatggtataaaaggactgcagaggaaggagagactcaaacctgcccacatccacctccagcagcttacctgcttttccattacctgttccagcaccatgtcttacagttgttgcctgcccagcctgggctgccgcaccagctgctcctcccggccctgcgtgccccccagctgccacggctacaccctgcctggggcctgcaacatccccgccaatgtgagcaactgcaactggttctgtgagggctccttcaatggcagcgagaaggagactatgcagttcctgaacgaccgcctggccagctacctggagaaggtgcgtcagctggagcgggacaacgcggagctggagaaactcatccaggagcggtcccagcagcaggagcccttgctgtgccccagctaccagtcctacttcaagaccattgaggagctccagcagaagattctgtgtgccaaggctgagaatgccaggctggtggtgaacattgacaatgccaagctggcctctgacgacttcagaagcaagtaccagacggagcagtccctgaggctgttggtggagtcggacatcaacagcatacgcaggatcctggatgagctgaccctctgcaagtctgacctggagtcccaggtggagtccctgagggaggagctgatctgcttgaagaagaaccatgaggaggaggttaacaccctgcgctcccagcttggagaccgcctcaacgtggaggtggacactgcccccactgtggacctgaaccaggtcctgaacgagaccaggagtcagtatgaggctctggtggaaattaaccgcagggaagtggagcaatggttcgccacgcagaccgaggagctgaacaagcaggtggtatccagctcagagcagctgcagtcctgccaggcggagatcatcgagctgagacgcacagtcaacgccctggagatcgagctgcaggcccagcacaacctgcgagactctctggaaaacacgctgacggagagcgaggcccactacagctcccagctgtcccaggtgcagagcctgatcaccaacgtggagtctcagctggcagagatccgctgtgacctggagcggcagaaccaggagtaccaggtgctgctggacgtgcgtgcccggctggagtgtgagatcaacacgtaccggagcctcctggagagtgaggactgcaagctcccctgcaacccatgcgccaccaccaatgctagtggcaactcctgtggaccctgtggcacctctcaaaagggttgctgtaattgaaaagcttgtatcctctttgaagacatctacaaagccatttagatcaaccacaggaaggatcctcaagtcctgacttttctggagctcagctgacatcaagaaacctcatcttgcctctatgttatttctagaatgctgaaaagctttcctgacccaagcaaagacacacatcatcaacttccaatgtctggacaactccttcctgttgagggtcgagcctgtttgtttctaaagatgttcagctccctgtaatctgagctccagttactacttaaggtgtttcctgaacgtactactgcatttcctgttttccttttttctttggcattctctggaatgcaaggaggagacttcatttacttcccaataaacttcatttctctggcataataaatgtttctcattcata

SEQ ID NO: 15222 - DNA, 1778 bp, Homo sapiens
  source 1..1778: mol_type = unassigned DNA
ctggcctcagagacctatcaattgcatctgagttgcaggggccatggcttccaaatgcctcaaggccggcttctcttctgggtctctcaagagcccaggaggggccagtgggggctccactcgtgtgtccgcaatgtactccagcagctcttgcaagcttccaagtctctcccctgtggccagaagtttctctgcctgctcagtgggtctgggcagaagcagctacagggccaccagctgcctccctgctctctgcctccctgctggaggcttcgctaccagctacagtgggggtgggggctggtttggggagggcatcctcactggcaatgagaaggagaccatgcaatccctgaacgaccgcctggccggctacctggagaaggtgcgtcagctggagcaggagaacgccagcctggagagccgcatccgtgagtggtgtgagcagcaggtcccctacatgtgccctgactaccagtcctacttccggaccatcgaggagctccagaagaagactctatgcagcaaggctgagaatgccaggctggtggtggagattgacaatgccaaattggctgcagatgacttcaggaccaagtatgagacggaggtgtccctgcggcagctggtggagtcagacatcaacggcctgcgcaggatcctggatgacctgaccctgtgcaagtctgacctggaggcccaggtggagtccctgaaggaggagctgctctgcctgaagaagaaccatgaggaggaagtgaactcactgcgctgccaacttggtgaccgcctcaatgttgaggtggacgctgccccacctgttgacctgaaccgagttctggaggagatgaggtgccagtatgaaaccctggtggagaataaccgccgggatgctgaagactggttggacacccagagtgaggagctgaaccagcaggtggtgtccagctcagagcagttgcagtcctgccaggcagagatcatcgagctgagacgcacggtcaacgccctggagattgagctgcaggctcagcacagcatgagagatgctttggaatccaccctggcagagacggaggcccgctatagctcccagctggcccagatgcagtgcatgatcaccaacgtggaggcccagctggccgagatccgggctgacctggagcggcagaaccaggagtaccaggtgctgctggacgtccgggcccggctggagtgtgagatcaacacgtaccggggcctgctggagagtgaggacagcaagctcccctgtaacccatgtgcacctgactactcaccctccaagtcatgccttccctgtcttcctgcggcctcctgcggtcctagtgcagcccgcacaaactgcagcccccgccccatttgtgtgccctgcccagggggtcggttctgagagcgggtgacccagatggccatggctattgtctccagggcttgaacttggcctctacccaaacttaacccttgtagcccaatcccctctcttcgcgcagagcccaggcccagggtctggctgaaaaggctttctgcaaatacatgccctaaagtttctcagagcctgtcacaaaggccggctgcccccaaaggtctcaactcctcatcatttcaatgggtgccagggtctctgttctcaggctgcctcctgggtcaggttttccttctaggtgctgttccggtggattctgaaatgcagtagagggcttttgttggcagaacaataaagtgcatttgctcaggcccctgatgcctaacttgcacca

SEQ ID NO: 15223 - DNA, 1670 bp, Homo sapiens
  source 1..1670: mol_type = unassigned DNA
ctggcctcagagacctatcaattgcatctgagttgcaggggccatggcttccaaatgcctcaaggccggcttctcttctgggtctctcaagagcccaggaggggccagtgggggctccactcgtgtgtccgcaatgtactccagcagctcttgcaagcttccaagtctctcccctgtggccagaagtttctctgcctgctcagtgggtctgggcagaagcagctacagggccaccagctgcctccctgctctctgcctccctgctggaggcttcgctaccagctacagtgggggtgggggctggtttggggagggcatcctcactggcaatgagaaggagaccatgcaatccctgaacgaccgcctggccggctacctggagaaggtgcgtcagctggagcaggagaacgccagcctggagagccgcatccgtgagtggtgtgagcagcaggtcccctacatgtgccctgactaccagtcctacttccggaccatcgaggagctccagaagaagactctatgcagcaaggctgagaatgccaggctggtggtggagattgacaatgccaaattggctgcagatgacttcaggaccaagtatgagacggaggtgtccctgcggcagctggtggagtcagacatcaacggcctgcgcaggatcctggatgacctgaccctgtgcaagtctgacctggaggcccaggtggagtccctgaaggaggagctgctctgcctgaagaagaaccatgaggaggaagtgaactcactgcgctgccaacttggtgaccgcctcaatgttgaggtggacgctgccccacctgttgacctgaaccgagttctggaggagatgaggtgccagtatgaaaccctggtggagaataaccgccgggatgctgaagactggttggacacccagagtgaggagctgaaccagcaggtggtgtccagctcagagcagttgcagtcctgccaggcagagatcatcgagctgagacgcacggtcaacgccctggagattgagctgcaggctcagcacagcatgagagatgctttggaatccaccctggcagagacggaggcccgctatagctcccagctggcccagatgcagtgcatgatcaccaacgtggaggcccagctggccgagatccgggctgacctggagcggcagaaccaggagtaccaggtgctgctggacgtccgggcccggctggagtgtgagatcaacacgtaccggggcctgctggagagtgaggacagcaagctcccctgtaacccatgtgcacctgactactcaccctccaagtcatgccttccctgtcttcctgcggcctcctgcggtcctagtgcagcccgcacaaactgcagcccccgccccatttgtgtgccctgcccagggggtcggttctgagagcggggtctggctgaaaaggctttctgcaaatacatgccctaaagtttctcagagcctgtcacaaaggccggctgcccccaaaggtctcaactcctcatcatttcaatgggtgccagggtctctgttctcaggctgcctcctgggtcaggttttccttctaggtgctgttccggtggattctgaaatgcagtagagggcttttgttggcagaacaataaagtgcatttgctcaggcccctgatgcctaacttgcacc

SEQ ID NO: 15224 - DNA, 1644 bp, Homo sapiens
  source 1..1644: mol_type = unassigned DNA
atggccacccagacctgcacccctaccttctccactgggtctatcaagggcctctgtggcacagcaggcggcatctctcgggtgtcctccatccgttctgtgggctcctgcagggtccccagtctcgccggtgctgcagggtacatctcttctgctaggtcgggcctctctggccttgggagctgcttgcctggctcctacctgtcttctgagtgccacacctctggctttgtggggagcgggggctggttctgcgagggctccttcaacggcagcgagaaggagactatgcagttcctgaacgaccgcctggccaactacctggagaaggtgcgtcagctggagcgggagaacgcggagctggagagccgcatccaggagtggtacgagtttcagatcccatacatctgcccagactaccagtcctacttcaagaccatcgaagatttccagcagaagatcctgctgactaagtctgagaatgccaggctggtcctgcagattgataatgccaagctggctgctgacgacttccggaccaagtatgagacagagctgtctctgcggcagctagtggaggccgacatcaacggcctgcgtaggatcctggatgagctgaccctgtgcaaggctgacctggaggctcaggtggagtccctgaaggaggagctgatgtgcctcaagaagaatcacgaggaggaagtcagtgtactccgttgccaacttggggaccgactgaatgtggaggtggacgctgctcccccagtggatctcaacaagatcctggaggatatgagatgccagtacgaggccctggtggagaataaccgcagagatgtggaggcctggttcaacacccagactgaggagctgaaccagcaggtggtgtccagctcggagcagctgcagtgctgccagacggagatcatcgagctgagacgtacggtcaacgcgctagagattgagctgcaggctcagcacagcatgcggaattccttggaatccaccctggccgaaaccgaggcccgctacagctcccagctggcccagatgcagtgcctgatcagcaacgtggaggcccagctgtctgagatccgctgcgacctggagcggcagaaccaggagtaccaggtgttactggacgtcaaggcccggctggagggcgagatcgctacctaccgccacctgctggagggagaggactgcaagcttcctccccaaccttgtgccacggcatgcaagcctgttattagagttccttctgtccccccggtgccctgtgtcccctctgtgccctgcaccccggctccccaggttggcactcagatccgcaccatcaccgaggagatcagagatgggaaagtcatctcctccagggagcacgtgcagtcccgcccgctgtgacagcccacttggtccaccagggcagggccctgaccacaggaaggaggacacccctgtggctcctggaggcttaacgaccctgcccttctctagaggggtccccctacgcttagcaggtttttctaccaaaacactccccgtattgtgtttccggacttaactgtgcttttacgccatgcaaaaccaggtttcctggaaatttacccaataaagtgtgttctcctggcatagcaaactcaa

SEQ ID NO: 15225 - DNA, 1707 bp, Homo sapiens
  source 1..1707: mol_type = unassigned DNA
gcagcttgaacttagttctcgctgagtcccggctcagggcccttcccttgggtcggggggttggctgtgcagtcaacaataaggaaaaaggcaagacactgagggcagctgaaagacttttacctttgacgagctggtcacctgctccagggaaggtacattcctctccccacaaccctagaggcacctctctggtccacagtgtccctcctgatgctcaggtcgggcctctctggccttgggagctgcttgcctggctcctacctgtcttctgagtgccacacctctggctttgtggggagcgggggctggttctgcgagggctccttcaacggcagcgagaaggagactatgcagttcctgaacgaccgcctggccaactacctggagaaggtgcgtcagctggagcgggagaacgcggagctggagagccgcatccaggagtggtacgagtttcagatcccatacatctgcccagactaccagtcctacttcaagaccatcgaagatttccagcagaagatcctgctgactaagtctgagaatgccaggctggtcctgcagattgataatgccaagctggctgctgacgacttccggaccaagtatgagacagagctgtctctgcggcagctagtggaggccgacatcaacggcctgcgtaggatcctggatgagctgaccctgtgcaaggctgacctggaggctcaggtggagtccctgaaggaggagctgatgtgcctcaagaagaatcacgaggaggaagtcagtgtactccgttgccaacttggggaccgactgaatgtggaggtggacgctgctcccccagtggatctcaacaagatcctggaggatatgagatgccagtacgaggccctggtggagaataaccgcagagatgtggaggcctggttcaacacccagactgaggagctgaaccagcaggtggtgtccagctcggagcagctgcagtgctgccagacggagatcatcgagctgagacgtacggtcaacgcgctagagattgagctgcaggctcagcacagcatgcggaattccttggaatccaccctggccgaaaccgaggcccgctacagctcccagctggcccagatgcagtgcctgatcagcaacgtggaggcccagctgtctgagatccgctgcgacctggagcggcagaaccaggagtaccaggtgttactggacgtcaaggcccggctggagggcgagatcgctacctaccgccacctgctggagggagaggactgcaagcttcctccccaaccttgtgccacggcatgcaagcctgttattagagttccttctgtccccccggtgccctgtgtcccctctgtgccctgcaccccggctccccaggttggcactcagatccgcaccatcaccgaggagatcagagatgggaaagtcatctcctccagggagcacgtgcagtcccgcccgctgtgacagcccacttggtccaccagggcagggccctgaccacaggaaggaggacacccctgtggctcctggaggcttaacgaccctgcccttctctagaggggtccccctacgcttagcaggtttttctaccaaaacactccccgtattgtgtttccggacttaactgtgcttttacgccatgcaaaaccaggtttcctggaaatttacccaataaagtgtgttctcctggcatagcaaactcaa

SEQ ID NO: 15226 - DNA, 1475 bp, Homo sapiens
  source 1..1475: mol_type = unassigned DNA
atgacctccttctacagcacctcctcatgccctctgggttgcaccatggctcctggagcaagaaatgtctttgtctctcctatcgatgttgggtgccagcctgtggcagaggccaatgctgcctccatgtgcctcttggccaacgtggcacacgccaacagagtccgtgtggggtcgactcccctgggccgccccagcctctgtctgcccccaaccagtcacactgcttgtcccttgccagggacctgtcacattcccggcaacatcggaatctgtggggcctacggcaaaaacaccctgaatggccatgagaaggagaccatgaagttcctgaatgaccgcctggccaactacctggagaaggtgcgccagctggagcaggagaatgcagagctggagaccacactcctcgagaggagcaagtgccacgagtccaccgtgtgccccgactaccagtcctacttccgtacaatcgaggagctccagcagaagatcctgtgcagcaaggctgagaatgccaggctgattgtacaaattgacaacgcgaagctggctgctgatgactttaggatcaagctggagagtgagcgctcccttcaccagctggtggaggcggacaagtgcgggacgcagaagctcctggatgacgcgaccctggccaaggccgacctggaggcccagcaggagtccctgaaggaggagcagctctccctcaagagcaaccacgagcaggaagtaaagattctgaggagtcagctgggggagaagttccggatcgagctggacattgagcccaccattgacctgaacagggtgttgggggagatgcgggctcagtacgaggccatggtggagaccaaccaccaggatgtggaacagtggttccaagcccagtctgaaggcatcagcctgcaggccatgtcctgctccgaggagctgcagtgctgccagtcggagatcctggagctgagatgcacggtgaatgccctggaggtggagcgccaagcccagcacaccttgaaggactgtctgcagaactccctgtgtgaagcggaggaccgctacggcacagagctggcccagatgcagagcctcattagcaacttggaagagcagttgtctgagatccgggccgacctggagcggcagaaccaggagtaccaggtgctgctggacgtgaaggcccggttggagaacgagattgccacataccggaaccttctggagagcgaggactgcaaactcccctgcaatccctgttccacgcctgcctcctgtacttcttgtccaagctgtggccctgtcaccggtgggtctccctctggccatggagccagcatggggagatgattctgaaggcccgagttaggagattgaggctggttgcactggggtcaggagtgccctcaccttgcccagtcttccttcaagactagactcactgaggcattttccctaaatcaaccggtagcaga

SEQ ID NO: 15227 - DNA, 1506 bp, Homo sapiens
  source 1..1506: mol_type = unassigned DNA
atgacctcttcctacagcagctcctcatgccctctgggttgcaccatggctcctggagcaagaaatgtctctgtctctcccatcgacattgggtgccagcctggggcagaggccaacattgcccccatgtgccttttggccaacgtggcacatgccaaccgagtccgtgtggggtccactcccctgggccgccccagcctctgtctgccgcctacctgccacactgcttgtcccttgccagggacctgccacattcctggcaacattggaatctgtggggcctatggtgaaaacaccctgaatggccatgagaaggagaccatgcagttcctgaatgaccgcctggccaactacctggagaaggtgcgccagctggagcaggagaatgcggagctggaggccacactcctcgagaggagcaagtgccacgagtccaccgtgtgccccgactaccagtcttacttccacaccatcgaggagctccaacagaagatcctgtgcagcaaggccgagaatgccaggctgattgtacaaattgacaatgccaagctggctgccgatgactttaggatcaagctggagagtgagcgctccctgcgccagctggtggaggcagacaagtgtgggacacagaagctcctggatgatgcgaccctggccaaggccgacctggaggcccagcaggagtccctgaaggaggagcagctctccctcaagagcaaccacgagcaggaagtaaagattctgaggagtcagctgggggagaagctccggattgagctggacattgagcccaccattgacctgaacagggtgctgggggagatgcgggctcagtatgaggccatgttggagaccaaccgccaggatgtggaacagtggttccaagcccagtctgaaggcatcagcctgcaggacatgtcctgctccgaggagctgcagtgctgccagtcggagatcctggagctgagatgcacggtgaatgccctggaggtggagcgccaagcccagcacaccttgaaggactgtctgcagaactccctgtgtgaagccgaggaccgcttcggcacggagctggcccagatgcagagcctcatcagcaacgtggaggagcagctgtctgagatccgggccgacctggagcggcaaaaccaggagtaccaggtgctgctggacgtgaagacccggctggagaatgagattgccacgtaccggaaccttctggaaagcgaggactgcaaactcccctgcaatccgtgctccacgtctccctcctgcgtgactgccccctgtgctcctcgcccaagctgtggcccctgcaccacctgtgggcccacctgtggagccagcaccaccggaagccgattctgaattcctgtggacccacaggggctggctaaggcgagggatacccaaagagagatgcttgttatacctttagaaaatctggcttctaactttctgtatgtataggcctgtccaaaggctatgagataccagggacag

SEQ ID NO: 15228 - DNA, 2576 bp, Homo sapiens
  source 1..2576: mol_type = unassigned DNA
gacttgctccggtttgcagagctaggaggtggcaggctgtgcgctcaaactcaggctgtctaactccacattctgtggggtgagaggatgggtgatggggtgtcttttctggaggagggaggtgctgtgagcctagcgagatggaggtacagtgggtgtgggcctggagcgctgggcccaggcaggggcttctgattaggaagccctggggcaccagttcaggttctcccagagagtagtgtgatgggatccagtaacctgtgccctccagatgacttctgtaggtgtgtttagtgacatgctcaacgggtgcgggaaggatgggcttgtgccaagggccaagcccagagatgtttcagatttttccctttatgcccctgcaaccaagccctgctgctccaggacatataagagacgaaggctgagggctccagcactcaccggcctgggccctgtcacttctctgatagctcccagctcgctctctgcagccatgattgccagacagcagtgtgtccgaggcgggccccggggcttcagctgtggctcggccattgtaggcggtggcaagagaggtgccttcagctcagtctccatgtctggaggtgctggccgatgctcttctgggggatttggcagcagaagcctctacaacctcagggggaacaaaagcatctccatgagtgtggctgggtcacgacaaggtgcctgctttgggggtgctggaggctttggcactggtggctttggtggtggatttgggggctccttcagtggtaagggtggccctggcttccccgtctgccccgctgggggaattcaggaggtcaccatcaaccagagcttgctcacccccctccacgtggagattgaccctgagatccagaaagtccggacggaagagcgcgaacagatcaagctcctcaacaacaagtttgcctccttcatcgacaaggtgcagttcttagagcaacagaataaggtcctggagaccaaatggaacctgctccagcagcagacgaccaccacctccagcaaaaaccttgagcccctctttgagacctacctcagtgtcctgaggaagcagctagataccttgggcaatgacaaagggcgcctgcagtctgagctgaagaccatgcaggacagcgtggaggacttcaagactaagtatgaagaggagatcaacaaacgcacagcagccgagaatgactttgtggtcctaaagaaggacgtggatgctgcctacctgaacaaggtggagttggaggccaaggtggacagtcttaatgacgagatcaacttcctgaaggtcctctatgatgcggagctgtcccagatgcagacccatgtcagcgacacgtccgtggtcctttccatggacaacaaccgcaacctggacctggacagcattattgccgaggtccgtgcccagtacgaggagattgcccagaggagcaaggctgaggctgaagccctgtaccagaccaaggtccagcagctccagatctcggttgaccaacatggtgacaacctgaagaacaccaagagtgaaattgcagagctcaacaggatgatccagaggctgcgggcagagatcgagaacatcaagaagcagtgccagactcttcaggtatccgtggctgatgcagagcagcgaggtgagaatgcccttaaagatgcccacagcaagcgcgtagagctggaggctgccctgcagcaggccaaggaggagctggcacgaatgctgcgtgagtaccaggagctcatgagtgtgaagctggccttggacatcgagatcgccacctaccgcaaactgctggagggcgaggagtacagaatgtctggagaatgccagagtgccgtgagcatctctgtggtcagcggtagcaccagcactggaggcatcagcggaggattaggaagtggctccgggtttggcctgagtagtggctttggctccggctctggaagtggctttgggtttggtggcagtgtctctggcagttccagcagcaagatcatctctaccaccaccctgaacaagagacgatagaggagacgaggtccctgcagctcactgtgtccagctgggcccagcactggtgtctctgtgcttccttcacttcacctccatcctctgtctctggggctcatcttactagtatcccctccactatcccatgggctctctctgccccaggatgatcttctgtgctgggacagggactctgcctcttggagtttggtagctacttcttgatttgggcctggtgacccacctggaatgggaaggatgtcagctgacctctcacctcccatggacagagaagaaaatgaccaggagtgtcatctccagaattattggggtcacatatgtcccttcccagtccaatgccatctcccactagatcctgtattatccatctacatcagaaccaaactacttctccaacacccggcagcacttggccctgcaagcttaggatgagaaccacttagtgtcccattctactcctctcattccctcttatccatctgcaggtgaatcttcaataaaatgcttttgtcattca

SEQ ID NO: 15229 - DNA, 2023 bp, Homo sapiens
  source 1..2023: mol_type = unassigned DNA
atgattgccagacagcagtgtgtccgaggcgggccccggggcttcagctgtggctcggccattgtaggcggtggcaagagaggtgccttcagctcagtctccatgtctggaggtgctggccgatgctcttctgggggatttggcagcaaaggtgcctgctttgggggtgctggaggctttggcactggtggctttggtggtggatttgggggctccttcagtggtaagggtggccctggcttccccgtctgccccgctgggggaattcaggaggtcaccatcaaccagagcttgctcacccccctccacgtggagattgaccctgagatccagaaagtccggacggaagagcgcgaacagatcaagctcctcaacaacaagtttgcctccttcatcgacaaggtgcagttcttagagcaacagaataaggtcctggagaccaaatggaacctgctccagcagcagacgaccaccacctccagcaaaaaccttgagcccctctttgagacctacctcagtgtcctgaggaagcagctagataccttgggcaatgacaaagggcgcctgcagtctgagctgaagaccatgcaggacagcgtggaggacttcaagactaagtatgaagaggagatcaacaaacgcacagcagccgagaatgactttgtggtcctaaagaaggacgtggatgctgcctacctgaacaaggtggagttggaggccaaggtggacagtcttaatgacgagatcaacttcctgaaggtcctctatgatgcggagctgtcccagatgcagacccatgtcagcgacacgtccgtggtcctttccatggacaacaaccgcaacctggacctggacagcattattgccgaggtccgtgcccagtacgaggagattgcccagaggagcaaggctgaggctgaagccctgtaccagaccaaggtccagcagctccagatctcggttgaccaacatggtgacaacctgaagaacaccaagagtgaaattgcagagctcaacaggatgatccagaggctgcgggcagagatcgagaacatcaagaagcagtgccagactcttcaggtatccgtggctgatgcagagcagcgaggtgagaatgcccttaaagatgcccacagcaagcgcgtagagctggaggctgccctgcagcaggccaaggaggagctggcacgaatgctgcgtgagtaccaggagctcatgagtgtgaagctggccttggacatcgagatcgccacctaccgcaaactgctggagggcgaggagtacagaatgtctggagaatgccagagtgccgtgagcatctctgtggtcagcggtagcaccagcactggaggcatcagcggaggattaggaagtggctccgggtttggcctgagtagtggctttggctccggctctggaagtggctttgggtttggtggcagtgtctctggcagttccagcagcaagatcatctctaccaccaccctgaacaagagacgatagaggagacgaggtccctgcagctcactgtgtccagctgggcccagcactggtgtctctgtgcttccttcacttcacctccatcctctgtctctggggctcatcttactagtatcccctccactatcccatgggctctctctgccccaggatgatcttctgtgctgggacagggactctgcctcttggagtttggtagctacttcttgatttgggcctggtgacccacctggaatgggaaggatgtcagctgacctctcacctcccatggacagagaagaaaatgaccaggagtgtcatctccagaattattggggtcacatatgtcccttcccagtccaatgccatctcccactagatcctgtattatccatctacatcagaaccaaactacttctccaacacccggcagcacttggccctgcaagcttaggatgagaaccacttagtgtcccattctactcctctcattccctcttatccatctgcaggtgaatcttcaataaaatgcttttgtcattca

SEQ ID NO: 15230 - DNA, 2576 bp, Homo sapiens; identical to SEQ ID NO: 15228
  source 1..2576: mol_type = unassigned DNA

SEQ ID NO: 15231 - DNA, 2310 bp, Homo sapiens
  source 1..2310: mol_type = unassigned DNA
agtcctgcttctcttccctctctcctccagcctctcacactctcctcagctctctcatctcctggaaccatggccagcacatccaccaccatcaggagccacagcagcagccgccggggtttcagtgccaactcagccaggctccctggggtcagccgctctggcttcagcagcgtctccgtgtcccgctccaggggcagtggtggcctgggtggtgcatgtggaggagctggctttggcagccgcagtctgtatggcctggggggctccaagaggatctccattggagggggcagctgtgccatcagtggcggctatggcagcagagccggaggcagctatggctttggtggcgccgggagtggatttggtttcggtggtggagccggcattggctttggtctgggtggtggagccggccttgctggtggctttgggggccctggcttccctgtgtgcccccctggaggcatccaagaggtcaccgtcaaccagagtctcctgactcccctcaacctgcaaatcgatcccaccatccagcgggtgcgggctgaggagcgtgaacagatcaagaccctcaacaacaagtttgcctccttcatcgacaaggtgcggttcctggagcagcagaacaaggttctggaaacaaagtggaccctgctgcaggagcagggcaccaagactgtgaggcagaacctggagccgttgttcgagcagtacatcaacaacctcaggaggcagctggacagcattgtcggggaacggggccgcctggactcagagctcagaggcatgcaggacctggtggaggacttcaagaacaaatatgaggatgaaatcaacaagcgcacagcagcagagaatgaatttgtgactctgaagaaggatgtggatgctgcctacatgaacaaggttgaactgcaagccaaggcagacactctcacagacgagatcaacttcctgagagccttgtatgatgcagagctgtcccagatgcagacccacatctcagacacatctgtggtgctgtccatggacaacaaccgcaacctggacctggacagcatcatcgctgaggtcaaggcccaatatgaggagattgctcagagaagccgggctgaggctgagtcctggtaccagaccaagtacgaggagctgcaggtcacagcaggcagacatggggacgacctgcgcaacaccaagcaggagattgctgagatcaaccgcatgatccagaggctgagatctgagatcgaccacgtcaagaagcagtgcgccaacctgcaggccgccattgctgatgctgagcagcgtggggagatggccctcaaggatgccaagaacaagctggaagggctggaggatgccctgcagaaggccaagcaggacctggcccggctgctgaaggagtaccaggagctgatgaatgtcaagctggccctggacgtggagatcgccacctaccgcaagctgctggagggtgaggagtgcaggctgaatggcgaaggcgttggacaagtcaacatctctgtggtgcagtccaccgtctccagtggctatggcggtgccagtggtgtcggcagtggcttaggcctgggtggaggaagcagctactcctatggcagtggtcttggcgttggaggtggcttcagttccagcagtggcagagccattgggggtggcctcagctctgttggaggcggcagttccaccatcaagtacaccaccacctcctcctccagcaggaagagctataagcactaaagtgcgtctgctagctctcggtcccacagtcctcaggcccctctctggctgcagagccctctcctcaggttgcctttcctctcctggcctccagtctcccctgctgtcccaggtagagctgggtatggatgcttagtgccctcacttcttctctctctctctataccatctgagcacccattgctcaccatcagatcaacctctgattttacatcatgatgtaatcaccactggagcttcactgttactaaattattaatttcttgcctccagtgttctatctctgaggctgagcattataagaaaatgacctctgctccttttcattgcagaaaattgccaggggcttatttcagaacaacttccacttactttccactggctctcaaactctctaacttataagtgttgtgaacccccacccaggcagtatccatgaaagcacaagtgactagtcctatgatgtacaaagcctgtatctctgtgatgatttctgtgctcttcgctgtttgcaattgctaaataaagcagatttataatacaata

SEQ ID NO: 15232 - DNA, 2109 bp, Homo sapiens
  source 1..2109: mol_type = unassigned DNA
atggccagcacatccaccaccatcaggagccacagcggcagccgcagtctgtatggcctggggggctccaagaggatctccattggagggggcagctgtgccatcagtggcggctatggcagcagagccggaggcagctatggctttggtggcgccgggagtggatttggtttcggtggtggagccggcattggctttggtctgggtggtggagccggccttgctggtggctttgggggccctggcttccctgtgtgcccccctggaggcatccaagaggtcaccgtcaaccagagtctcctgactcccctcaacctgcaaatcgatcccaccatccagcgggtgcgggctgaggagcgtgaacagatcaagaccctcaacaacaagtttgcctccttcatcgacaaggtgcggttcctggagcagcagaacaaggttctggaaacaaagtggaccctgctgcaggagcagggcaccaagactgtgaggcagaacctggagccgttgttcgagcagtacatcaacaacctcaggaggcagctggacagcattgtcggggaacggggccgcctggactcagagctcagaggcatgcaggacctggtggaggacttcaagaacaaatatgaggatgaaatcaacaagcgcacagcagcagagaatgaatttgtgactctgaagaaggatgtggatgctgcctacatgaacaaggttgaactgcaagccaaggcagacactctcacagacgagatcaacttcctgagagccttgtatgatgcagagctgtcccagatgcagacccacatctcagacacatctgtggtgctgtccatggacaacaaccgcaacctggacctggacagcatcatcgctgaggtcaaggcccaatatgaggagattgctcagagaagccgggctgaggctgagtcctggtaccagaccaagtacgaggagctgcaggtcacagcaggcagacatggggacgacctgcgcaacaccaagcaggagattgctgagatcaaccgcatgatccagaggctgagatctgagatcgaccacgtcaagaagcagtgcgccaacctgcaggccgccattgctgatgctgagcagcgtggggagatggccctcaaggatgccaagaacaagctggaagggctggaggatgccctgcagaaggccaagcaggacctggcccggctgctgaaggagtaccaggagctgatgaatgtcaagctggccctggacgtggagatcgccacctaccgcaagctgctggagggtgaggagtgcaggctgaatggcgaaggcgttggacaagtcaacatctctgtggtgcagtccaccgtctccagtggctatggcggtgccagtggtgtcggcagtggcttaggcctgggtggaggaagcagctactcctatggcagtggtcttggcgttggaggtggcttcagttccagcagtggcagagccattgggggtggcctcagctctgttggaggcggcagttccaccatcaagtacaccaccacctcctcctccagcaggaagagctataagcactaaagtgcgtctgctagctctcggtcccacagtcctcaggcccctctctggctgcagagccctctcctcaggttgcctttcctctcctggcctccagtctcccctgctgtcccaggtagagctgggtatggatgcttagtgccctcacttcttctctctctctctataccatctgagcacccattgctcaccatcagatcaacctctgattttacatcatgatgtaatcaccactggagcttcactgttactaaattattaatttcttgcctccagtgttctatctctgaggctgagcattataagaaaatgacctctgctccttttcattgcagaaaattgccaggggcttatttcagaacaacttccacttactttccactggctctcaaactctctaacttataagtgttgtgaacccccacccaggcagtatccatgaaagcacaagtgactagtcctatgatgtacaaagcctgtatctctgtgatgatttctgtgctcttcgctgtttgcaattgctaaataaagcagatttataatacaata

SEQ ID NO: 15233 - DNA, 2282 bp, Homo sapiens
  source 1..2282: mol_type = unassigned DNA
cgcctccagcctctcacactctcctaagccctctcatctcctggaaccatggccagcacatccaccaccatcaggagccacagcagcagccgccggggtttcagtgccaactcagccaggctccctggggtcagccgctctggcttcagcagcatctccgtgtcccgctccaggggcagtggtggcctgggtggcgcatgtggaggagctggctttggcagccgcagtctgtatggcctggggggctccaagaggatctccattggagggggcagctgtgccatcagtggcggctatggcagcagagccggaggcagctatggctttggtggcgccgggagtggatttggtttcggtggtggagccggcattggctttggtctgggtggtggagccggccttgctggtggctttgggggccctggcttccctgtgtgcccccctggaggcatccaagaggtcactgtcaaccagagtctcctgactcccctcaacctgcaaattgaccccgccatccagcgggtgcgggccgaggagcgtgagcagatcaagaccctcaacaacaagtttgcctccttcatcgacaaggtgcggttcctagagcagcagaacaaggttctggacaccaagtggaccctgctgcaggagcagggcaccaagactgtgaggcagaacctggagccgttgttcgagcagtacatcaacaacctcaggaggcagctggacaacatcgtgggggaacggggtcgtctggactcggagctgagaaacatgcaggacctggtggaggacctcaagaacaaatatgaggatgaaatcaacaagcgcacagcagcagagaatgaatttgtgactctgaagaaggatgtggatgctgcctacatgaacaaggttgaactgcaagccaaggcagacactcttacagatgagatcaacttcctgagagccttgtatgatgcagagctgtcccagatgcagacccacatctcagacacatccgtggtgctatccatggacaacaaccgcaacctggacctggacagcatcatcgctgaggtcaaggcccaatatgaggagattgctcagaggagcagggctgaggctgagtcctggtaccagacaaagtacgaggagctgcagatcacagcaggcagacatggggacgacctgcgcaacaccaagcaggagattgctgagatcaaccgcatgatccagaggctgagatctgagatcgaccacgtcaagaagcagtgtgccaacctacaggccgccattgctgatgctgagcagcgtggggagatggccctcaaggatgctaagaacaagctggaagggctggaggatgccctgcagaaggccaagcaggacctggcccggctgctgaaggagtaccaggagctgatgaacgtcaagctggccctggatgtggagatcgccacctaccgcaagctgctggagggcgaggagtgcaggctgaatggcgaaggcgttggacaagtcaacatctctgtagtgcagtccaccgtctccagtggctatggcggtgccagcggtgtcggcagtggcttaggcctgggtggaggaagcagctactcctatggcagtggtcttggcgttggaggcggctttagttccagcagcggcagagccactgggggtggcctcagctctgttggaggcggcagttccaccatcaagtacaccaccacctcctcctccagcaggaagagctacaagcactgaagtgctgccgccagctctcagtcccacagctctcaggcccctctctggcagcagagccctctcctcaggttgcttgtcctcccctggcctccagtctcccctgccctcccgggtagagctgggatgccctcacttttcttctcatcaatacctgttccactgagctcctgttgcttaccatcaagtcaacagttatcagcactcagacatgcgaatgtcctttttagttcccgtattattacaggtatctgagtctgccataattctgagaagaaaatgacctatatccccataagaactgaaactcagtctaggtccagctgcagatgaggagtcctctctttaattgctaaccatcctgcccattatagctacactcaggagttctcatctgacaagtcagttgtcctgatcttctcttgcagtgtccctgaatggcaagtgatgtaccttctgatgcagtctgcattcctgcactgctttctctgctctctttgccttcttttgttctgttgaataaagcatattgagaatgtgaa

SEQ ID NO: 15234 - DNA, 1723 bp, Homo sapiens
  source 1..1723: mol_type = unassigned DNA
atgctctccatatataagctgctactggagtccgattcctcgtcctgcttctcctccctctcgcctccagcctctcacactctcctaagccctctcatctcctggaaccatggccagcacatccaccaccatcaggagccacagcagcagccgccggggtttcagtgccaactcagccaggctccctggggtcagccgctctggcttcagcagcatctccgtgtcccgctccaggggcagtggtggcctgggtggcgcatgtggaggagctggctttggcagccgcagtctgtatggcctggggggctccaagaggatctccattggagggggcagctgtgccatcagtggcggctatggcagcagagccggaggcagctatggctttggtggcgccgggagtggatttggtttcggtggtggagccggcattggctttggtctgggtggtggagccggccttgctggtggctttgggggccctggcttccctgtgtgcccccctggaggcatccaagaggtcactgtcaaccagagtctcctgactcccctcaacctgcaaattgaccccgccatccagcgggtgcgggccgaggagcgtgagcagatcaagaccctcaacaacaagtttgcctccttcatcgacaaggtgcggttcctagagcagcagaacaaggttctggacaccaagtggaccctgctgcaggagcagggcaccaagactgtgaggcagaacctggagccgttgttcgagcagtacatcaacaacctcaggaggcagctggacaacatcgtgggggaacggggtcgtctggactcggagctgagaaacatgcaggacctggtggaggacctcaagaacaaagatgagatcaacttcctgagagccttgtatgatgcagagctgtcccagatgcagacccacatctcagacacatccgtggtgctatccatggacaacaaccgcaacctggacctggacagcatcatcgctgaggtcaaggcccaatatgaggagattgctcagaggagcagggctgaggctgagtcctggtaccagacaaagtacgaggagctgcagatcacagcaggcagacatggggacgacctgcgcaacaccaagcaggagattgctgagatcaaccgcatgatccagaggctgagatctgagatcgaccacgtcaagaagcagtgtgccaacctacaggccgccattgctgatgctgagcagcgtggggagatggccctcaaggatgctaagaacaagctggaagggctggaggatgccctgcagaaggccaagcaggacctggcccggctgctgaaggagtaccaggagctgatgaacgtcaagctggccctggatgtggagatcgccacctaccgcaagctgctggagggcgaggagtgcaggctgaatggcgaaggcgttggacaagtcaacatctctgtagtgcagtccaccgtctccagtggctatggcggtgccagcggtgtcggcagtggcttaggcctgggtggaggaagcagctactcctatggcagtggtcttggcgttggaggcggctttagttccagcagcggcagagccactgggggtggcctcagctctgttggaggcggcagttccaccatcaagtacaccaccacctcctcctccagcaggaagagctacaagcactgaagtgctgccgccagctctcagtcccacagctctcaggcc

SEQ ID NO: 15235 - DNA, 2289 bp, Homo sapiens
  source 1..2289: mol_type = unassigned DNA
cgcctccagcctccaacgctcgccacagccctctcatctcctggaaccatggccagcacatccaccaccatcaggagccacagcagcagccgccggggtttcagtgccaactcagccaggctccctggggtcagccgctctggcttcagcagcatctccgtgtcccgctccaggggcagtggtggcctgggtggtgcatgtggaggagctggctttggcagccgcagtctgtatggcctggggggctccaagaggatctccattggagggggcagctgtgccatcagtggcggctatggcagcagagccggaggcagctatggctttggtggcgccgggagtggatttggtttcggtggtggagccggcattggctttggtctgggtggtggagccggccttgctggtggctttgggggccctggcttccctgtgtgcccccctggaggcatccaagaggtcaccgtcaaccagagtctcctgactcccctcaacctgcaaattgaccccgccatccagcgggtgcgggccgaggagcgtgagcagatcaagaccctcaacaacaagtttgcctccttcatcgacaaggtgcggttcctagagcagcagaacaaggttctggacaccaagtggaccctgctgcaggagcagggcaccaagactgtgaggcagaacctggagccgttgttcgagcagtacatcaacaacctcaggaggcagctggacagcatcgtcggggaacggggccgcctggactcggagctgagaaacatgcaggacctggtggaggacctcaagaacaaatatgaggatgaaatcaacaagcgcacagcagcagagaatgaatttgtgactctgaagaaggatgtggatgctgcctacatgaacaaggttgaactgcaagccaaggcagacactctcacagatgagatcaacttcctgagagccttgtatgatgcagagctgtcccagatgcagacccacatctcagacacatccgtggtgctatccatggacaacaaccgcaacctggacctggacagcatcatcgctgaggtcaaggcccaatacgaggagattgctcagaggagccgggctgaggctgagtcctggtaccagaccaagtacgaggagctgcaggtcacagcaggcagacatggggacgacctgcgcaacaccaagcaggagattgctgagatcaaccgcatgatccagaggctgagatctgagatcgaccatgtcaagaagcagtgtgccagcctgcaggctgccattgctgatgctgagcagcgtggggagatggcactcaaggatgctaagaacaagctggaagggctggaggatgccctgcagaaggccaagcaggacctggcccggctgctgaaggagtaccaggagctgatgaatgtcaagctggccctggatgtggagatcgccacctaccgcaagctgctggagggcgaggagtgcaggctgaatggcgaaggcgttggacaagtcaacgtctctgtagtacagtccaccatctccagtggctatggcggtgccagcggtgtcggcagtggcttaggcctgggtggaggaagcagctactcctatggcagtggtcttggcattggaggtggcttcagttccagcagtggcagagccattgggggtggcctcagctctgttggaggcggcagttccaccatcaagtacaccaccacctcctcctccagcaggaagagctacaagcactaaagtgctgcctccagctctcggtcccacagtcctcaggcccttctctggctgcagagccgtctcctcaggttgcctatcctctcctggcctctagtcttccctgctctccgaggtagagctgggtatggatgcttagtgccctcacttctctctgtctatacctgccccatctgagcacccattgctcaccatcagatcaacctttgattttacatcataatgtattcaccaatggagcttcactttgttactaaattattaatttcttgcctccaaaattgttctctctgaggctgagcattataagaaaatgatctctgttccttttcattactgaaaatcgcctggggcttatttcagaacaacttccacttattttccattggcccccaaactccctaagttaaaagtattgtgaacccccgccccgcagtatgcatggaagcacaagtgactagtcgtatgatgtacacagtctttctccctgtgatgatttctctgctctttgctctttgtaatttctaaataaagcaggttttagaataa

SEQ ID NO: 15236 - DNA, 2189 bp, Homo sapiens
  source 1..2189: mol_type = unassigned DNA
atggccagcacatccaccaccatcaggagccacagcagcagccgctctggcttcagcagcatctccgtgtcccgctccaggggcagtggtggcctgggtggtgcatgtggaggagctggctttggcagccgcagtctgtatggcctggggggctccaagaggatctccattggagggggcagctgtgccatcagtggcggctatggcagcagagccggaggcagctatggctttggtggcgccgggagtggatttggtttcggtggtggagccggcattggctttggtctgggtggtggagccggccttgctggtggctttgggggccctggcttccctgtgtgcccccctggaggcatccaagaggtcaccgtcaaccagagtctcctgactcccctcaacctgcaaattgaccccgccatccagcgggtgcgggccgaggagcgtgagcagatcaagaccctcaacaacaagtttgcctccttcatcgacaaggtgcggttcctagagcagcagaacaaggttctggacaccaagtggaccctgctgcaggagcagggcaccaagactgtgaggcagaacctggagccgttgttcgagcagtacatcaacaacctcaggaggcagctggacagcatcgtcggggaacggggccgcctggactcggagctgagaaacatgcaggacctggtggaggacctcaagaacaaatatgaggatgaaatcaacaagcgcacagcagcagagaatgaatttgtgactctgaagaaggatgtggatgctgcctacatgaacaaggttgaactgcaagccaaggcagacactctcacagatgagatcaacttcctgagagccttgtatgatgcagagctgtcccagatgcagacccacatctcagacacatccgtggtgctatccatggacaacaaccgcaacctggacctggacagcatcatcgctgaggtcaaggcccaatacgaggagattgctcagaggagccgggctgaggctgagtcctggtaccagaccaagtacgaggagctgcaggtcacagcaggcagacatggggacgacctgcgcaacaccaagcaggagattgctgagatcaaccgcatgatccagaggctgagatctgagatcgaccatgtcaagaagcagtgtgccagcctgcaggctgccattgctgatgctgagcagcgtggggagatggcactcaaggatgctaagaacaagctggaagggctggaggatgccctgcagaaggccaagcaggacctggcccggctgctgaaggagtaccaggagctgatgaatgtcaagctggccctggatgtggagatcgccacctaccgcaagctgctggagggcgaggagtgcaggctgaatggcgaaggcgttggacaagtcaacgtctctgtagtacagtccaccatctccagtggctatggcggtgccagcggtgtcggcagtggcttaggcctgggtggaggaagcagctactcctatggcagtggtcttggcattggaggtggcttcagttccagcagtggcagagccattgggggtggcctcagctctgttggaggcggcagttccaccatcaagtacaccaccacctcctcctccagcaggaagagctacaagcactaaagtgctgcctccagctctcggtcccacagtcctcaggcccttctctggctgcagagccgtctcctcaggttgcctatcctctcctggcctctagtcttccctgctctccgaggtagagctgggtatggatgcttagtgccctcacttctctctgtctatacctgccccatctgagcacccattgctcaccatcagatcaacctttgattttacatcataatgtattcaccaatggagcttcactttgttactaaattattaatttcttgcctccaaaattgttctctctgaggctgagcattataagaaaatgatctctgttccttttcattactgaaaatcgcctggggcttatttcagaacaacttccacttattttccattggcccccaaactccctaagttaaaagtattgtgaacccccgccccgcagtatgcatggaagcacaagtgactagtcgtatgatgtacacagtctttctccctgtgatgatttctctgctctttgctctttgtaatttctaaataaagcaggtttt

SEQ ID NO: 15237 - DNA, 2265 bp, Homo sapiens
  source 1..2265: mol_type = unassigned DNA
acaaccagcagaaccttttgggattttgccttcctccctcctgcatctgagctttgtctccaccagcaacatgagccgccaattcacctgcaagtcgggagctgccgccaaggggggcttcagtggctgctcagctgtgctctcagggggcagctcatcctccttccgggcagggagcaaagggctcagtgggggctttggcagccggagcctctacagcctggggggtgtccggagcctcaatgtggccagtggcagcgggaagagtggaggctatggatttggccggggccgggccagtggctttgctggaagcatgtttggcagtgtggccctggggcctgtgtgcccaactgtatgcccacctggaggcatccaccaggttaccgtcaatgagagcctcctggcccccctcaacgtggagctggaccccgagatccagaaagtgcgtgcccaggagcgagagcagatcaaggctctgaacaacaagttcgcctccttcatcgacaaggtgcggttcctggagcagcagaaccaggtactggagaccaagtgggagctgctgcagcagctggacctgaacaactgcaagaacaacctggagcccatcctcgagggctacatcagcaacctgcggaagcagctggagacgctgtctggggacagggtgaggctggactcggagctgaggaatgtgcgggacgtagtggaggactacaagaagaggtatgaggaggaaatcaacaagcggacagcagcagagaacgagtttgtgctgctcaagaaggatgtggatgctgcttacgccaataaggtggaactgcaggccaaggtggaatccatggaccaggagatcaagttcttcaggtgtctctttgaagccgagatcactcagatccagtcccacatcagtgacatgtctgtcatcctgtccatggacaacaaccggaacctagacctggacagcatcattgacgaagtccgcacccagtatgaggagattgccttgaagagtaaggccgaggctgaggccctgtaccagaccaagttccaagagcttcagctggcagctggcaggcatggggacgacctcaaaaacaccaagaatgaaatctcggagctcactcggctcatccagagaatccgctcagagatcgagaacgtgaagaagcaggcttccaacctggagacagccatcgctgatgctgagcagcggggagacaacgccctgaaggatgcccgggccaagctggacgagctggagggcgccctgcaccaggccaaggaggagctggcgcggatgctgcgcgagtaccaggagctcatgagcctgaagctggccctggacatggagatcgccacctatcgcaagctactggagagcgaggagtgcaggatgtcaggagaatttccctcccctgtcagcatctccatcatcagcagcaccagtggcggcagtgtctatggcttccggcccagcatggtcagcggtggctatgtggccaacagcagcaactgcatctctggagtgtgcagcgtgagaggcggggagggcaggagccggggcagtgccaacgattacaaagacaccctagggaagggttccagcctgagtgcaccctccaagaaaaccagtcggtagagaagactgccccgggccccgcctcattccatgacccggctctggatcccacactgtacttcccacagcccactctcagctccatctccaccctgctggtcctgctcccatacacctggcactggccttggccacccacttctcccagcctgtgtcttcctgatcctgggaaggcctggatgaccaagcttggtgaaattcctccctgtacacaccctattaactccttggctgtggtcccccagctacaccaccagcccaggtcctggctgccagctttcctcctctgcccggcctctagcgcagtcgctaactactctgctgggctccctgggtctctgcccaaggccccgcacacactgggacctagcatagttcctgcctatgccaggagctggctctgtgtttaagaaaaggaggactgaaggacaaacaaccaagagtggcccagtccccacccccacatctagctcagtctcaaatctgagtgggaccaagtgcaattcagggcctttttctccactcacctgcacccagaagcagagaaaagcaggcactgttcacttttcctttattcttaatggccttcctctgttgcaacctcaataaacagcacaatctca

SEQ ID NO: 15238 - DNA, 2015 bp, Homo sapiens
  source 1..2015: mol_type = unassigned DNA
atttaaggggcgagctgggccgagaacgcagcggctgtttgcgccccttctgcctcccgcgcggccagcaccggtacttgcgagccatgagccgccaactgacccatttcccccgcggggagcgcctgggcttcagcggttgctccgcggtcctctctggcgggatcggcagcagctccgcctcattccgggcccgggtcaagggctcggcctcctttggcagcaagagcctctcctgccttgggggcagccgaagcctggcgctcagcgctgctgcacggcggggcggcggccgcctgggcggcttcgtgggcaccgccttcggcagcgccgggctggggcccaagtgtccctccgtgtgcccacccgggggcatccctcaggtcaccgtcaacaagagcctcctggccccgctcaacgtggagatggaccccgagatccagagggtgcgcgcccaggagcgggagcagatcaaggcgctaaacaacaagttcgcctccttcatcgacaaggtgcggttcctggagcagcagaatcaggtgctagagaccaagtggaacctcctacagcagctggacttgaacaactgcaggaagaacctggagcccatttatgagggctacatcagcaacctgcagaagcagctggagatgctgtctggggacggggtgaggctggattcggagctgaggaacatgcaggatttggtggaggactacaagaagaggtatgaggtggagattaacagacgcacagctgctgagaatgagtttgtggtgctcaagaaggacgtggatgctgcttacatgaataaggttgagctccaggccaaggtggactccttgacagatgagattaaattcttcaagtgcctttatgaaggggagatcactcagatccagtcccacatcagcgacacgtccatcgtcctgtcaatggacaacaaccgggatctggacctggacagcatcattgccgaggtccgtgcccagtacgaggagattgccctaaagagcaaggccgaggctgagaccctgtaccagaccaagatccaggagctgcaggtcacagcaggccagcatggggatgacctcaagctcaccaaggctgaaatctctgagctcaaccgcctgatccagaggatccgctcagagatagggaatgtgaagaagcagtgtgccgatctggagacggccatcgccgacgctgaacagcggggggactgcgccctgaaagatgcccgggccaagctggatgagctggagggcgccctgcaccaggccaaggaggagctggcacggatgctgcgtgagtaccaggagctcgtgagcctgaagctggccctggatatggagatcgccacctaccgcaagctgctggagagcgaggagtgcaggatgtctggcgaatatccaaattctgtgagcatctccgtcatcagcagcaccaatgctggggcaggaggggctggcttcagcatgggctttggcgcctcaagcagttatagctacaaaactgcagctgcagacgtcaagaccaaaggcagctgtggcagtgagctcaaggatccccttgccaaaacctcggggagcagctgtgccaccaaaaaggcctccagatgatggacaagtggttggctctgtgagcagaaggcttcccaactcacccgtctcctccctctccttccctgggctccctttccaagtcaagaaatgctttgtctgtcactacagtcccaaccccatttcctctccctgttgtcctcaaggtgtgatgcttcgatgcaaggagtccagtcaggagctctctcagtggcctccttcttggtcccgtttcgttgggtcattgcctgaaatgcaaagacaacacttacccaggatgtttccccaaggccagctacaagcccctctgcccccatgcctttcttgggccttcactaccaagggactctcttcatcttctgattgggattgtgtccagtcctctgcttcttctgcaataaatgattaaatctg

SEQ ID NO: 15239 - DNA, 1764 bp, Homo sapiens
  source 1..1764: mol_type = unassigned DNA
atttaaggggcgagctgggccgagaacgcagcggctgtttgcgccccttctgcctcccgcgcggccagcaccggtacttgcgagccatgagccgccaactgacccatttcccccgcggggagcgcctgggcttcagcggttgctccgcggtcctctctggcgggatcggcagcagctccgcctcattccgggcccgggtcaagggctcggcctcctttggcagcaagagcctctcctgccttgggggcagccgaagcctggcgctcagcgctgctgcacggcggggcggcggccgcctgggcggcttcgtgggcaccgccttcggcagcgccgggctggggcccaagtgtccctccgtgtgcccacccgggggcatccctcaggtcaccgtcaacaagagcctcctggccccgctcaacgtggagatggaccccgagatccagagggtgcgcgcccaggagcgggagcagatcaaggcgctaaacaacaagttcgcctccttcatcgacaaggtgcggttcctggagcagcagaatcaggtgctagagaccaagtggaacctcctacagcagctggacttgaacaactgcaggaagaacctggagcccatttatgagggctacatcagcaacctgcagaagcagctggagatgctgtctggggacggggtgaggctggattcggagctgaggaacatgcaggatttggtggaggactacaagaagaggtatgaggtggagattaacagacgcacagctgctgagaatgagtttgtggtgctcaagaaggacgtggatgctgcttacatgaataaggttgagctccaggccaaggtggactccttgacagatgagattaaattcttcaagtgcctttatgaaggggagatcactcagatccagtcccacatcagcgacacgtccatcgtcctgtcaatggacaacaaccgggatctggacctggacagcatcattgccgaggtccgtgcccagtacgaggagattgccctaaagagcaaggccgaggctgagaccctgtaccagaccaagtgtgccgatctggagacggccatcgccgacgctgaacagcggggggactgcgccctgaaagatgcccgggccaagctggatgagctggagggcgccctgcaccaggccaaggaggagctggcacggatgctgcgtgagtaccaggagctcgtgagcctgaagctggccctggatatggagatcgccacctaccgcaagctgctggagagcgaggagtgcaggatgtctggcgaatatccaaattctgtgagcatctccgtcatcagcagcaccaatgctggggcaggaggggctggcttcagcatgggctttggcgcctcaagcagttatagctacaaaactgcagctgcagacgtcaagaccaaaggcagctgtggcagtgagctcaaggatccccttgccaaaacctcggggagcagctgtgccaccaaaaaggcctccagatgatggacaagtggttggctctgtgagcagaaggcttcccaactcacccgtctcctccctctccttccctgggctccctttccaagtcaagaaatgctttgtctgtcactacagtcccaaccccatttcctctccctgttgtcctcaaggtgtgatgcttcgatgcaaggagtccagtcaggagctctctcagtggcctccttcttggtcccgtttcgttgggtcattgcctgaaatgcaaagacaacacttacccaggatgtttccccaa

SEQ ID NO: 15240 - DNA, 1679 bp, Homo sapiens
  source 1..1679: mol_type = unassigned DNA
tttcccccgcggggagcgcctgggcttcagcggttgctccgcggtcctctctggcgggatcggcagcagctccgcctcattccgggcccgggtcaagggctcggcctcctttggcagcaagagcctctcctgccttgggggcagccgaagcctggcgctcagcgctgctgcacggcggggcggcggccgcctgggcggcttcgtgggcaccgccttcggcagcgccgggctggggcccaagtgtccctccgtgtgcccacccgggggcatccctcaggtcaccgtcaacaagagcctcctggccccgctcaacgtggagatggaccccgagatccagagggtgcgcgcccaggagcgggagcagatcaaggcgctaaacaacaagttcgcctccttcatcgacaagaaaacaccagcatttatagcatgagaagctacctctgtctcatgaaaactcactgaggcagaggcagatggtaccattgcttaagccctcttcctgattccatatagaccgggtcctatttcttgtcttggagatccaggtgcggttcctggagcagcagaatcaggtgctagagaccaagtggaacctcctacagcagctggacttgaacaactgcaggaagaacctggagcccatttatgagggctacatcagcaacctgcagaagcagctggagatgctgtctggggacggggtgaggctggattcggagctgaggaacatgcaggatttggtggaggactacaagaagaggtatgaggtggagattaacagacgcacagctgctgagaatgagtttgtggtgctcaagaaggacgtggatgctgcttacatgaataaggttgagctccaggccaaggtggactccttgacagatgagattaaattcttcaagtgcctttatgaaggggagatcactcagatccagtcccacatcagcgacacgtccatcgtcctgtcaatggacaacaaccgggatctggacctggacagcatcattgccgaggtccgtgcccagtacgaggagattgccctaaagagcaaggccgaggctgagaccctgtaccagaccaagatccaggagctgcaggtcacagcaggccagcatggggatgacctcaagctcaccaaggctgaaatctctgagctcaaccgcctgatccagaggatccgctcagagatagggaatgtgaagaagcagtgtgccgatctggagacggccatcgccgacgctgaacagcggggggactgcgccctgaaagatgcccgggccaagctggatgagctggagggcgccctgcaccaggccaaggaggagctggcacggatgctgcgtgagtaccaggagctcgtgagcctgaagctggccctggatatggagatcgccacctaccgcaagctgctggagagcgaggagtgcaggatgtctggcgaatatccaaattctgtgagcatctccgtcatcagcagcaccaatgctggggcaggaggggctggcttcagcatgggctttggcgcctcaagcagttatagctacaaaactgcagctgcagacgtcaagaccaaaggcagctgtggcagtgagctcaaggatccccttgccaaaacctcggggagcagctgtgccaccaaaaaggcctccagatgatggacaagtggttggctctgtgag

SEQ ID NO: 15241 - DNA, 1813 bp, Homo sapiens
  source 1..1813: mol_type = unassigned DNA
acttgcgagccatgagccgccaactgacccatttcccccgcggggagcgcctgggcttcagcggttgctccgcggtcctctctggcgggatcggcagcagctccgcctcattccgggcccgggtcaagggctcggcctcctttggcagcaagagcctctcctgccttgggggcagccgaagcctggcgctcagcgctgctgcacggcggggcggcggccgcctgggcggcttcgtgggcaccgccttcggcagcgccgggctggggcccaagtgtccctccgtgtgcccacccgggggcatccctcaggtcaccgtcaacaagagcctcctggccccgctcaacgtggagatggaccccgagatccagagggtgcgcgcccaggagcgggagcagatcaaggcgctaaacaacaagttcgcctccttcatcgacaaggtgcggttcctggagcagcagaatcaggtgctagagaccaagtggaacctcctacagcagctggacttgaacaactgcaggaagaacctggagcccatttatgagggctacatcagcaacctgcagaagcagctggagatgctgtctggggacggggtgaggctggattcggagctgaggaacatgcaggatttggtggaggactacaagaagaggtatgaggtggagattaacagacgcacagctgctgagaatgagtttgtggtgctcaagaaggacgtggatgctgcttacatgaataaggttgagctccaggccaaggtggactccttgacagatgagattaaattcttcaagtgcctttatgaaggggagatcactcagatccagtcccacatcagcgacacgtccatcgtcctgtcaatggacaacaaccgggatctggacctggacagcatcattgccgaggtccgtgcccagtacgaggagattgccctaaagagcaaggccgaggctgagaccctgtaccagaccaagatccaggagctgcaggtcacagcaggccagcatggggatgacctcaagctcaccaaggctgaaatctctgagctcaaccgcctgatccagaggatccgctcagagatagggaatgtgaagaagcagtgtgccgatctggagacggccatcgccgacgctgaacagcggggggactgcgccctgaaagatgcccgggccaagctggatgagctggagggcgccctgcaccaggccaaggaggagctggcacggatgctgcgtgagtaccaggagctcgtgagcctgaagctggccctggatatggagatcgccacctaccgcaagctgctggagagcgaggagtgcaggatgtctggcgaatatccaaattctgtgagcatctccgtcatcagcagcaccaatgctggggcaggaggggctggcttcagcatgggctttggcgcctcaagcagttatagctacaaaactgcagctgcagacgtcaagaccaaaggcagctgtggcagtgagctcaaggatccccttgccaaaacctcggggagcagctgtgccaccaaaaaggcctccagatgatggacaagtggttggctctgtgtgatgcttcgatgcaaggagtccagtcaggagctctctcagtggcctccttcttggtcccgtttcgttgggtcattgcctgaaatgcaaagacaacacttacccaggatgtttccccaaggccagctacaagcccctctgcccccatgcctttcttgggccttcactaccaagggactctcttcatcttctgattgggattgtgtccagtcctctgcttcttctgcaataaatgattaaatctg

SEQ ID NO: 15242 - DNA, 2284 bp, Homo sapiens
  source 1..2284: mol_type = unassigned DNA
tcagcatcttatccccactttctggcctccccaccatgagccgccaattcacctacaagtcgggagctgctgccaaggggggcttcagcggctgctccgctgtgctctcagggggcagctcatcctcctaccgagcagggggcaaagggctcagtggaggcttcagcagtcggagcctttacagcctggggggtgcccggagcatctctttcaatgtggccagtggcagtgggtgggcaggaggctatggatttggccggggccgggccagtggctttgctggcagcatgtttggcagtgtggccttggggtccgtgtgtccgtcgttgtgcccgcccgggggtatccatcaggtcaccatcaacaagagcctcctggcacccctgaacgtggagctggaccctgaaatccagaaagtgcgtgcccaggagcgggagcagatcaaggtgctgaacaacaagttcgcctccttcattgacaaggtgcggttcctggagcagcagaaccaggtgctggagaccaagtgggagctgctacagcagctggacctgaacaactgcaagaataacctggagcccatccttgagggctacatcagcaacctgcggaagcagctggagacgctgtctggggacagggtgaggctggactcggagctgaggagcgtgcgcgaagtggtggaggactacaagaagaggtatgaagaagaaataaacaagcgcacaactgctgagaatgaatttgtggtgcttaagaaggacgtggacgcagcttacacgagcaaagtggagctgcaggccaaggtggatgccctggatggagaaatcaagttcttcaagtgtctgtacgagggggagactgctcagatccagtcccacatcagcgacacgtccatcatcctgtccatggacaacaaccggaacctggacctggacagcatcattgctgaggtccgtgcccagtatgaggagatcgcccggaagagcaaggccgaggccgaggccctgtaccagaccaagttccaggagctgcagctagcagccggccggcatggggatgacctgaaacacaccaaaaatgagatctcagagctgacccgtctcatccaaagactgcgctcggagattgagagtgtgaagaagcagtgtgccaacctggagacggccatcgctgacgccgagcagcggggggactgtgccctcaaggatgccagggccaagctggatgagctggagggcgccctgcagcaggccaaggaggagctggcacggatgctgcgcgagtaccaagagcttttgagcgtgaagctgtccctggatattgagatcgccacctaccgcaagctgctggagggcgaggagtgcaggatgtccggagaatataccaactccgtgagcatttcggtcatcaacagctccatggccgggatggcaggcacaggggctggctttggattcagcaatgctggcacctacggctactggcccagctctgtcagcgggggctacagcatgctgcctgggggctgtgtcactggcagtgggaactgtagcccccgtggggaagccaggaccaggctggggagtgcaagtgaattcagggactcccagggaaagaccttagctctaagctcacccaccaaaaaaaccatgagataaaagtgcaacacagcccatttcccagtagtctgccttgccctggcagactgctccggactcttctaggaaattcctctgtctcatttgtcctcatctccttcttgctttgctttgctgtggacctctcctccttctccttgacctctctgcctcagtctttgttaatgttgaatcaggatttgagagctggagcccatctttctgcctccatccaaagaggccttttaactcagcctccccttctggaagaagacttggccttttctctgcctgcatgtccctgtgcagaggaaggctgtctctcaagggtaaccccaatctgcctgtgctgctctttcataccctgtctcagtaactatttggccatgtgctccctgggtacacaagttttcagatctactgatagacctgcaggaactctctcatgttagagcaatactggctcaggcaaaacacctggtgggaagttgtatcttgtatagccactgcatattacatagccaggagtaccccttgaggctaattctaccaaccaagggatttgtgctcttcatctgtgggtacttgtccttgtttaggcctcacctccctgctcctgtgtcttaccaataaacttataaagccca

SEQ ID NO: 15243 - DNA, 2788 bp, Homo sapiens
  source 1..2788: mol_type = unassigned DNA
ccttggagactgcttttctccagctctgtcaactcaacctttcccaccatgagtcggcaactgaacatcaagtccagtggtgacaagggcaacttcagtgtgcattcggcagtggtgccaaggaaggctgtgggtagcctggcttcttactgtgcagctggcagaggggctggcgctggctttggcagtcggagcctctatagccttggagggaatcggcgtatttctttcaatgtggctggtggcggcgttcgggctggaggttacggcttcaggcctggctctgggtatggagggggccgggccagtggctttgctggcagtatgtttggcagtgtggccctggggcctgcatgtttgtctgtgtgcccacctgggggcatccaccaggtcactgtcaacaagagcctcttggcccccctcaacgtggagctggaccctgagatccagaaggtgcgcgcccaggagcgggaacagatcaaggtgctgaacgacaagttcgcctccttcattgacaaggtacgcttcctagagcagcagaaccaggttctagaaaccaagtgggagctgctgcagcagctggacctgaacaactgcaagaagaacctggagcccatccttgagggctacatcagcaacctgcggaagcagctggagacactgtctggggacagggtgaggctggactcggagctgagaagcatgagggatctggtggaggactataagaagagatatgaagtggagattaaccggcgcacgacagcagagaatgagtttgtggtgcttaagaaggatgcagatgcagcctacgcagtcaaggtggagcttcaggccaaagtggactcactggacaaagaaatcaagttcctcaagtgtctgtatgatgcagagatcgctcagatccagactcacgccagtgagacctctgtcatcctgtccatggacaacaaccgggacctggaccttgacagcatcatcgctgaggtccgcatgcattatgaggagatcgccctgaagagcaaggccgaggccgaggccctgtaccagaccaagatccaggagctgcagctggcagccagtcggcatggtgacgacctgaaacacaccaggagcgagatggtggagctgaaccggctcatccagaggatccggtgtgagatcgggaatgtgaagaagcagcgtgccagcctggagacggccatcgctgacgctgagcagcggggagacaatgccctgaaggatgcccaggccaagctggatgagctggagggcgccctgcaccaggccaaggaggagctggcgcggatgctgcgcgagtaccaggagctcatgagcctgaaactggccctggacatggagattgccacctaccgcaagctgctggagggcgaggagtgcaggatgtctggtgagaatccatcctctgtgagcatctctgtcatcagcagtagcagctacagctaccaccaccccagctctgcgggtgttgaccttggggccagcgctgtggcaggcagctctggcagcacccagagcgggcagaccaagaccacagaggcgcgagggggagacctcaaggacacccagggcaagagcaccccagccagcatcccagcaaggaaagccacccgctagacccatggcctcacccacctcagcacttggaagaagaggtgactttgccacccccaaaggtgtctgccacacccaagttcccaggccctgagttttaaaactgtctgtagtacactcaactgtctgcatcgtggtttagcttttactttcaagctctgattgacacagtcaccttccctgtttccttaggtcccatgtggactaacgacttctcattttcctcgctgcctttggctggcaggaggctttggaggcacaagccattataaccttcttggccctaaggaagctgtgatcatccctagaaagagggaaggagcaggagacgacaggggaggggctggtttgttctgtgcttaggccaagttagctactgtctgagaggttttacatcccctgccagcatggtggggtgacacgagacctgtaagcaggtggtgagaagttagacagcctttacttgctccatcagaaacaactttgcaggatgacgccaatatttaggacaccacgtgtacatctgtagaccaccagctgcacccatctccacaaagccaagtgaaggtgtattggggattctctgccagcctgtgtcacccacccacctccttcattatcagcaatagctaccatcatttgtcaagcacctactagatgccagacaccctacacatattgcctcctgttctcatccattcctgcaaagaagatgcaatgagcatccttggaacagactgggagcctgatcccaagaggctgctgaactggccccagtcacccacctatgtgccagagtcaggcctggccgacacaaggatctatgctttttctgtggtgtgtcactgcctttttaacaaaagggctgtcaaagtcaccattctttttgatgagggcagcgtaattacattgccttttgtcaggactgtgggtatgtgatttgtcttccacagtctctctggggctgtgtcctacatagcttctgactctcaatttttggtgccatgagctgagctcagtgagtggagctggcttttctgtcgctgagtgctactgcctagtccagatgtcgtggctcagggtgtaaatattcctaagaatggcagcatctatttcctcttttgtttgaattaaagactctgaatttctgctg

SEQ ID NO: 15244 - DNA, 2324 bp, Homo sapiens
  source 1..2324: mol_type = unassigned DNA
agccagtggcccttacaccatttcccgagggatgccgagtgtgagctcagggttggcggatgcccagggaatgccatcagaaggccctctccactagcagtgccccgcccccacaggatgctcataaaagccacgagaccagggctctccagccacctgtcttctccactgcctgtaccagcccacctcaggtgccttctcgccggccttcctcacccaccatgtctcggcagtcctccatcaccttccagtctggcagccgcaggggcttcagcaccacctcggccatcaccccggcagctggccgctcccgcttcagctctgtctctgtggcccgctctgcagcagggagtgggggcctgggaaggatcagcagtgctggggccagctttggaagccgcagcctctacaacctggggggtgccaagcgggtctccatcaatgggtgtggcagcagctgccgaagtggctttggtggcagggccagcaacaggtttggagtcaacagtggatttggctatgggggtggagttggaggaggcttcagtggccccagcttccccgtgtgtccccctggaggcatccaagaggtcactgtcaaccagagtctcctgactcctcttcacctgcaaatcgaccccaccatccagcgggtgcgggccgaggagcgcgagcagatcaagaccctcaacaataagttcgcctccttcatcgacaaggtgaggttcttggagcagcagaacaaggtcctggagaccaagtgggccctcctgcaggagcagggctccaggactgtgaggcagaacctagagcccctctttgattcctataccagtgagctccgacggcagctggaaagcatcaccaccgagaggggcaggcttgaagctgaactgaggaacatgcaggatgttgtggaagatttcaaagtcaggtacgaagatgaaattaacaagcgcacagctgctgagaatgaatttgtagccctgaaaaaggacgtagatgctgcctatatgaacaaggtggagctggaagccaaggtcaaatctctgcccgaggagatcaacttcatccactcagtctttgatgcagagctgtcccagttgcagacccaggtcggtgacacatccgtggtgctgtccatggacaacaaccgcaacctggacctggatagtatcatcgccgaggtcaaagcacaatacgaggacattgccaaccgcagccgggccgaggctgagtcctggtaccagaccaagtacgaggagctgcaggtcaccgcaggcagacatggggatgaccttcgaaacaccaaacaagagatctctgaaatgaaccgcatgatccagaggctgagagctgagattgacagcgtcaagaagcagtgttccagcttgcaaacggccattgctgatgcagagcagcggggagaactggctctcaaggatgcacgggccaagctggtggaccttgaggaggccctgcagaaggccaagcaggacatggctcggctcctgcgtgagtaccaggagctgatgaacatcaagctggccctggacgtggagatcgccacctaccgcaagctgctggaaggcgaggagtgcaggttgagtggagagggagtttctccagttaacatttctgtggtcacctctactctttccagtggctatggaagcggcagcagcattggaggtggaaacctgggcctcggtgggggcagcggctactccttcaccaccagtggtgggcatagcctgggtgcaggcctgggaggttctggattcagtgccaccagcaaccggggcttagggggcagtggttctagcgtcaagtttgtctccaccacatcctccagccagaagagctacacgcactaagagagccccatggctccctctaccctgccttgaggcctgtttgcagtcacacctggacaccagggtcctcctccttcctctctccttgtaaggtgcacctgtgctgctgggagcctggagtactggctatacccattcccaggcctaagccagcctctccctcctgacagtgcccagactgccagcagcacccgtctgttacacatgtgaaaccaaagcctgctctctcctaaggctctcattcagcctatcttgcgaggcccgggcagctggaaagtcctcctccagctccacctccctccctccctccagatgcagaggctggggagtctctcaatgccaggttgtcacccacctgtctcatagtgtttataagtggcctgctgggagtgagtgctccctctgttccctccctggaatgtgtctattaaatgcatgtgtcacctg

SEQ ID NO: 15245 - DNA, 3305 bp, Homo sapiens
  source 1..3305: mol_type = unassigned DNA
tgcctgcttctctggatgctccagcaaacatgagccaccaatttagttctcagtccgcgtttagttcaatgagcaggcgggtttatagtaccagctcttctgcaggctctggtggtgggagtccggcagtgggttctgtgtgttatgctcgagggaggtgtggtggtggtggatatgggatccatggaagggggtttggctctaggagcctctacaatctgggtggcagtagaagcatctccattaatctaatggggaggagcaccagtggtttctgccagggtgggggagtagggggatttggagggggcagaggctttggggttggcagcaccggggctggtggctttggaggaggtggttttgggggtgctggatttgggactagcaattttgggcttgggggctttggtccttattgtcctcctgggggcatccaagaggtgaccattaaccagagcctcctagagccacttcacctggaggtggaccctgaaattcagaggatcaagacccaggagcgggagcagattatggttctcaacaacaagtttgcctccttcattgacaaggtgcgattcctggagcagcagaaccaggtgctacaaacaaaatgggagttgctgcagcaggtgaacacctcaactggaaccaacaacctggagcccctcttggagaactacatcggtgacctgcggaggcaggtggatttgctcagtgcggagcagatgcgccagaacgcggaggtcaggagcatgcaggatgtcgtggaggactacaagagcaagtatgaggatgaaatcaacaagaggactggcagcgagaatgactttgtcgtcctgaagaaggatgtggatgctgcttatgtgagcaaagtggacctggagtccagggtggacactctgactggggaggtcaatttcttgaaatatttatttttgacggagctgtctcaggtgcagactcacatcagcgacaccaacgtcatcctgtccatggacaataaccgttccctggacctggacagcatcatcgatgcagtgcggacccagtatgaactgattgcacagaggagcaaggacgaggccgaagccctgtaccagaccaagtaccaggagctccagatcacggcagggagacatggagacgacctgaagaacagcaagatggagattgcagagctcaaccgcaccgtccagaggctgcaggcagagatcagcaacgtgaagaagcagattgaacagatgcagtcactcatttcggatgctgaggagagaggcgagcaggccctccaggatgcgtggcagaagctgcaggacctggaggaggccctgcagcagtccaaggaggagctggcccggctgctgcgtgactaccaggccatgctgggggtcaagctgtccctggatgtggagatcgccacctaccgccagctgctggagggcgaggagagcaggatgtcaggagagctgcagagccatgtgagcatctccgtgcagaacagccaggtgagcgtcaacggcggcgcgggaggcggcggcagctacggctcaggaggctacggcggcggcagcggtgggggctatggcggcggaagaagctaccgcggaggcggggcacgaggcaggagtggaggcggttatggcagcggctgcggcggcggtggcgggagctacggagggagcggcagaagcggccgcggatcctcgcgcgtgcagatcatccagacctccaccaacacctcccacaggcggatcttggagtagaggcctcgtttctgccacacatcacgcctgcccctcaccgccctctcctcaaactcctcccctccacgcccttcctgatcccctctcattcacttttcttaatgggtctcagcaattttgccaataaattcgactctaatgggggaagcagggtggataagtccaaacagcagatctctctttggagggcactggcttgcagtcagattcacagctaggcacattctcactcagaccccgctctgctggccctgctgctgttcctgctcccacctttttggaagatcggtagcccagggtgagcacaaacattccagttagaggcagaggctgcgtgagttggcaaggtagggagaagtcattgttatcattcctctgcctccaagtagaatgcccttatgccccagttcaagccactgcagctaagtattaatccccagtgctaaaagataccaggcatctagtttagcaatggagggaaacagaaacagcctgtagagagcatcgacaaggcgcataatggagagttggtatctcaaccccaagctccctttgctgtacctgggctgctctgtgaacaagaatccacgcccccctgccctgctggggaccacataatgatccctttgggggaagttgctgattgcagggcaagctagcttggtaaggaaaacctctgcaccagcggcctattcctgcctcttggtccatagcctcatacactcatgttgatggatagtatagatttgctgcccacaccagatatctgtaaggcatcactgtcctgattctgaacctctgtttcaggaagcattctcccctgtgtaaacaactcaaggtggaagtatttcagagggcatagggtcatgaatccttacccaaaggaagcctgttttagcagtggatgcaggagttgatgaacagacaagcaagttctgcttctgtcctgtttcctcctgacagctccattcttttgaagcctgacccttcctaagctctgcatcataaccactctgagaattgccccattgggtgggcatgtgaagcccagctctgttccatccaggtgcctcgggcctgaggagtctgaggatctgacttgggtcttggaagggttccaaccccaagtcagtcaggaagctgcccatttttttgcaaggcattttaatgccctttcccagacctctctagtccctcctgccttctgttctctgtagctgtgagccctttgtgagaatatgactcttaattttgaatcttatgtaagaggcttgagatgtgctggagagggcaggaagaggaaagtatcaggccttgagagagggaatgtagctttgcttctatgatctggagtcaccttcacttgctagctgagtcctaacacaacttccaagtccatgattctcttggggcattggatgggctcagtgtgggtctcttaggctgttcttgtgacttcatcatttcctggttcaaagttgtactgtcaaggggcagcatttctggtatttctataataaatttttctgtgatctcaaa

SEQ ID NO: 15246 - DNA, 2212 bp, Homo sapiens
  source 1..2212: mol_type = unassigned DNA
tgcctgcttctctggatgctccagcaaacatgagccaccaatttagttctcagtccgcgtttagttcaatgagcaggcgggtttatagtaccagctcttctgcaggctctggtggtgggagtccggcagtgggttctgtgtgttatgctcgagggaggtgtggtggtggtggatatgggatccatggaagggggtttggctctaggagcctctacaatctgggtggcagtagaagcatctccattaatctaatggggaggagcaccagtggtttctgccagggtgggggagtagggggatttggagggggcagaggctttggggttggcagcaccggggctggtggctttggaggaggtggttttgggggtgctggatttgggactagcaattttgggcttgggggctttggtccttattgtcctcctgggggcatccaagaggtgaccattaaccagagcctcctagagccacttcacctggaggtggaccctgaaattcagaggatcaagacccaggagcgggagcagattatggttctcaacaacaagtttgcctccttcattgacaagagaaaggaaccttggggtcatcagtgtctcagatgctccgaaacaccatttccttacgttggcatggataaattgagtgtggagggtgcgattcctggagcagcagaaccaggtgctacaaacaaaatgggagttgctgcagcaggtgaacacctcaactggaaccaacaacctggagcccctcttggagaactacatcggtgacctgcggaggcaggtggatttgctcagtgcggagcagatgcgccagaacgcggaggtcaggagcatgcaggatgtcgtggaggactacaagagcaagtatgaggatgaaatcaacaagaggactggcagcgagaatgactttgtcgtcctgaagaaggatgtggatgctgcttatgtgagcaaagtggacctggagtccagggtggacactctgactggggaggtcaatttcttgaaatatttatttttgacggagctgtctcaggtgcagactcacatcagcgacaccaacgtcatcctgtccatggacaataaccgttccctggacctggacagcatcatcgatgcagtgcggacccagtatgaactgattgcacagaggagcaaggacgaggccgaagccctgtaccagaccaagtaccaggagctccagatcacggcagggagacatggagacgacctgaagaacagcaagatggagattgcagagctcaaccgcaccgtccagaggctgcaggcagagatcagcaacgtgaagaagcagattgaacagatgcagtcactcatttcggatgctgaggagagaggcgagcaggccctccaggatgcgtggcagaagctgcaggacctggaggaggccctgcagcagtccaaggaggagctggcccggctgctgcgtgactaccaggccatgctgggggtcaagctgtccctggatgtggagatcgccacctaccgccagctgctggagggcgaggagagcaggatgtcaggagagctgcagagccatgtgagcatctccgtgcagaacagccaggtgagcgtcaacggcggcgcgggaggcggcggcagctacggctcaggaggctacggcggcggcagcggtgggggctatggcggcggaagaagctaccgcggaggcggggcacgaggcaggagtggaggcggttatggcagcggctgcggcggcggtggcgggagctacggagggagcggcagaagcggccgcggatcctcgcgcgtgcagatcatccagacctccaccaacacctcccacaggcggatcttggagtagaggcctcgtttctgccacacatcacgcctgcccctcaccgccctctcctcaaactcctcccctccacgcccttcctgatcccctctcattcacttttcttaatgggtctcagcaattttgccaataaattcgactctaatgggggaagcagggtggataagtccaaacagcagatctctctttggagggcactggcttgcagtcagattcacagctaggcacattctcactcagaccccgctctgctggccctgctgctgttcctgctcccacctttttggaagatcggtagcccagggtgagcacaaacattccagttagaggcagaggctgcgtgagttggcaaggtagggagaagtca

SEQ ID NO: 15247 - DNA, 1778 bp, Homo sapiens
  source 1..1778: mol_type = unassigned DNA
agaaactcacacaccttgacaatctgtctgtccgtctgcagctgcgtgactgtctgtctctgccatgtctctctccccatgccgggcccagaggggcttcagcgctcgctcagcctgttctgctcgctcaaggggccgcagcaggggaggcttcagcagcaggggcggcttcagcagcaggagccttaattcctttggggggtgcctggaaggctctcgtgggagtacctgggggtcagggggtaggctgggggtgcggtttggggagtggagtggtgggcctgggctctccctgtgccctccggggggcatccaagaagtgaccatcaaccagaatctgctgaccccactgaagattgagatcgatccccagttccaggtggtgcggacgcaggagacccaggagatcagaaccctcaacaaccagtttgcttccttcattgacaaggtgcggttcctggagcagcagaacaaggtcctggagacgaagtggcatctgctgcagcaacaggggttgagtggcagccagcagggcctggagcctgtctttgaggcctgcctggatcagctcaggaagcagctggagcagctccagggagaacgaggggctctggatgctgagttgaaggcctgccgggaccaggaggaggagtataagtccaagtatgaggaggaggcccacaggcgtgccacacttgagaacgactttgtggtcctcaagaaggatgtggatggggttttcctgagcaagatggagttggagggcaagctggaggctctgagagagtacctctacttcttgaagcatctgaatgaagaagagctgggccagctccagacccaggccagcgacacgtctgtggtgctgtccatggacaacaaccgctacctggacttcagcagcatcatcactgaggtccgcgcccggtacgaggagatcgcccggagcagcaaggctgaggctgaggccttgtaccagaccaagtaccaggaacttcaggtgtctgcccagcttcatggggacaggatgcaggaaacgaaagtccagatctctcagctacaccaagagattcagaggctgcagagtcagactgagaacctcaagaagcagaacgccagcctgcaggccgccatcactgatgctgagcagcgtggggagctggccctcaaggacgctcaggccaaggtggacgagctggaggctgctctgaggatggccaagcagaacctggcccggctgctgtgcgagtaccaggagctgacgagcacgaagctttccctggatgtggagattgccacttaccgcaggctgctggagggcgaggagtgcaggatgtctggggagtgcaccagccaggtcactatctcctcggtgggaggcagcgctgtcatgtctggaggagttggtggaggcttggggagcacttgtggactcggtagtgggaaaggcagccctgggtcctgctgcaccagcattgtgactggaggctccaacatcattctgggctctgggaaggaccctgttttggattcctgctctgtgtctggctccagcgctggctccagctgccacaccatcctgaagaagacagttgagtcgagtctgaagacatccatcacctactgagcgacccagcagccacctccttcctgaacacatttggcccactccccccatcagccggctctgcaaggccaactccgtgtccgctgcccacagcccaagccagcccacagcggatgctgcaaaaatcaataaagtctcccctcctgctgtt

SEQ ID NO: 15248 - DNA, 2554 bp, Homo sapiens
  source 1..2554: mol_type = unassigned DNA
gttcagagtgtcatggaaggtcatgaggcttcccctgcccaggttgggcagggggacaggggaaaggtgcggttcctggagcagcagaacaaggtcctggagacgaagtggcatctgctgcagcaacaggggttgagtggcagccagcagggcctggagcctgtctttgaggcctgcctggatcagctcaggaagcagctggagcagctccagggagaacgaggggctctggatgctgagttgaaggcctgccgggaccaggaggaggagtataagtccaagtatgaggaggaggcccacaggcgtgccacacttgagaacgactttgtggtcctcaagaaggatgtggatggggttttcctgagcaagatggagttggagggcaagctggaggctctgagagagtacctctacttcttgaagcatctgaatgaagaagagctgggccagctccagacccaggccagcgacacgtctgtggtgctgtccatggacaacaaccgctacctggacttcagcagcatcatcactgaggtccgcgcccggtacgaggagatcgcccggagcagcaaggctgaggctgaggccttgtaccagaccaagtaccaggaacttcaggtgtctgcccagcttcatggggacaggatgcaggaaacgaaagtccagatctctcagctacaccaagagattcagaggctgcagagtcagactgagaacctcaagaagcagaacgccagcctgcaggccgccatcactgatgctgagcagcgtggggagctggccctcaaggacgctcaggccaaggtggacgagctggaggctgctctgaggatggccaagcagaacctggcccggctgctgtgcgagtaccaggagctgacgagcacgaagctttccctggatgtggagattgccacttaccgcaggctgctggagggcgaggagtgcaggatgtctggggagtgcaccagccaggtcactatctcctcggtgggaggcagcgctgtcatgtctggaggagttggtggaggcttggggagcacttgtggactcggtagtgggaaaggcagccctgggtcctgctgcaccagcattgtgactggaggctccaacatcattctgggctctgggaaggaccctgttttggattcctgctctgtgtctggctccagcgctggctccagctgccacaccatcctgaagaagacagttgagtcgagtctgaagacatccatcacctactgagcgacccagcagccacctccttcctgaacacatttggcccactccccccatcagccggctctgcaaggccaactccgtgtccgctgcccacagcccaagccagcccacagcggatgctgcaaaaatcaataaagtctcccctcctgctgttctgaatgctctaagtgcttgcacacctcacccagcaaaacaaaagctgtgtggctccccagcttcctctcctcggaaggcaattgtggcatatctgtgtccagacgtgttctattggtatctcactccacatcccagccactctatcaagggatccttcaagctctccagtgtgttccttggggtgccctccatctcccacaactccactgatgttttagctgtgcttgtagctcacttcctcatcaactgcctgttttaagaggttctagtcctgactggggcagcccccttccttcttgttcctccttcttcctgactgtgcaccaaaattttctccttttaggaaccttctctaattcccatgtctaaactactgggcccttcctgtccctggcagtctggctgcacctgttgctgtcctgggtgctatgtctgtctggctctggtaagggactcagcttctctattagcctggcactcctgcatccaggatgaggatgtgctcagcttgtgcctgggggctctgatggagattggggttcaaactctgcccctacccccttatctgttggctctcatcttatccttgggcaagtgtgaacatgaggctggaaacttctcctccttcctctccttcaggaagctctgcaggaagccaggagtgtgggaatcaggtggggtgccaggaggggctggaaggatcaccttttctacacacccccagcagcctcatgggtgcctgcagttgctctttccccattctcgctttccagacccaggtgggggacctggctcaaccccaaactccatagtctgggctgcaggaggtcacactacgcctctccttgctttagagggagggcagacctttcctcagattcatgaatcgctccatccaaattatgcaagaaggcttttcagctttgtgtgaaggagaccagagccggtgaggatgtggcttgaatcccagctctgctgtttcctagtggtgtgaccttgatcaagcagcttgacctcttcagttacctcatctgtaaaaagagattaataataatatgtacctcacagggctgtgtggcgacagtgccactaggatcccagaaggaaactaaattcatccaaggtagttcaattaaattgactttttgaaaaagta

SEQ ID NO: 15249 - DNA, 1700 bp, Homo sapiens
  source 1..1700: mol_type = unassigned DNA
aactcacacaccttgacaatctgtctgtccgtctgcagctgcgtgactgtctgtctctgccatgtctctctccccatgccgggcccagaggggcttcagcgctcgctcagcctgttctgctcgctcaaggggccgcagcaggggaggcttcagcagcaggggcggcttcagcagcaggagccttaattcctttggggagtggtgggcctgggctctccctgtgccctccggggggcatccaagaagtgaccatcaaccagaatctgctgaccccactgaagattgagatcgatccccagttccaggtggtgcggacgcaggagacccaggagatcagaaccctcaacaaccagtttgcttccttcattgacaaggtgcggttcctggagcagcagaacaaggtcctggagacgaagtggcatctgctgcagcaacaggggttgagtggcagccagcagggcctggagcctgtctttgaggcctgcctggatcagctcaggaagcagctggagcagctccagggagaacgaggggctctggatgctgagttgaaggcctgccgggaccaggaggaggagtataagtccaagtatgaggaggaggcccacaggcgtgccacacttgagaacgactttgtggtcctcaagaaggatgtggatggggttttcctgagcaagatggagttggagggcaagctggaggctctgagagagtacctctacttcttgaagcatctgaatgaagaagagctgggccagctccagacccaggccagcgacacgtctgtggtgctgtccatggacaacaaccgctacctggacttcagcagcatcatcactgaggtccgcgcccggtacgaggagatcgcccggagcagcaaggctgaggctgaggccttgtaccagaccaagtaccaggaacttcaggtgtctgcccagcttcatggggacaggatgcaggaaacgaaagtccagatctctcagctacaccaagagattcagaggctgcagagtcagactgagaacctcaagaagcagaacgccagcctgcaggccgccatcactgatgctgagcagcgtggggagctggccctcaaggacgctcaggccaaggtggacgagctggaggctgctctgaggatggccaagcagaacctggcccggctgctgtgcgagtaccaggagctgacgagcacgaagctttccctggatgtggagattgccacttaccgcaggctgctggagggcgaggagtgcaggatgtctggggagtgcaccagccaggtcactatctcctcggtgggaggcagcgctgtcatgtctggaggagttggtggaggcttggggagcacttgtggactcggtagtgggaaaggcagccctgggtcctgctgcaccagcattgtgactggaggctccaacatcattctgggctctgggaaggaccctgttttggattcctgctctgtgtctggctccagcgctggctccagctgccacaccatcctgaagaagacagttgagtcgagtctgaagacatccatcacctactgagcgacccagcagccacctccttcctgaacacatttggcccactccccccatcagccggctctgcaaggccaactccgtgtccgctgcccacagcccaagccagcccacagcggatgctgcaaaaatcaataaagtctcccctcctgc

SEQ ID NO: 15250 - DNA, 2068 bp, Homo sapiens
  source 1..2068: mol_type = unassigned DNA
gccctctcatcctgccctccggcccctctgcagctatgaggtcctccgtctctcggcaaacatactccacaaaagggggcttcagctccaactctgccagcggagggagtgggtcccaggcccgcaccagcttcagctcagtgacggtgtctcggagcagtggcagtggtggcggggcccactgtggccccggcacaggtggctttggcagccgaagcctctataacttggggggccacaagagtatctctgtcagtgtggccggaggggccttgttggggcgggctctggggggctttggctttggcagcagggcatttatgggacagggggctggcaggcagacgtttgggcctgcttgtcctcctggggggatccaggaggtcactgtcaaccagagcctgctgacccccctccatgtggagattgaccccgagatccagcgagtgcgcactcaggagcgggagcagatcaagaccctcaacaacaagttcgcctccttcatcgacaaggtgcggttcctggagcaacagaataaggtgctggagaccaagtgggcactgctgcaggagcagggccagaacttgggtgtcaccaggaacaacctggagcccctctttgaggcctacctgggtagcatgcggagcacgctggacagacttcagagcgagcgggggaggctggactcagagctcaggaacgtgcaggaccttgtggaggacttcaagaacaagtacgaggatgaaatcaacaagcacactgctgcagagaacgagtttgtggtgctcaagaaggatgtggatgcagcatacatgggccggatggatctgcatggcaaagtgggcaccttgacccaggagattgacttcctgcagcaactctatgaaatggagctgagccaagtgcagacccacgtgtctaacaccaatgtggtgctgtccatggacaacaaccgcaacctggacctggacagcatcatcgccgaggtcaaggcccagtatgagctgattgcccagaggagccgggctgaggccgaggcctggtaccagaccaagtatgaggagctgcaggtgactgctgggaagcatggggacaacctgcgggacaccaagaacgagattgctgagctcacccgcactatccagaggctgcagggggaggctgatgcagccaagaagcagtgtcagcagctgcagacggccattgcggaagcggagcagcgtggggagctggcactcaaggatgctcagaagaagcttggggatctggatgtggccctgcaccaggccaaggaggacctgacacggctgctgcgtgactaccaggagctgatgaatgtcaagctggccctggacgtggagattgccacctaccgcaagcttctggagagcgaggagagcaggatgtctggagaatgtcccagtgcagtcagcatttctgtgactggcaactccaccactgtgtgcggaggtggcgcagccagctttggaggtggcatctccctgggtgggagtgggggggccaccaagggtggattcagcacaaatgtgggctatagcaccgtcaagggagggccagtctctgcgggcacctccatcctgcggaagaccactacggtcaagacgtccagccagaggtattagctgctgagccctgcaagggcccctgcaatcctgtccctgccctcctcaccccacctctgctgtcctttccagtcacttctcaggagcaggaacagccaggggacctcagacccagggtattttcataccagactatttgcatcttgggaagcgctcaaatctactcaggttttctccttggtcctgcagtaggatgggagggaaggttaaagttgccagcttgagtgatgtgcttgggtgacttgggggtgaccttttgaccaccgagaggaggctgaatttctcaagccattaggagagagagaaattgggagtggtccccaaagacccttcaacctccccagtcccccaccagacccaccctctccctgaatctacccacatcccccttccctgtctgtgtctcaataaatggtgcaactgca

SEQ ID NO: 15251 - DNA, 3894 bp, Homo sapiens
  source 1..3894: mol_type = unassigned DNA
cccagctgtgaccagagcaaccagagcctgccacccgacgcaaccccaggctcactcgctcacccccctgggccctcctgcttccggccgggggcaccatggcctgccgctcctgcgtggttggcttcagcagcctcagcagctgtgaggtgaccccggtgggcagcccccggcctggaacctcaggatgggacagctgcagggcccccgggccgggcttcagctcccgcagcctcacaggctgctggtcggctggcactatctccaaggtgactgtgaaccccggcctgctggtgcccctggatgtcaagttggaccccgctgttcagcagctgaagaaccaggagaaggaggagatgaaggccctcaatgataaatttgcctccctaattggcaaggtgcaagccctggaacagcgcaaccagctgctggagacacgctggagcttcctgcagggccaggactcagccatcttcgacctcgggcatctctatgaggaatatcagggccggctgcaggaggaactgcgcaaagtgagccaggagcgggggcagctggaggccaacctgctgcaggtgctggagaaggttgaggagtttcgaatcaggtatgaggatgagatctccaagcgcacagacatggagttcacctttgttcagctgaagaaggacctggatgcagagtgtcttcatcggactgaactggaaaccaagttaaaaagcctggagagcttcgtggagttgatgaaaaccatctatgagcaggagctgaaggacctggcagcacaggtgaaggatgtgtcggtgaccgtcggcatggacagccgctgccacatcgacctgagcggcatcgtggaggaggtgaaggcccagtatgacgccgtcgcggctcgcagcctggaggaggccgaggcatactctcggagccagctggaggagcaggccgcccgctcggccgagtatgggagcagcctccagagcagccgcagcgagatcgcggatctcaatgtgcgcatccagaagctgcggtcccagatcctctctgtcaagagccattgcctgaaactggaggagaacatcaagacagctgaggagcagggtgagctggccttccaggatgccaagaccaagctggcccagctggaggccgccctgcagcaggccaagcaggacatggcgcggcagctgcgcaagtaccaggagctgatgaacgtcaagctggccctggacatcgagatcgccacctacaggaagctggtggagggcgaggagggcaggatggactcgccctcagccactgtggtcagcgctgtgcagtccaggtgcaaaaccgccccttccctcccctaccccttatgttccctgtagctgcctccagatcaggcctctccaaggccccctcccgaaagaagaagggcagcaaaggccccgtgatcaaaatcaccgaaatgtcagagaagtacttctcgcaggagtcggaggtctcagagtaaggcggctggaccccaggaaccccagggcactccactgcagcaggagggacttaagctagactcaagaaagcagcttggagcctctaggttgagaagagaggcaaaacctgatattgaactgagagaggggttcaaaactgactgtgttttgtgggctgccagggtgggagaggagcatcaccagctcctcagagccactccgctccatatcagtatctcacagtcccatccttccaaccttctggccagaggttttcctgatgggtgagtcggaattaggggtcagttttgtctccacctcctcgctcctctgaggctcctcctccagcatcaggctctgccaaggcccctctgactcttgcccaatccttgaccttgactcctatctcaagccttgccttgtctctgcctcggaactgggactgggactggctcatccacctatgtgcgggagccgaggaggacggcgtgggccctgtcctgtatctggaattcctgggaaggctggctgctgaagaccctcttggctttcccgtgctctttgggctccccagagacctgacagtattagggagtgaagggaggaggggccctggctatttgggacctaagcctaggccccagagatcagcccgaacacccgcatcccttcctcctcccatgggtccctcccagtaggcagtagtcagaactggatgggctgcccccagccagctcccagcagcttctccggaagctgctcttgccataatcaactccctgggagtggaagccagatggcagcttgagattgggcaggagcattcgatcttcctttcacctccctgccatgctggggtcctacccagcctggatctgagctctgtgcccccagccgggttgttcccagcctgagcaccgggctttggtgcaccaggccttggagacccctggtcccacccctgccgtgaagccccaggcccacttcccaagaatctcacttctcagggcctctgttctcctctccactgggccaaatagcctggccctcccctccttggcattcatgggggagcccaggaaccccccacacctatggggttagagctcctcctttcttctcactccttccccttcctccctccatgcccactccccctgcctccagcaggccaggaagaaggcacagtccaggcaagtctgggagcttccaagcccttgaggtccagctgtggggcccaaatgacagccttacaagggttctaccagagaggaaaattccacatcccaccagaagacaggggtgttggcaggcatactcctatctcctcctcttggctctcaatgctgaggcttgcagaggcatcccagcggcaccagcctcccactgcacagcttccttccctccttcactctcctctcccctccctgccccttgcctcacctcctcttctagactgcattagattcattcatctcatttgccaggacatgttggccagaggtctgggcccatcccaggcctcaaggccctccaggcctgtggggagcactggagggttactgactctctggccatgggaactcagagattctcatccccaaagtcccaaaagagggtgctgattggtgcttttcctcaggctcttcattggtttccaagggagcaaatcctcagtggggatacaagacatataaagtatatattattttttcataacttatgtggcttttaacttattgcttcccttcctgtttctgcatgatcagtctgtatgtactatctggaaagataacacatactccagccacctcacctgattggctatcttggggccatgtccccttcttgctgccacaggatgaataaagtgttgagatttgtctatggagaaagctgtgtgtctgtttttatctcccctctcaggaccagtcagccactggtcaatcaggctgatcatggaacattaggaattctccaattaagggagaaaaagtccagggacttagttatatcttcagaccagtgcagctggtacacacaaagttctcctgtctcaccatctgatatggtttggatgctcgtcccctccaaatctcatgttgaaatgtaattcccagtgttggaagtggagcctggtgggaagtatttggatcatgagagaggatccttcatgaatggctcagcaccatctccttggtgatgagtgagttctcactcaattcacatagatatggttgtttaaaagagtctgagacctctcccctctttctcgccatgtgatatgcctgctcccccttcaccttccgcctttactgtaagcttcctgaggccctcaccagaagctgagcaaatgttggtgccatgccagtacagcctgcagaattgtgagccaaaataaatgtcttttctttataaatta

SEQ ID NO: 15252 - DNA, 3859 bp, Homo sapiens
  source 1..3859: mol_type = unassigned DNA
cccagctgtgaccagagcaaccagagcctgccacccgacgcaaccccaggctcactcgctcacccccctgggccctcctgcttccggccgggggcaccatggcctgccgctcctgcgtggttggcttcagcagcctcagcagctgtgaggtgaccccggtgggcagcccccggcctggaacctcaggatgggacagctgcagggcccccgggccgggcttcagctcccgcagcctcacaggctgctggtcggctggcactatctccaaggtgactgtgaaccccggcctgctggtgcccctggatgtcaagttggaccccgctgttcagcagctgaagaaccaggagaaggaggagatgaaggccctcaatgataaatttgcctccctaattggcaaggtgcaagccctggaacagcgcaaccagctgctggagacacgctggagcttcctgcagggccaggactcagccatcttcgacctcgggcatctctatgaggaatatcagggccggctgcaggaggaactgcgcaaagtgagccaggagcgggggcagctggaggccaacctgctgcaggtgctggagaaggttgaggagtttcgaatcaggtatgaggatgagatctccaagcgcacagacatggagttcacctttgttcagctgaagaaggacctggatgcagagtgtcttcatcggactgaactggaaaccaagttaaaaagcctggagagcttcgtggagttgatgaaaaccatctatgagcaggagctgaaggacctggcagcacaggtgaaggatgtgtcggtgaccgtcggcatggacagccgctgccacatcgacctgagcggcatcgtggaggaggtgaaggcccagtatgacgccgtcgcggctcgcagcctggaggaggccgaggcatactctcggagccagctggaggagcaggccgcccgctcggccgagtatgggagcagcctccagagcagccgcagcgagatcgcggatctcaatgtgcgcatccagaagctgcggtcccagatcctctctgtcaagagccattgcctgaaactggaggagaacatcaagacagctgaggagcagggtgagctggccttccaggatgccaagaccaagctggcccagctggaggccgccctgcagcaggccaagcaggacatggcgcggcagctgcgcaagtaccaggagctgatgaacgtcaagctggccctggacatcgagatcgccacctacaggaagctggtggagggcgaggagggcaggatggactcgccctcagccactgtggtcagcgctgtgcagtccaggtgcaaaaccgctgcctccagatcaggcctctccaaggccccctcccgaaagaagaagggcagcaaaggccccgtgatcaaaatcaccgaaatgtcagagaagtacttctcgcaggagtcggaggtctcagagtaaggcggctggaccccaggaaccccagggcactccactgcagcaggagggacttaagctagactcaagaaagcagcttggagcctctaggttgagaagagaggcaaaacctgatattgaactgagagaggggttcaaaactgactgtgttttgtgggctgccagggtgggagaggagcatcaccagctcctcagagccactccgctccatatcagtatctcacagtcccatccttccaaccttctggccagaggttttcctgatgggtgagtcggaattaggggtcagttttgtctccacctcctcgctcctctgaggctcctcctccagcatcaggctctgccaaggcccctctgactcttgcccaatccttgaccttgactcctatctcaagccttgccttgtctctgcctcggaactgggactgggactggctcatccacctatgtgcgggagccgaggaggacggcgtgggccctgtcctgtatctggaattcctgggaaggctggctgctgaagaccctcttggctttcccgtgctctttgggctccccagagacctgacagtattagggagtgaagggaggaggggccctggctatttgggacctaagcctaggccccagagatcagcccgaacacccgcatcccttcctcctcccatgggtccctcccagtaggcagtagtcagaactggatgggctgcccccagccagctcccagcagcttctccggaagctgctcttgccataatcaactccctgggagtggaagccagatggcagcttgagattgggcaggagcattcgatcttcctttcacctccctgccatgctggggtcctacccagcctggatctgagctctgtgcccccagccgggttgttcccagcctgagcaccgggctttggtgcaccaggccttggagacccctggtcccacccctgccgtgaagccccaggcccacttcccaagaatctcacttctcagggcctctgttctcctctccactgggccaaatagcctggccctcccctccttggcattcatgggggagcccaggaaccccccacacctatggggttagagctcctcctttcttctcactccttccccttcctccctccatgcccactccccctgcctccagcaggccaggaagaaggcacagtccaggcaagtctgggagcttccaagcccttgaggtccagctgtggggcccaaatgacagccttacaagggttctaccagagaggaaaattccacatcccaccagaagacaggggtgttggcaggcatactcctatctcctcctcttggctctcaatgctgaggcttgcagaggcatcccagcggcaccagcctcccactgcacagcttccttccctccttcactctcctctcccctccctgccccttgcctcacctcctcttctagactgcattagattcattcatctcatttgccaggacatgttggccagaggtctgggcccatcccaggcctcaaggccctccaggcctgtggggagcactggagggttactgactctctggccatgggaactcagagattctcatccccaaagtcccaaaagagggtgctgattggtgcttttcctcaggctcttcattggtttccaagggagcaaatcctcagtggggatacaagacatataaagtatatattattttttcataacttatgtggcttttaacttattgcttcccttcctgtttctgcatgatcagtctgtatgtactatctggaaagataacacatactccagccacctcacctgattggctatcttggggccatgtccccttcttgctgccacaggatgaataaagtgttgagatttgtctatggagaaagctgtgtgtctgtttttatctcccctctcaggaccagtcagccactggtcaatcaggctgatcatggaacattaggaattctccaattaagggagaaaaagtccagggacttagttatatcttcagaccagtgcagctggtacacacaaagttctcctgtctcaccatctgatatggtttggatgctcgtcccctccaaatctcatgttgaaatgtaattcccagtgttggaagtggagcctggtgggaagtatttggatcatgagagaggatccttcatgaatggctcagcaccatctccttggtgatgagtgagttctcactcaattcacatagatatggttgtttaaaagagtctgagacctctcccctctttctcgccatgtgatatgcctgctcccccttcaccttccgcctttactgtaagcttcctgaggccctcaccagaagctgagcaaatgttggtgccatgccagtacagcctgcagaattgtgagccaaaataaatgtcttttctttataaatta

SEQ ID NO: 15253 - DNA, 1929 bp, Homo sapiens
  source 1..1929: mol_type = unassigned DNA
cattggagtttccatcaggactccaggtcccctatcctgtcctctgcaacccaaacgtccaggaggatcatgacctgcggatcaggatttggtgggcgcgccttcagctgcatctcggcctgcgggccgcggcccggccgctgctgcatcaccgccgccccctaccgtggcatctcctgctaccgcggcctcaccgggggcttcggcagccacagcgtgtgcggaggctttcgggccggctcctgcggacgcagcttcggctaccgctccgggggcgtgtgcgggcccagtcccccatgcatcaccaccgtgtcggtcaacgagagcctcctcacgcccctcaacctggagatcgaccccaacgcgcagtgcgtgaagcaggaggagaaggagcagatcaagtccctcaacagcaggttcgcggccttcatcgacaaggtgcgcttcctggagcagcagaacaaactgctggagacaaagctgcagttctaccagaaccgcgagtgttgccagagcaacctggagcccctgtttgagggctacatcgagactctgcggcgggaggccgagtgcgtggaggccgacagcgggaggctggcctcagagcttaaccacgtgcaggaggtgctggagggctacaagaagaagtatgaggaggaggtttctctgagagcaacagctgagaacgagtttgtggctctgaagaaggatgtggactgcgcctacctccgcaagtcagacctggaggccaacgtggaggccctgatccaggagatcgacttcctgaggcggctgtatgaggaggagatcctcattctccagtcgcacatctcagacacctccgtggttgtcaagctggacaacagccgggacctgaacatggactgcatcattgccgagattaaggcacagtatgacgacattgtcacccgcagccgggccgaggccgagtcctggtaccgcagcaagtgtgaggagatgaaggccacggtgatcaggcacggggagaccctgcgccgcaccaaggaggagatcaatgagctgaaccgcatgatccaaaggctgacggccgaggtggagaatgccaagtgccagaactccaagctggaggccgcggtggcccagtctgagcagcagggtgaggcggccctcagtgatgcccgctgcaagctggccgagctggagggcgccctgcagaaggccaagcaggacatggcctgcctgatcagggagtaccaggaggtgatgaactccaagctgggcctggacatcgagatcgccacctacaggcgcctgctggagggcgaggagcagaggctatgtgaaggcattggggctgtgaatgtctgtgtcagcagctcccggggcggggtcgtgtgcggggacctctgcgtgtcaggctcccggccagtgactggcagtgtctgcagcgctccgtgcaacgggaacgtggcggtgagcaccggcctgtgtgcgccctgcggccaattgaacaccacctgcggagggggttcctgcggcgtgggctcctgtggtatcagctccctgggtgtggggtcttgcggcagcagctgccggaaatgttaggcaccccaactcaagtcccaggccccaggcatctttcctgccctgccttgcttggcccatccagtccaggcgcctggagcaagtgctcagctacttctcctgcactttgaaagacccctcccactcctggcctcacatttctctgtgtgatcccccacttctgggctctgccaccccacagtgggaaaggccaccctagaaagaagtccgctggcacccataggaaggggcctcaggagcaggaagggccaggaccagaaccttgcccacggcaactgccttcctgcctctccccttcctcctctgctcttgatctgtgtttcaataaattaatgtagccaa

SEQ ID NO: 15254 - DNA, 1505 bp, Homo sapiens
  source 1..1505: mol_type = unassigned DNA
actccaggtcccctatcctgtcctctgcaacccaaacgtccaggaggatcatgacctgcggatcaggatttggtgggcgcgccttcagctgcatctcggcctgcgggccgcggcccggccgctgctgcatcaccgccgccccctaccgtggcatctcctgctaccgcggcctcaccgggggcttcggcagccacagcgtgtgcggaggctttcgggccggctcctgcggacgcagcttcggctaccgctccgggggcgtgtgcgggcccagtcccccatgcatcaccaccgtgtcggtcaacgagagcctcctcacgcccctcaacctggagatcgaccccaacgcgcagtgcgtgaagcaggaggagaaggagcagatcaagtccctcaacagcaggttcgcggccttcatcgacaaggtgcgcttcctggagcagcagaacaaactgctggagacaaagctgcagttctaccagaaccgcgagtgttgccagagcaacctggagcccctgtttgagggctacatcgagactctgcggcgggaggccgagtgcgtggaggccgacagcgggaggctggcctcagagcttaaccacgtgcaggaggtgctggagggctacaagaagaagtatgaggaggaggtttctctgagagcaacagctgagaacgagtttgtggctctgaagaaggatgtggactgcgcctacctccgcaagtcagacctggaggccaacgtggaggccctgatccaggagatcgacttcctgaggcggctgtatgaggaggagatcctcattctccagtcgcacatctcagacacctccgtggttgtcaagctggacaacagccgggacctgaacatggactgcatcattgccgagattaaggcacagtatgacgacattgtcacccgcagccgggccgaggccgagtcctggtaccgcagcaagtgtgaggagatgaaggccacggtgatcaggcacggggagaccctgcgccgcaccaaggaggagatcaatgagctgaaccgcatgatccaaaggctgacggccgaggtggagaatgccaagtgccagaactccaagctggaggccgcggtggcccagtctgagcagcagggtgaggcggccctcagtgatgcccgctgcaagctggccgagctggagggcgccctgcagaaggccaagcaggacatggcctgcctgatcagggagtaccaggaggtgatgaactccaagctgggcctggacatcgagatcgccacctacaggcgcctgctggagggcgaggagcagaggctatgtgaaggcattggggctgtgaatgtctgtgtcagcagctcccggggcggggtcgtgtgcggggacctctgcgtgtcaggctcccggccagtgactggcagtgtctgcagcgctccgtgcaacgggaacgtggcggtgagcaccggcctgtgtgcgccctgcggccaagtggggtcttgcggcagcagctgccggaaatgttag

SEQ ID NO: 15255 - DNA, 1875 bp, Homo sapiens
  source 1..1875: mol_type = unassigned DNA
acaggcccttggttccatcctctgccatctactccactgttcagacacctcctaacctccgtcatgacctgtggcttcaactccataggctgtgggttccgccctggaaacttcagctgtgtctctgcctgcgggccccggccaagccgctgctgcatcaccgccgccccctaccgcggcatctcctgctaccgcggcctcaccgggggctttggcagccacagcgtgtgcgggggcttccgcgccggctcctgcggacgcagcttcggctaccgctccgggggcgtgtgcggacccagccccccatgcatcaccaccgtgtcggtcaacgagagcctcctcacgcccctcaacctggagatagaccccaacgcgcagtgcgtgaagcaggaggagaaggagcagatcaagtccctcaacagcagattcgcggccttcatcgacaaggtgcgcttcctggagcagcagaacaagctgctggagacaaagctgcagttctaccaaaaccgcgagtgctgccagagtaacctggagcccctgtttgctggctacatcgagactctgcggcgggaggccgagtgcgtggaggctgacagtgggaggctggcctcagagctcaaccacgtgcaggaggtgctggagggctacaagaagaagtatgaagaagaagtagcacttcgagccacagcagagaacgagtttgtggctctaaagaaggatgtggactgcgcctacctccgcaagtcagacctggaggccaacgtggaggccctgatccaggagattgacttcctgaggcggctgtacgaggaggagatccgcattctccaatcccacatctcagacacctccgtggttgtcaagctggacaacagccgggacctgaacatggactgcatcgttgccgagatcaaggcacagtatgatgacattgccacccgtagccgggctgaggccgagtcctggtatcgcagcaagtgtgaggagatgaaggccacagtgatcaggcacggggagaccctgcgccgcaccaaggaggagatcaacgagctgaaccgcatgatccagaggctgacagccgaggtggagaatgccaagtgccagaactccaagctggaagctgcggtggcccagtctgagcagcagggtgaggcggccctcagtgatgcccgctgcaagctggccgagctggagggcgccctgcagaaggccaagcaagacatggcctgcctgatcagggagtaccaggaggtgatgaactccaagctaggcctggatatcgagatcgccacctacaggcgcctgctggagggcgaggagcagaggctgtgtgaaggtgttgaagctgtgaatgtctgtgtcagcagctcccggggtggggttgtgtgcggggatctctgcgtgtcgggctcccggccggtgacgggcagcgtctgcagtgccccctgcaacgggaacctggtggtgagcactggtttgtgcaagccctgtggccagctgaacaccacctgtggagggggctcctgcggccaggggaggcattaagtggcccaaaagagagccaggggagccccttctgcctgccagacgtgccactgccccaccaccagctgaaaacagcagcacatcgctggcttttccccttgtgttctgagaatacaccatcggctcattcccaccagcggctcctccccacctttcatcccactggaaaggggcctgtggctggggaatagacccattccttcccctgtctcagccttcagcccctcccggggagaagggccttgcttccctggaagaagcactgtgagactgttccccctgcctctctggcctcttgtctccccttttccaataaacttggggacctgc

SEQ ID NO: 15256 - DNA, 2447 bp, Homo sapiens
  source 1..2447: mol_type = unassigned DNA
agaaggatcctgagcctcgcactctgccgcccgcaccaccttccgctgcctctcagactctgctcagcctcacacgatgtcgtgccgctcctacaggatcagctcaggatgcggggtcaccaggaacttcagctcctgctcagctgtggcccccaaaactggcaaccgctgctgcatcagcgccgccccctaccgaggggtgtcctgctaccgagggctgacgggcttcggcagccgcagcctctgcaacctgggctcctgcgggccccggatagctgtaggtggcttccgagccggctcctgcggacgcagcttcggctaccgctccgggggcgtgtgcggacccagccccccatgcatcactaccgtgtcggtcaacgagagcctcctcacgcccctcaacctggagatcgaccccaacgcacagtgcgtgaagcaggaggagaaggagcagatcaagtccctcaacagcaggttcgcggccttcatcgacaaggtgcgcttcctggagcagcagaacaagctgctggagaccaagtggcagttctaccagaaccagcgctgctgcgagagcaacctggagccactgttcagtggctacatcgagactctgcggcgggaggccgagtgcgtggaggccgacagcgggaggctggcctcagagctcaaccatgtgcaggaggtgctggagggctacaagaagaagtatgaagaggaggtggccctgagagccacagcagagaatgagtttgtcgttctaaagaaggacgtggactgtgcctacctgcggaaatcagacctggaggccaatgtggaggccctggtggaggagtctagcttcctgaggcgcctctatgaagaggagatccgcgttctccaagcccacatctcagacacctcggtcatagtcaagatggacaacagccgagacctgaacatggactgcatcatcgctgagatcaaggctcagtatgacgatgttgccagccgcagccgggccgaggctgagtcctggtaccgtagcaagtgtgaggagatgaaggccacggtgatcaggcatggggagaccctgcgccgcaccaaggaggagatcaacgagctgaaccgcatgatccagaggctgacggccgagattgagaatgccaagtgccagcgtgccaagctggaggctgctgtggctgaggcagagcagcagggtgaggcggccctcagcgatgcccgctgcaagctggctgagctggagggcgccctgcagaaggccaagcaggacatggcctgcctgctcaaggagtaccaggaggtgatgaactccaagctgggcctggacatcgagatcgccacctacaggcgcctgctggagggcgaggaacacaggctgtgtgaaggtgtgggctctgtgaatgtctgtgtcagcagctcccgtggtggagtctcctgtgggggcctctcctacagcaccaccccagggcgccagatcacttctggcccctcagccataggcggcagcatcacggtggtggcccctgactcctgtgccccctgccagcctcgttcctccagcttcagctgcgggagtagccggtcggtccgctttgcctagtagagtcatggagccagggcttcctgccaagcacctgcctgcctgcatcactgcactgaatggcatgtgaatggaaaatgtgtgcttgcttccagaatcttctggatgttcctacagagggaaagacctacagagggaaagaccctcgggccgctcccctgcgccttttcatgctagggagatgcatcctagttgtcctcctggcagctgttttcagaggcattcccagcccttcacttaactcctacttagctccaaaatacctgtatccaatttgtattattcccccagctctcagggacaagaccagtcccccagcgtggtggtcagcacggaagctccaccttctgggtggaggcgccatcctaaccatccagccaggccacccacaacccgagaatcagggagaaagtccctccccagcagccccctcctcctggctgggaagaatggtcccccagcaagcacttgcctgttcattcctgttcatgttttgcttctctctcagactgccttcctgcttctgggctaacctgttccagccaggctcctcatgtgacctcgcagttgagaagcccattatcgtggggcatccttttgcctacagcccctggttagggcactttggacaggtcttgctattcagtgaacctttgtacatttcaaagaagactccatggctgctccagatgcccccttgctgggtgcaggtggggactgtccaatgcagagctggcgggacagagagttaagccacttcctgggtctccttcttgtgactgtctatgggtgcattgccttctgggttgtctcgatctgtgtttcaataaatgccgctgcaatgcaa

SEQ ID NO: 15257 - DNA, 1387 bp, Homo sapiens
  source 1..1387: mol_type = unassigned DNA
acagatgattttagacttgggggaaggaatgtgcattcctaaccccatctcagaggcagaaggactgcggcggaatgaagccaggctaggacaagggctggcccatgaataatacaaaaaatagatcctggaggggccaagacaacatctggaggggattaatcccttttcaatccccggaagaacttgcccaggagttgggatggtattcaaggtccagtttctcagctccagaccttctctctcccacacccaggacgtggactgtgcctacctgcggaaatcagacctggaggccaatgtggaggccctggtggaggagtctagcttcctgaggcgcctctatgaagaggagatccgcgttctccaagcccacatctcagacacctcggtcatagtcaagatggacaacagccgagacctgaacatggactgcatcatcgctgagatcaaggctcagtatgacgatgttgccagccgcagccgggccgaggctgagtcctggtaccgtagcaagtgtgaggagatgaaggccacggtgatcaggcatggggagaccctgcgccgcaccaaggaggagatcaacgagctgaaccgcatgatccagaggctgacggccgagattgagaatgccaagtgccagcgtgccaagctggaggctgctgtggctgaggcagagcagcagggtgaggcggccctcagcgatgcccgctgcaagctggctgagctggagggcgccctgcagaaggccaagcaggacatggcctgcctgctcaaggagtaccaggaggtgatgaactccaagctgggcctggacatcgagatcgccacctacaggcgcctgctggagggcgaggaacacaggctgtgtgaaggtgtgggctctgtgaatgtctgtgtcagcagctcccgtggtggagtctcctgtgggggcctctcctacagcaccaccccagggcgccagatcacttctggcccctcagccataggcggcagcatcacggtggtggcccctgactcctgtgccccctgccagcctcgttcctccagcttcagctgcgggagtagccggtcggtccgctttgcctagtagagtcatggagccagggcttcctgccaagcacctgcctgcctgcatcactgcactgaatggcatgtgaatggaaaatgtgtgcttgcttccagaatcttctggatgttcctacagagggaaagacctacagagggaaagaccctcgggccgctcccctgcgccttttcatgctagggagatgcatcctagttgtcctcctggcagctgttttcagaggcattcccagcccttcacttaactcctacttagctccaaaatacctgtatccaatttgtattattcccccagctctca

SEQ ID NO: 15258 - DNA, 1868 bp, Homo sapiens
  source 1..1868: mol_type = unassigned DNA
tttggtgctcaagagaggcttggaggagaccacagttctttctccatgtgtgaggaattaaaggcaactgtgcagaaacacacgcagagcctgaagcccagcaaggaggatctgaacaggcttaatcaggccatccagtggctgacggtggaggtgggcagtgctgagagtcagcaccatgacttgtggatcttactgtggtggccgcgccttcagctgcatctcggcctgcgggccccggcccggccgctgctgcatcaccgccgccccctaccgtggcatctcctgctaccgcggcctcaccgggggcttcggcagccacagcgtgtgcggaggctttcgggccggctcctgcggacgcagcttcggctaccgctccgggggcgtgtgcgggcccagtcccccatgcatcaccaccgtgtcggtcaacgagagcctcctcacgcccctcaacctggagatcgaccccaacgcgcagtgcgtgaagcaggaggagaaggagcagatcaagtccctcaacagcaggttcgcggccttcatcgacaaggtgcgcttcctggagcagcagaacaaactgctggagacaaagctgcagttctaccagaaccgcgagtgttgccagagcaacctggagcccctgtttgagggctacatcgagactctgcggcgggaggccgagtgcgtggaggccgacagcgggaggctggcctcagagcttaaccacgtgcaggaggtgctggagggctacaagaagaagtatgaggaggaggtttctctgagagcaacagctgagaacgagtttgtggctctgaagaaggatgtggactgcgcctacctccgcaaatcagacctggaggccaatgtggaggccctgatccaggagatcgacttcctgaggcggctgtatgaggaggagatccgcgttctccagtcccacatctcagacacctccgtggttgtcaagctggacaacagccgggacctgaacatggactgcatcattgccgagatcaaggcacagtacgatgacattgtcacccgtagccgggctgaggccgagtcctggtaccgcagcaagtgtgaggagatgaaggccacggtgatcaggcacggggagaccctgcgccgcaccaaggaggagatcaacgagctgaaccgcatgatccagaggctgacggctgaggtggagaatgccaagtgccagaattccaagctggaggctgcggtggctcagtctgagcagcagggtgaggcggccctcagcgatgcccgctgcaagttggccgagctggagggtgccctgcagaaggccaagcaggacatggcctgcctgatcagggagtaccaggaggtgatgaactccaagctgggcctggacatcgagatcgccacctacaggcgcctgctggagggcgaggagcagaggctgtgcgagggcgtcggctcggtgaatgtctgcgtcagcagctcccgcggtggcgttgtctgtggcgatctctgcgcctccactactgcccctgttgtctccaccagagtcagtagcgtccccagcaacagcaacgtggtggtgggcactactaacgcctgcgccccctccgcccgggttggcgtctgcggcggcagctgtaagaggtgctaggaggctgccgcctccgccagcgcctgtcgccgtcactctccacccagccagtacctcgcgccaccagaacgcgccgcccgcgccggcctcccaatagccgccgcccgctgcctgcactctaagcgccctccccaccgctccgctccgggagccatccccggtcgcaggagtccggggagggccgggaggcgccatggtctctctctgtagcctttcctggtagtcaatt

SEQ ID NO: 15259 - DNA, 2287 bp, Homo sapiens
  source 1..2287: mol_type = unassigned DNA
ccctgcacttgggagccggtagcactcctatcactgcttctcaacccgtgagctaccagctgtgtcatgagctgcagacagttctcctcgtcctacttgagccgcagcggcgggggtggcgggggcggcctgggcagcgggggcagcataaggtcttcctacagccgcttcagctcctcagggggcggtggaggagggggccgattcagctcttctagtggctatggtgggggaagctctcgtgtctgtgggaggggaggcggtggcagttttggctacagctacggcggaggatctgggggtggttttagtgccagtagtttaggcggtggctttgggggtggttccagaggttttggtggtgcttctggaggaggctatagtagttctgggggttttggaggtggctttggtggtggttctggaggtggctttggtggtggctatgggagtgggtttggggggtttgggggctttggaggtggtgctggaggaggtgatggtggtattctgactgctaatgagaagagcaccatgcaggaactcaattctcggctggcctcttacttggataaggtgcaggctctagaggaggccaacaacgacctggagaataagatccaggattggtacgacaagaagggacctgctgctatccagaagaactactccccttattataacactattgatgatctcaaggaccagattgtggacctgacagtgggcaacaacaaaactctcctggacattgacaacactcgcatgacactggatgacttcaggataaagtttgagatggagcaaaacctgcggcaaggagtggatgctgacatcaatggcctgcggcaggtgctggacaatctgaccatggagaagtctgacctggagatgcagtatgagactctgcaggaggagctgatggccctcaagaagaatcataaggaggagatgagtcagctgactgggcagaacagtggagatgtcaatgtggagataaacgttgctcctggcaaagatctcaccaagaccctcaatgacatgcgtcaggagtatgagcagctcattgctaagaacagaaaggacatcgagaatcaatatgagactcagataacccagatcgagcatgaggtatccagtagtggtcaggaggtgcagtccagtgccaaggaggtgacccagctccggcacggtgtccaggagttggagattgagctgcagtctcagctcagcaagaaagcagctctggagaagagcttggaagacacgaagaaccgctactgtggccagctgcagatgatccaggagcagatcagtaacttggaggcccagatcactgacgtccggcaagagatcgagtgccagaatcaggaatacagccttctgctcagcattaagatgcggctggagaaggaaatcgagacctaccacaacctccttgagggaggccaggaagactttgaatcctccggagctggaaaaattggccttggaggtcgaggaggaagtggaggcagttatggaagaggatccaggggaggaagtggaggcagctatggtggaggaggaagtggaggtggctatggtggaggaagtgggtccaggggaggaagtggaggcagctacggtggaggaagtggttctggaggaggtagtggaggtggctatggtggaggaagtggaggtggccatagcggaggaagtggaggtggtcatagtggaggaagtgggggcaactatggaggaggaagtggctctggaggaggaagtgggggtggctatggtggaggaagtgggtccaggggaggaagtggaggcagccatggtggaggaagtggttttggaggtgaaagtggaggcagctacggaggcggtgaagaagcgagtggaagtggtggcggctacggaggaggaagcggaaaatcatcccattcctagtcttcttcctcaaaatctggtgaccaagatgagacaaaaggcttcctttcgcgatactagagcctctgtaaacttctcctgcccagccccagctgagcatccccagatgggcagactcccgatgaagcctgcttattggatcctgacatcaggaatagctggcaacaagcccctgtgcccgtttgggactgaactgacttggcatatgtgcctctggctttccattggcttccaaccctgcttggctttgatgccttcagggttggggagacagacctctttcctctctctggcctggggtgctctcacaccctgcacgatcttgactataataaagcttccctactgc

SEQ ID NO: 15260 - DNA, 903 bp, Homo sapiens
  source 1..903: mol_type = unassigned DNA
aataggcagccataattcagaaactcctccaagcaacccaaccttcagatcaactcctgacaccatggcctgctgtcagaccagcttctgtggatttcccagctgctccaccagtgggacctgcggctccagctgctgccagccaagctgctgtgagaccagctcctgccagccacgctgctgtgagaccagctgctgccagccaagctgctgccagaccagcttctgtggatttcctagcttctcaaccggtgggacttgtgactctagctgctgccagccaagctgctgtgaaactagctgctgccagccaagctgctaccagaccagctcctgcggaactggctgtggcattggtggtggcattggctatggccaggagggcagcagtggagctgtgagcacccgtatcaggtggtgccgcccagactgccgtgtggagggtacctgcctgcccccctgctgcgtggtgagctgcacacccccatcctgctgccagctgcaccacgccgaggcctcctgctgccgcccatcctactgtggacagtcctgttgccgcccagtctgctgctgctactgctctgagcccacttgttgaaaacctccttctgctggggatcctgataagatggcaccttaaaactagccaaattagaatcctaacaatcttctgaactccagtacctataactgggcttgcaacctctcatcacacagccacataaattccctaggaagtaaattcatttacaatggaagaccaaaaatttttcctagacctggttgtcagccaaagtcctacaatgtgaaaagagttagatactattttactataaatatcacctgaaatatttcaacagttattgggacttaaatttaataaaagttttcatctcttcaatg

SEQ ID NO: 15261 - DNA, 504 bp, Homo sapiens
  source 1..504: mol_type = unassigned DNA
atggcctgctgtcagaccagcttctgtggatttcccagctgctccaccagtgggacctgcggctccagctgctgccagccacgctgctgtgagaccagctgctgccagccaagctgctgccagaccagcttctgtggatttcctagcttctcaaccggtgggacttgtgactctagctgctgccagccaagctgctgtgaaactagctgctgccagccaagctgctaccagaccagctcctgcggaactggctgtggcattggtggtggcattggctatggccaggagggcagcagtggagctgtgagcacccgtatcaggtggtgccgcccagactgccgtgtggagggtacctgcctgcccccctgctgcgtggtgagctgcacacccccatcctgctgccagctgcaccacgccgaggcctcctgctgccgcccatcctactgtggacagtcctgttgccgcccagtctgctgctgctactgctctgagcccacttgttga

SEQ ID NO: 15262 - DNA, 909 bp, Homo sapiens
  source 1..909: mol_type = unassigned DNA
gcaagctacctgcagccctctgtctgacatcatgtccttcaactgctccacaagaaattgctcttccaggcccattggaggacgctgcattgttccagtggcccaagttaccacgacttccaccactgatgctgactgcctgggcggcatctgtttgcccagttccttccagactggctcttggctcctggaccactgtcaagagacctgctgtgagcccactgcttgccagccaacctgttaccggcgaacttcatgtgtctccaacccttgccaggtgacttgctctcgacaaactacctgtatttccaacccctgctcaactacctacagccggccgctcacctttgtctctagtggatgtcagcccctgggaggcatctccagtgtctgccaaccagtgggcggcatctctactgtctgccaaccagtgggaggagtctctactgtctgccagccagcctgtggggtctccaggacgtatcagcagtcctgcgtgtccagctgccgaagaacctgctaagtgtgtaggagccagtgagcgaatcaagactccacgacctgccagctgtttccaggatcttccagcatgctgcttgtccctgaatagctcttcatagctgacccttcttgtgaccgcctgactgctggctactatccatgcacacgctgtctttagcactctaaaatttttctggccagccctaagcttgttttaagggttgctcactggtgctgtgtatgcctctggatgtgtccagaagctttaccatccacaccccagtctctgatgcttttgacatgttttcaccttgctgctgtatctcctggcctctgcttttgtgtctcacaaaaacagagcttgtctcaccatgtatttctcaataaacctgcattagttggcattgc

SEQ ID NO: 15263 - DNA, 966 bp, Homo sapiens
  source 1..966: mol_type = unassigned DNA
aagcaacccagacttcataccagctcccaacaccatgacctgctgccagaccagcttctgtggatatcccagctgctccaccagtgggacatgcggctccagctgctgccagccaagctgctgtgagaccagctgctgccagccaagctgctgccagaccagcttctgcggatttcctagcttctcaactagtgggacctgcagctccagttgctgccagccaagctgctgtgagaccagctgctgccagccaagctgctgccagaccagctcctgcggaactggctgtggcattggtggtggcattggctatggccaggagggcagcagtggagctgtgagcacccgtatcaggtggtgccgcccagactgccgtgtggagggtacctgcctgcccccctgctgtgtggtgagctgcacacccccaacctgctgccagctgcaccacgccgaggcctcctgctgccgcccatcctactgtggacagtcctgctgccgcccagtctgctgctgctactcctgtgagcccacctgctaaaagccagtttgctgattttcaacttgaaatttccactttcagttccattcatgaacgaattatttcttcaagcacttatggacaacgaacaaattcttcaacctttctttgtctttcttatgggggttaccaaatattttggcctcagaattatctgattcctttcaattccagaaagaccttactcttctctctgaggacgccaaaatacaaatttgacccaagaaatgaaaaagccgatttaccttgaaactgagcctttgcaagcattgaagcccacgctctgagtctcagcgccgacgagaccatggaagagccatctgtccttctcaggacactcacttcctgtatcccaccgtcctgcaaattgcaccccctatgaaagaggaataatataccaaggtctaataaattttaactattggtgc

SEQ ID NO: 15264 - DNA, 449 bp, Homo sapiens
  source 1..449: mol_type = unassigned DNA
actcagaaacctctcttaacacagctctcaacccaactcctgacaccatggccagctgttccaccagtgggacctgtggctccagctgctgccagccaagctgctgtgaaactagctgctgccagccaagctgctgccagaccagctcctgcggaaccggctgtggcattggtggtggcattggctatggccaggagggcagcggtggatctgtgagcacccgtatcaggtggtgccacccagattgccacgtggagggcacctgcctgcccccctgctacctggtaagctgcacacccccatcctgctgccagctgcaccacgccgaggcctcctgctgccgcccgtcctactgtggacagtcctgctgccgcccagcctgctgctgccactgctgtgagcccacctgctaaaagccaggttgctgatcgcttaagaatgaaagggga

SEQ ID NO: 15265 - DNA, 942 bp, Homo sapiens
  source 1..942: mol_type = unassigned DNA
cctctacctgctccaccctcaatccaccagaaccatgggctgttgcggctgctccggaggctgtggctccagctgtgggggctgtggctccggctgtgggggctgtggctccggctgtgggggctgtggctctggctgtggaggttctggctccagctgctgtgtgcccgtctgctgctgcaagcccgtgtgctgccgtgtgccaacctgttcctgctccagctgtggcaaagggggctgtggctcttctgggggctccaaggggggctgtggctcctgtggaggctgcaaggggggctgtggctcttgtgggggatccaaggggggttgtggctcctgtgggggctccaaggggggctgtggctcttgtgggggatccaagggtggctgtggttccggctgtgggggatgtggctccagctgctgtgtgcctgtctgctgctgcaagcccatgtgctgctgtgtgccagcttgttcctgctccagctgtggcaaagggggctgtggctcctgtgggtgctccaagggggcctgtggttcttgtgggggctccaaggggggctgtggctcctgtggaggctgcaaggggggctgcggttcttgtgggggatccaaggggggttgtggctccggctgtgggggctgtggctccggctgcggtgtgcccgtgtgttgctgttcctgttccagttgtggctcttgcgcggggtctaagggaggctgcgggtcatcctgctcccagtgcagttgctgtaagccctgctgctgttcctcaggctgtgggtcatcctgttgccaatccagctgctgcaagccctgctgctcccagtccagttgctgtgtccccgtgtgctgccagtgcaagatctgatttctggctttgcaggactcttaccatggccaggcattcctgcccagcctttacctccttttcctggcacc

SEQ ID NO: 15266 - DNA, 1188 bp, Homo sapiens
  source 1..1188: mol_type = unassigned DNA
gaattccacaaggaaatcatctcaggaggaagggctcatacttggatccagaaaatatcaacatagccaaagaaaaacaatcaagacatacctccaggagctgtgtaacagcaaccggaaagagaaacaatggtgtgttcctatgtgggatataaagagccggggctcagggggctccacacctgcacctccttctcacctgctcctctacctgctccaccctcaatccaccagaaccatgggctgctgtggctgctccggaggctgtggctccagctgtggaggctgtgactccagctgtgggagctgtggctctggctgcaggggctgtggccccagctgctgtgcacccgtctactgctgcaagcccgtgtgctgctgtgttccagcctgttcctgctctagctgtggcaagcggggctgtggctcctgtgggggctccaagggaggctgtggttcttgtggctgctcccagtgcagttgctgcaagccctgctgttgctcttcaggctgtgggtcatcctgctgccagtgcagctgctgcaagccctactgctcccagtgcagctgctgtaagccctgttgctcctcctcgggtcgtgggtcatcctgctgccaatccagctgctgcaagccctgctgctcatcctcaggctgtgggtcatcctgctgccagtccagctgctgcaagccctgctgctcccagtccagatgctgtgtccctgtgtgctaccagtgcaagatctgaggctctagtgggaaacctcaggtagctcctgaagatctgtgctttccaacaagtgactacccttgaagcacatccccttctggatctgaaaagagcccttggctcagggcgtctttttccagcccctgaggaaatggaatgaaccactccctgcccattccctataagaatatcccaagacccaggcaattttgcccctctttcccacatgcccccatatgtctgagccaaactgcactgggggctgccctcatgccaagcaagagcctggaattccccttcttgataattccatgggagacagcaaacccttctttcctttgcctgccaggagcttcacgacatttgcagatggatgtcctgcaacccaaatgatcacatgtatctatggaaatccaaaatgcatctgggtgcagcactaaataaattctccatccctc

SEQ ID NO: 15267 - DNA, 2523 bp, Homo sapiens
  source 1..2523: mol_type = unassigned DNA
agcctgaaggactgcttgcctgtgaggagggtcactcttgactggctgcatcaggaccatgtgtgaccagcagcagatccagtgccgcctgccgctccaacagtgctgcgtcaagggtccctccttctgctcctctcaatccccctttgcccagagccaagtggtggttcaagccccttgtgagatgcaaattgtggactgccctgcatcatgcccagttcaagtttgccaggtgtcagaccaggctccatgccagtctcagaccacacaggtgaagtgccagtctaagaccaagcaggtgaagggccaggctcaatgtcagtctaagaccacccaggtgaagggccaggctgcatcccaatctcaaacttcctctgttcaaagccaggctccatgccaatctgaggtgtcctacgtgcagtgcgaagcgtcacaacctgttcagacttgcttcgtagaatgtgctccagtttgttatacagaaacttgttatgtagaatgcccagtccagaactatgtaccctgtccagctcctcagcctgtccagatgtatagagggcgtcctgcagtgtgccagcctcagggaagattctccacccagtgccagtatcaaggctcctatagcagttgtggcccccagtttcagtcaagggctacctgcaacaactacaccccccagttccagttgaggccttcctacagcagctgtttccctcagtatcggtcccggacttcatttagtccctgtgtgccccagtgccagacccagggctcctatgggagcttcactgaacagcaccgctctcggagcaccagcagatgccttcctcctcctcggcggctgcagcttttcccccgcagctgttccccaccaagacgttttgagccctgctccagcagctacctgccactaagaccctctgaaggtttccctaactactgcaccccaccccgccgctctgaacccatatataacagtcgctgtcctcgccgccccatttcaagctgctctcagagacgtggccccaagtgccgaatcgagatttcctccccgtgctgccccaggcaggttcccccacagaggtgtcctgttgagattcctcccatcagacgccgctcccagagctgtggcccgcagccctcctggggcgcctcctgccctgagctgaggccacacgtagagccacgtccactcccaagcttctgtccaccacggcgtcttgaccagtgtccagagtcaccactgcagcgatgtccacctcctgctccacgtccacgtctgcgcccagaaccatgcataagtctagaaccacgcccgcgtcctctaccacgacaactttcagaaccttgtttgtatccagaaccacttccagcactacgtccaacaccgcggccagttccccttcctcgcccagggcagtgtgagattccagagccacgtccatgcctgcagccctgtgagcacccagagccttgtccacgaccagagccaattcccctgccggcgccctgcccaagcccggagccctgcagggagacttggcgcagccccagcccatgctggggcccaaatccagttccatacccaggagacctaggctgtcatgagtctagtccacaccgcctagacaccgaagctccctactgtggcccatccagttacaaccaggggcaagagagtggtgctggctgtgggcctggtgatgtgtttccagagcggaggggtcaggatggccatggagaccaaggcaatgcctttgctggagtgaaaggggaagcaaagagtgcttatttttaaaggaaaggtgactgagataaccctctctcctgctctgaaaatgttgttcctcctattccacaatttccagtacgctcttgtttgaatctctccaaagatattcagagactccctattacgaaggtgatgtccaaactcctttgcctatcatccaaagatccacacctgggtctcagatgcctctccagcctcacgtgtcactcctcgcccgtacgcatcctcggctctagccagaccagtctggccactgggcacagcttgggtgttccccaggccatactttagatgtccctgcctccaagcctctgctcactcttccccactctgcctggaccacttctctcctcctccccagcttctgaaatccaccccatctttcagtgcctctcccttggagccttctttgcttgttcccactcacaagaacctgtgccgacttcctagaactcactgcatcccccgcactacttggtaactgcctggtgacatctcttgaattgttatttcactttgcaggcatgtcttccttatctgcccaactaggttgtaaactcccaactgagtggagtcggagaatctctaaatctcagtgtctatcctggggctggctgttgcttagcaaggcttgtgggttggcagcttgaaccatgttctgtcctgatgctcaactgcaggaactgaggtgagaggaggccatgtgacaataaagatcattatgtactcac

SEQ ID NO: 15268 - DNA, 2162 bp, Homo sapiens
  source 1..2162: mol_type = unassigned DNA
gaagaagatccaagaaggctgaggtaagcagtcttctgaagccctgtcaaagtggaaacaatagatcaaaggtgttcatggtgactgggacgagtaggtttcactgtttctcatagacgacttgacagcttaaagtaaaaacaaattattttcgtcaaagtttttttttttctcttaactgatttttagcaaacctcagactgagacacaggactcaacggtgtattcctggaaggcaaggtgctataatggcaggcacaatctgtttcatcatgtgggtgttattcataacagacactgtgtggtctagaagtgtgaggcaggtctatgaagtacatgattcagatgattggactattcatgacttcgagtgtcccatggaatgtttctgcccacccagttttcctactgctttatattgtgaaaatagaggtctcaaagaaattcctgctattccttcaagaatttggtatctttatcttcaaaacaacctgatagaaaccattcctgaaaagccatttgagaatgccacccagctaagatggataaatctaaacaagaacaaaataaccaactacggaattgaaaaaggagccctaagccagctgaagaagttgctcttcttatttctggaagataatgagctagaggaggtaccttctccattgccaagaagtttagaacaattacaattagctagaaataaggtgtccagaattcctcaagggacctttagcaatctggagaacctgacccttcttgacctacagaacaacaaattagtggacaatgcctttcaaagagacacttttaaaggactcaagaatctcatgcagctaaacatggccaagaatgccctgaggaatatgcctccaagattaccagccaatacaatgcagttgtttttagacaacaattccattgaaggaataccagaaaattattttaatgtgattcctaaagtggcctttttgagactaaatcacaacaaactgtcagatgagggtctcccatcaagaggatttgatgtatcatcaattctagatcttcaactgtcgcacaatcaactcacaaaggttccccgaatcagtgctcatctgcagcaccttcaccttgatcataacaaaattaaaagtgtgaatgtctctgtaatatgtcccagcccatccatgctgcctgcagaacgagattccttcagttatggacctcatcttcgctacctccgtctggatggaaatgaaatcaaaccaccaattccaatggctttaatgacctgcttcagacttctgcaggctgtcattatttaaacacattctcaccaaatctaaaattagtttaatgagctgtttctgacatgaaatgtggttaccattaataggtttaggacacaagtcatattccccattgctctcggccaccattttcatttgtgcagtgtattttttctattcaaagatgcttttgccagttacatgcatcacagcctgcattaatttgcttttcttttaattaataaaacagacacagagttaagatagtttatcaactcaaagatagttttattttggtctcttccatagcttattaacactaaagaaaacaattacattcttatacaataaaaaggacacatttgtgtatgtttaaaattacttatgcagataccgtaatttacagtataaatgtaataatcaaacaggaggataacgacctgaagaaaatgagaaaataaaatatttcttaattgtaatcataataaaacaattgcagattgctaagtagctgttggtggtacaagtttgatatttagcttgagaatgggtatggaatgaatcaaatacttcatcactaaagaattcttgttatttaatatcaaataatgaaacagcagtcacttctagttcattaccatttcttgtagctgttgtttttagatatagtccactgcattcttataagttctaaattttatgtttattataatgcatttcttgtggaatcttagtgttttaacatttgaaatccacttaaactgcaaattgttctttatatttgattgtgttttttggattttctaaataaaaatattgaatgctttctaacaaaacagaatatttcaaagaaattagcaagcttcattaaagaacatgttttaataaaaa

SEQ ID NO: 15269 - DNA, 2397 bp, Homo sapiens
  source 1..2397: mol_type = unassigned DNA
gcagatgcgaggcccagctgtacctcgcgtgtcccgggtcgggagtcggagacgcaggtgcaggagagtgcggggcaagtagcgcattttctctttgcattctcgagatcgcttagccgcgctttaaaaaggtttgcatcagctgtgagtccatctgacaagcgaggaaactaaggctgagaagtgggaggcgttgccatctgcaggcccaggcaacctgctacgggaagaccggggaccaagacctctgggttggctttcctagacccgctcgggtcttcgggtgtcgcgaggaagggccctgctcctttcgttccctgcacccctggccgctgcaggtggctccctggaggaggagctcccacgcggaggaggagccagggcagctgggagcggggacaccatcctcctggataagaggcagaggccgggaggaaccccgtcagccgggcgggcaggaagctctgggagtagcctcatggaagagaagcagatcctgtgcgtggggctagtggtgctggacgtcatcagcctggtggacaagtaccctaaggaggactcggagataaggtgtttgtcccagagatggcagcgcggaggcaacgcgtccaactcctgcaccgttctctccctgctcggagccccctgtgccttcatgggctcaatggctcctggccatgttgctgacttcctggtggccgacttcaggcggcggggcgtggacgtgtctcaggtggcctggcagagcaagggggacacccccagctcctgctgcatcatcaacaactccaatggcaaccgtaccattgtgctccatgacacgagcctgccagatgtgtctgctacagactttgagaaggttgatctgacccagttcaagtggatccacattgagggccggaacgcatcggagcaggtgaagatgctgcagcggatagacgcacacaacaccaggcagcctccagagcagaagatccgggtgtccgtggaggtggagaagccacgagaggagctcttccagctgtttggctacggagacgtggtgtttgtcagcaaagatgtggccaagcacttggggttccagtcagcagaggaagccttgaggggcttgtatggtcgtgtgaggaaaggggctgtgcttgtctgtgcctgggctgaggagggcgccgacgccctgggccctgatggcaaattgctccactcggatgctttcccgccaccccgcgtggtggatacactgggagctggagacaccttcaatgcctccgtcatcttcagcctctcccaggggaggagcgtgcaggaagcactgagattcgggtgccaggtggccggcaagaagtgtggcctgcagggctttgatggcatcgtgtgagagcaggtgccggctcctcacacaccatggagactaccattgcggctgcatcgccttctcccctccatccagcctggcgtccaggttgccctgttcaggggacagatgcaagctgtggggaggactctgcctgtgtcctgtgttccccacagggagaggctctggggggatggctgggggatgcagagcctcagagcaaataaatcttcctcagagccagcttctcctctcaatgtctgaactgctctggctgggcattcctgaggctctgactcttcgatcctccctctttgtgtccattccccaaattaacctctccgcccaggcccagaggaggggctgcctgggctagagcagcgagaagtgccctgggcttgccaccagctctgccctggctggggaggacactcggtgccccacacccagtgaacctgccaaagaaaccgtgagagctcttcggggccctgcgttgtgcagactctattcccacagctcagaagctgggagtccacaccgctgagctgaactgacaggccagtggggggcaggggtgcgcctcctctgccctgcccaccagcctgtgatttgatggggtcttcattgtccagaaatacctcctcccgctgactgccccagagcctgaaagtctcacccttggagcccaccttggaattaagggcgtgcctcagccacaaatgtgacccaggatacagagtgttgctgtcctcagggaggtccgatctggaacacatattggaattggggccaactccaatatagggtgggtaaggccttataatgtaaagagcatataatgtaaagggctttagagtgagacagacctggattaaaatctgccatttaattagctgcatatcaccttagggtacagcacttaacgcaatctgcctcaatttcttcatctgtcaaatggaaccaattctgcttggctacagaattattgtgaggataaaatcatatataaaatgcccagcatgatgcctgatgtgtacaaggctctc

SEQ ID NO: 15270 - DNA, 2411 bp, Homo sapiens
  source 1..2411: mol_type = unassigned DNA
cggggccgccgcgaccgcgggcttcaggcagggctgcagatgcgaggcccagctgtacctcgcgtgtcccgggtcgggagtcggagacgcaggtgcaggagagtgcggggcaagtagcgcattttctctttgcattctcgagatcgcttagccgcgctttaaaaaggtttgcatcagctgtgagtccatctgacaagcgaggaaactaaggctgagaagtgggaggcgttgccatctgcaggcccaggcaacctgctacgggaagaccggggaccaagacctctgggttggctttcctagacccgctcgggtcttcgggtgtcgcgaggaagggccctgctcctttcgttccctgcacccctggccgctgcaggtggctccctggaggaggagctcccacgcggaggaggagccagggcagctgggagcggggacaccatcctcctggataagaggcagaggccgggaggaaccccgtcagccgggcgggcaggaagctctgggagtagcctcatggaagagaagcagatcctgtgcgtggggctagtggtgctggacgtcatcagcctggtggacaagtaccctaaggaggactcggagataaggtgtttgtcccagagatggcagcgcggaggcaacgcgtccaactcctgcaccgttctctccctgctcggagccccctgtgccttcatgggctcaatggctcctggccatgttgctgattttgtcctggatgacctccgccgctattctgtggacctacgctacacagtctttcagaccacaggctccgtccccatcgccacggtcatcatcaacgaggccagtggtagccgcaccatcctatactatgacaggagcctgccagatgtgtctgctacagactttgagaaggttgatctgacccagttcaagtggatccacattgagggccggaacgcatcggagcaggtgaagatgctgcagcggatagacgcacacaacaccaggcagcctccagagcagaagatccgggtgtccgtggaggtggagaagccacgagaggagctcttccagctgtttggctacggagacgtggtgtttgtcagcaaagatgtggccaagcacttggggttccagtcagcagaggaagccttgaggggcttgtatggtcgtgtgaggaaaggggctgtgcttgtctgtgcctgggctgaggagggcgccgacgccctgggccctgatggcaaattgctccactcggatgctttcccgccaccccgcgtggtggatacactgggagctggagacaccttcaatgcctccgtcatcttcagcctctcccaggggaggagcgtgcaggaagcactgagattcgggtgccaggtggccggcaagaagtgtggcctgcagggctttgatggcatcgtgtgagagcaggtgccggctcctcacacaccatggagactaccattgcggctgcatcgccttctcccctccatccagcctggcgtccaggttgccctgttcaggggacagatgcaagctgtggggaggactctgcctgtgtcctgtgttccccacagggagaggctctggggggatggctgggggatgcagagcctcagagcaaataaatcttcctcagagccagcttctcctctcaatgtctgaactgctctggctgggcattcctgaggctctgactcttcgatcctccctctttgtgtccattccccaaattaacctctccgcccaggcccagaggaggggctgcctgggctagagcagcgagaagtgccctgggcttgccaccagctctgccctggctggggaggacactcggtgccccacacccagtgaacctgccaaagaaaccgtgagagctcttcggggccctgcgttgtgcagactctattcccacagctcagaagctgggagtccacaccgctgagctgaactgacaggccagtggggggcaggggtgcgcctcctctgccctgcccaccagcctgtgatttgatggggtcttcattgtccagaaatacctcctcccgctgactgccccagagcctgaaagtctcacccttggagcccaccttggaattaagggcgtgcctcagccacaaatgtgacccaggatacagagtgttgctgtcctcagggaggtccgatctggaacacatattggaattggggccaactccaatatagggtgggtaaggccttataatgtaaagagcatataatgtaaagggctttagagtgagacagacctggattaaaatctgccatttaattagctgcatatcaccttagggtacagcacttaacgcaatctgcctcaatttcttcatctgtcaaatggaaccaattctgcttggctacagaattattgtgaggataaaatcatatataaaatgcccagcatgatg
